United States Patent Application Publication US 2005/0181375 A1 - sequence listing, part 3

SEQ ID NO: 1690 - DNA, 331 bp, Homo Sapiens
  misc_feature (181)..(181): n is a, c, g, or t
gcatcctgaatgcccaggagacgtttaagttatttatgaaaagatgtgtgtacagagaggaagagggagcaaatgccgttcggattatgtttcgattataaatgaattatcacctcgaagtcactttagaacacatgttgagatggtgacatttcccagcctgcctgcccctctgcccacnccggtcacattgccctgagcttctttccatgacagcagcttcgacgagccggcaggaaactcaatgcccctgctggctccatttccatgtaaatggcgccgttcatatttcacagggacgccgtgcatctccgccgtgcgtccccggcac

SEQ ID NO: 1691 - DNA, 1500 bp, Homo Sapiens
agaatgggtatctcaggctgtgagtaatttgatatagaacttttcacctccaggtcagtgggaacacagtaggagcaagggaagggcagaggggcttatttcatataagggcttcttgtcgcctgaactatggttgaagttccctcacagaacagagcagctggtcacagctctgcccaggcatttctgtgtctgcatcttcctgctgtacttgcatatcaagaagcatttcagaccacaggaatgcaggattccaaggcgccaatttaccttggaatttgaaaagatgatggaaatgatgttaaagaaaaagcaaattcgagtgattttcttatttgaggtcaaaatgggtcataaagcagtggagacaactcgcaaaatcaacaacacatttggttcaggaactgctaacaaatgtacagtgcagtggtggttcaagaagttttgcaaaggagaggagagccttgaaaacgaggaaaacagtggctggctataggaagttgacaatgaccaactgagagcaaccatggaagctgatcctcttacaactgcgtgagaagttgccaaggaactcagcgttgagcattctagagtctttcagcatttgaagcaaattgggaaggtgaaaaagctggataagtggatgcctcatgagatgagtgaaaatttaaaaaaaaataaaataaaaaacaaaattgtcattttgaagtgtcatcttctcttactctaagcaacaacaacaaatcatttctcaatcagtttgtgacgttcaatgaaatgtggattttatacgacaactggtgatgaccagctcagtggctagaccaagaagctccaaaacacttcccaaagccaaacttggaccaaaaaaaggtcatgttcgctgtttggtggtctgctgctggtctgatccactattgctttctgactcccggcgaaaccattacatctgagaagtatgctcagcaattcaaagagatgaccgaaaacttcaacccctgcagtcagcaatggtcaacagaaagggcccaattctccacgacaatgcatgatcgcacattacacaactaaagcttcaaaagttgaactaactgggctacgaagttttgcctcatccaccatattcacctgacctcccgccaaccgactaccacttcttcaatcatctcgacaactttttgcaaggaaaacacttccacaaccagtagaatgcaaaaagtgctttccaagagttcactgaatcctgaagcacggatttttatgctacaggaataaacaaacttatttttcattggtaaaaatgtgttgattgtaatggatcctattttgattaatgaagatgtgtttgagcctagttataatgatttaaaattcacgatccaaaaccgcaattacttttgcatcagcctaatatgaggaagtaatagttgaacagaataattctttcctggaagtctggcattttgcctggggagaaggtcattaaaaacttaaacattt

SEQ ID NO: 1692 - DNA, 553 bp, Homo Sapiens
cacgaggccaattgcagtggttgcagttgtcacagtagtcttgcctgggccagactgggctgggctgtgggaagcattccccttcaggggagtttccacagctcagcccaggctccagtctggctagagagcatccagcccattccttgcctcagtgccacctttttctgggcaagtagccaagaagtgactttatatgcagtgagtacttcagataaacttacagctacagctgccgaagagtggagaaggttgaccaccatttatttaattctctagtgtaaaaacaattgagagcagtgtgcgtgagcccacagacacctgtgtttctgggagctctggcagtggcggattcataggcacttgggctgcactttgaatgacacacttggctttattagattcactagtttttaaaaaattgttgttcgtttcttttcattaaaggtttaatcagacagatcagacagcataattttgtatttaatgacagaaacgttggtacatttcttcatgaatgagcttgcattctgaagcaagagcctacaaaagg

SEQ ID NO: 1693 - DNA, 250 bp, Homo Sapiens
ggcacgaggctagccgaagcggctgcatctggcgccgcgtctgccccgcgtgctcggagcggattctgcccgccgtccccggagccctcggcgccccgctgagcccgcgatcacttcctccctgtgaccaaccggcgctgcaggttagagcctggcaatgccgtttgggtgtgtgactctgggcgacaagaagaactataaccagccatcggaggtgactgacagatatgatttgggacaggtcaatcaa

SEQ ID NO: 1694 - DNA, 1389 bp, Homo Sapiens
cgcggacttctgccaagcaccggctcatgtgaggctcgcggcacagcgttctctgggctccccagaagccagcctttcgctcccggacccggcagcccgagcaggagccgtgggaccgggcgccagcaccctctgcggcgtgtcatgggcccgcgccgccggagccgaaagcccgaggccccgaggaggcgcagcccgagcccgaccccgacccccggcccctcccggcggggcccctccttaggcgcttcctcccatcaacacagtcggcggagacaaggttggctaaaggagatccgaaagcttcagaagagcacacacctcttgataaggaagctgcccttcagccgcctggcaagagaaatatgtgttaaattcactcgtggtgtggacttcaattggcaagcccaggccctattggccctacaagaggcagcagaagcatttctagttcatctctttgaggacgcctatctcctcaccttacatgcaggccgagttactctcttcccaaaggatgtgcaactggcccggaggatccggggccttgaggagggactcggctgagctcctgcacccagtgtttctgtcagtctttcctgctcagccaggggggatgataccggggactctccagagccatgactagatccaatggattctgcgatgctgtctggactttgctgtctctgaacagtatgtgtgtgttgctttaaatatttttcttttttttgagaaggagaagactgcatgactttcctctgtaacagaggtaatatatgagacaatcaacaccgttccaaaggcctgaaaataattttcagataaagagactccaaggttgactttagtttgtgagttactcatgtgactatttgaggattttgaaaacatcagatttgctgtggtatgggagaaaaggttatgtacttattattttagctctttctgtaatatttacattttttaccatatgtacatttgtacttttattttacacataagggaaaaaataagaccactttgagcagttgcctggaaggctgggcatttccatcatatagacctctgcccttcagagtagcctcaccattagtggcagcatcatgtaactgagtggactgtgcttgtcaacggatgtgtagcttttcagaaacttaattggggatgaatagaaaacctgtaagctttgatgttctggttacttctagtaaattcctgtcaaaatcaattcagaaattctaacttggagaatttaacattttactcttgtaaatcatagaagatgtatcataacagttcagaattttaaagtacattttcgatgcttttatgggtatttttgtagtttctttgtagagagataataaaaatcaaaatatttaatga

SEQ ID NO: 1695 - DNA, 599 bp, Homo Sapiens
aaccgtcttacatcatacctagcattatgtactagtactcgtgccataatacttaagagacatacaatgatgaatttatacaagtggtgccaaatcccacggcgtttaccatataataatagtaaacagtcattaacacgaactgtaggaagaaaattacaagtaaacatttgcccctaatggagaaaaatgaccttatttttaaatttaaagcataaattgccagtgtggaaacactgctattacatacacctgtattagttcatccttttaaaatgatgctgattgtttttagaaaagaaaatgtcttatgctatattatctttatgattggcttcaaattttaaaacaaaaatttgcttaaagaaaaaaatatagatttataaaatcagattaacactgtacacagagagataaagtgtgttggcaataatatgtaaaaagttgaacacaactgggtctagcagtgaagagttaaatctgaggtaggtatgatgaaggacgcgtccttcatcataccttccacaaaaattagctgggtgtggtgacacaccctgttatccccgctactcaggaggctgaggcaggagaattgcttt

SEQ ID NO: 1696 - DNA, 475 bp, Homo Sapiens
  misc_feature (50)..(50): n is a, c, g, or t
  misc_feature (163)..(163): n is a, c, g, or t
  misc_feature (297)..(297): n is a, c, g, or t
  misc_feature (394)..(394): n is a, c, g, or t
cttctgacagctctctccatggaaggaggcggcggccgcgatgagccttnagcctgccgggcaggggacgtgaacatggatgaccctaagaaggaagacattcttcttttggccgatgaaaaatttgacttcgatctttcattgtcttcttcgagtgcaaatnaagatgatgaagtcttcttcggaccctttggacataaagaaagatgtattgctgccagcttggaattaaataatccggttcccgaacagcctccgttgcccacatctgagagtccctttgcctggagccctctngccggggagaagttcgtggaggtgtacaaagaagctcacttactggctttacacattgagagcagcagccggaaccaggcagcccaagctgcaaagnctgaagaccctcggagccagggcgtggaaagattcatacaggagtcaaaattaaaaataaacctctttgagaaagaaaagg

SEQ ID NO: 1697 - DNA, 530 bp, Homo Sapiens
  misc_feature (336)..(336): n is a, c, g, or t
atttggccctcgaggccaagaattcggcacgaggagctgaaatgctaccatatcataggcagctaaaatctgtttatccatttgggaaggtggcttttcaggtagttatttggctgctcacctggaagaactcacagttcatttttagagattggtttttaaactttggtgttaggacccttttatattttaaaatttgttgagaacccgaaaatgctttgtttatgtagttataattaccagtatttactgtattataaatgaaaaattagaaattaaaaaaattacatattaaaaaatgataaactcattacatgttaacatacataaaagctntaagaaaataaactatttttcaatgcaaaaaagaaattggtgaggagagtggcattgttttacctttccacacatctttttaatgtttggaaaattacaccttaaactcaagagaatgaggggtaaacatcaaataatgtcttagtagtatttggtgacttaaataattttgaccctatgaaccctcaagaagt

SEQ ID NO: 1698 - DNA, 841 bp, Homo Sapiens
acacactaagataacaggatgatcttgaagaccttatagttaatgggatgagagcaaaagcatggtgacatttctactgaaatattcaaaagattgggtaaaaacctaccctcccttgtaaacttctttgaaatgagcaaggaaacaattattaaatgtgaaaaacagaaaccaagatttcatgcttttctcaagataaaccaagcaaaaccagaatgtggacggcagagccttgtgaacttcttatccgaccagtacagaggttacccagtgtgcattacttttaaatgatcttaagaagcatacagctgatgaaaatccagacaaaagcactttagaaaaagctattggatcactgaaggaagtaatgacgcatattaatgaggatacgagaaaaacagaagctcaaaagcaaattttgatgtggtattatgaagtagatggatgcccagctaatcttttatcttctcaccgaagcttagtacagcgggttgaaacaatttctctaggtgagcacccctgtgacagaggagaacaagtaactctcttcctcgttcaatgatggcctagagattagctaagaagaacggcacaaggttataggcactttaaggacgtcctacatggtccaaacccgagcccccagaattctctttacagacatattcaacctaatgccttcttctcagattaaagaaggtatggcccatcacagaacaccagaagaatgggcattaatgcttttggcttgcttgtgaaggccccacaaaagagacaacaaatgtgcaactcagtgttccagatgacatccgattggttcccaacgaacggtaaaatacgg

SEQ ID NO: 1699 - DNA, 803 bp, Homo Sapiens
ccttcatctggtgtgcggacagaagcaccaccctgcccctaggctccagccatcccacaccagctcctaggcactgagagcacgagcatgggcatagcgcgctggctaggactccagtaccgtgaagggaggcagtgagagcagacatctgtgcctcattcctgatctcagggggaaagcaagaacaagggaggcttcctcaggatctcgaacctgcggaaggaggaccagtctgtgtacttctgccaagtccagctggacatacagatcagggaggctgtcgtggcagtccatcaaggggacccacctcaccatcacccaggccctcaggcagcccctccacagggcccctctcctgcctggacagctctgctggtctccccgtcccctggagaagaacaaggccatgggtcggcccctgctgctgcccctgctgctcctgctgcaggcgccagcatttctgcagcctgagggtcaggagagcggcttcctcaggatctcaaacctgcggaaggaggaccagtctgtgtatttctgccgagtcgagctggaccacccgagatcagggaggcagcagttgcagtccatcaaggggaccaaactcaccatcacccaggctgtcacaaccaccaccacctggagggccagcagcacaaccaccatagccgggctcaggggcacagaaagcaaagggactcagaatcatggcacctaaggctggacactggcatcaggggttgcttggcttggcggtgggctcaaaactgcattttgggacctgtggggctctctcctgggtggag

SEQ ID NO: 1700 - DNA, 6267 bp, Homo Sapiens
cttccatgtgtgaaagctacttggcatgaatgcctgggccgtaccaagtgtcaccgcagcaagagggggagtcagaagaaaaacagatcagaccaagcagacaataggcccctaaagtgttccccctaagttgctttgatgttgtcctggtgtcttgataccaggaggccagggattgcgggaaaagggtcttttttgtcttcattcactttcccccctcagtttctgaaatgattctccagaatttctcctcataaaaaaggactgaatgtgggcccagttggcgtcattctgctttgacctaaacattcccatctgattgggtggcagagatcatttttggaaagttcttccgtgtcccgatgtagaagaaatagcaaattggacatattgaaagacaagggtcatctttgagaagggggttcctggactcctcacctccaggatgagcactgcagtgtcgtgacccttggggttttgtatgccctggagatgcgagattttcctctggcagcaggaggcacgcacccagagaatgctggagctgcaaggggaaaggacccacttccacagcagagaaaaacaaagaggaaaaaggcatacaggcagcgagcgctaagggacgcacccagcaagcagtgggccagtgccactgcccccagcagctgtttctgctgcaacccgagaggaactcggtgagcctgtcccgtttgtgactgcaagctcaggatttcaatcaatgcattccagtaaccctaaagtgaggagctctccatcaggaaacacacagagtagccctaagtcaaagcaggaggtgatggtccgtccccctacagtgatgtccccatctggaaacccccagctggattccaaattctccaatcagggtaaacaggggggctcagccagccaatcccagccatccccctgtgactccaagagtgggggccatacccctaaagcactccctggcccaggtgggagcatggggctgaagaatggggctggaaatggtgccaagggcaaggggaaaagggagcgaagtatttccgccgactcctttgatcagagagatcctgggactccaaacgatgactctgacattaaagaatgtaattctgctgaccacataaagtcccaggattcccagcacacaccacactcgatgaccccatcaaatgctacagcccccaggtcttctaccccctcccatggccaaactactgccacagagcccacacctgctcagaagactccagccaaagtggtgtacgtgttttctactgagatggccaataaagctgcagaagctgttttgaagggccaggttgaaactatcgtctctttccacatccagaacatttctaacaacaagacagagagaagcacagcgcctctgaacacacagatatctgcccttcggaatgatccgaaacctctcccacaacagcccccagttccggccaaccaggaccagaattcttcccagaataccagactgcagccaactccacccattccggcaccagcacccaagcctgccgcacccccacgtcccctggaccgggagagtcctggggtagaaaacaaactgattccttctgtaggaagtcctgccagctccactccactgcccccagatggtactgggcccaactcaactcccaacaatagggcagtgacccctgtctcccaggggagcaatagctcttcagcagatcccaaagcccctccgcctccaccagtgtccagtggcgagccccccacactgggagagaatcccgatggcttatctcaggagcagctggagcaccgggagcgctccttacaaactctcagagatatccagcgcatgctttttcctgatgagaaagaattcacaggagcacaaagtgggggaccgcagcagaatcctggggtattagatgggcctcagaaaaaaccagaagggccaatacaggccatgatggcccaatcccaaagcctaggtaagggacctgggccccggacagacgtgggagctccatttggccctcaaggacatagagatgtacccttttctccagatgaaatggttccaccttctatgaactcccagtctgggaccataggacccgaccaccttgaccatatgactcccgagcagatagcgtggctgaaactgcagcaggagttttatgaagagaagaggaggaagccggaacaagtggttgtccagcagtgttccctccaggacatgatggtccatcagcacgggcctcggggagtggtccgaggacccccccctccataccagatgacccctagtgaaggctgggcacctgggggtacagagccattttctgatggtatcaacatgccacattctctgcccccgaggggcatggctccccaccccaacatgccagggagccagatgcgcctccctggatttgcaggcatgataaactctgaaatggaagggccgaatgtccccaaccctgcatctagaccaggtctttctggagtcagttggccagatgatgtgccaaaaatcccagatggtcgaaattttcctcctggccggggcattttcagcggccctggccgaggggaacgcttcccaaacccccaaggattgtctgaagagatgtttcagcagcagctggcagagaaacagctgggtctccccccagggatggccatggaaggcatcaggcccagcatggagatgaacaggatgattccaggctcccagcgccacatggagcctgggaataaccccattttccctcgaataccagttgagggccctctgagtccttctaggggtgactttccaaaaggaattcccccacagatgggccctggtcgggaacttgagtttgggatggttcctagtgggatgaagggagatgtcaatctaaatgtcaacatgggatccaactctcagatgatacctcagaagatgagagaggctggggcgggccctgaggagatgctgaaattacgcccaggtggctcagacatgctgcctgctcagcagaagatggtgccactgccatttggtgagcacccccagcaggagtatggcatgggccccagaccattccttcccatgtctcagggtccaggcagcaacagtggcttgcggaatctcagagaaccaattgggcccgaccagaggactaacagccggctcagtcatatgccaccactacctctcaacccttccagtaaccccaccagcctcaacacagctcctccagttcagcgcggcctggggcggaagcccttggatatatctgtggcaggcagccaggtgcattccccaggcattaaccctctgaagtctcccacgatgcaccaagtccagtcaccaatgctgggctcgccctcggggaacctcaagtccccccagactccatcgcagctggcaggcatgctggcgggcccagctgctgctgcttccattaagtccccccctgttttggggtctgctgctgcttcacctgtccacctcaagtctccatcacttcctgccccgtcacctggatggacctcttctccaaaacctccccttcagagtcctgggatccctccaaaccataaagcacccctcaccatggcctccccagccatgctgggaaatgtagagtcaggtggccccccacctcctacagccagccagcctgcctctgtgaatatccctggaagtcttccctctagtacaccttataccatgcctccagagccaaccctttcccagaacccactctctattatgatgtctcgaatgtccaagtttgcaatgcccagttccaccccgttataccatgatgctatcaagactgtggccagctcagatgacgactcccctccagctcgttctcccaacttgccatcaatgaataatatgccaggaatgggcattaatacacagaatcctcgaatttcaggtccaaaccccgtggttccgatgccaaccctcagcccaatgggaatgacccagccactttctcactccaatcagatgccctctccaaatgccgtgggacccaacatacctcctcatggggtcccaatggggcctggcttgatgtcacacaatcctatcatggggcatgggtcccaagagccaccgatggtacctcaaggacggatgggcttcccccagggcttccctccagtacagtctcccccacagcaggttccattccctcacaatggccccagtggggggcagggcagcttcccaggagggatgggtttcccaggagaaggcccccttggccgccccagcaacctgccccaaagttcagcagatgcagcactttgcaagcctggaggccccgggggtcctgactccttcactgtcctggggaacagcatgccttcggtgtttacagacccagatctgcaggaggtcatccgacctggagccaccggaatacctgagtttgatctatcccgcattattccatctgagaagcccagccagacgctgcaatatttccctcgaggggaagttccaggccgtaaacagccccagggtcctggacctgggttttcacacatgcaggggatgatgggcgaacaagcccccagaatgggactagcattacctggcatgggaggtccagggccagtgggaactccggacatccctcttggtacagctccatccatgccaggccacaaccccatgagaccaccagcctttctccaacaaggcatgatgggacctcaccatcggatgatgtcaccagcacaatctacaatgcccggccagcccaccctgatgagcaatccagctgctgccgtgggcatgattcctggcaaggatcgggggcctgccgggctctacacccaccctgggcctgtgggctctccaggcatgatgatgtccatgcagggcatgatgggacccaacagaacatcatgatccccccacagatgaggccccggggcatggctgctgacgtgggcatgggtggatttagccaaggacctggcaacccaggaaacatgatgttttaagctgctaagatgggatgtgccgatccttgtcaaaatgagattccaggtcctgagagctgctttgagggagttccaggagtacttactattggtcatgcaataggagaacagagacccgagggctgctttgggggaggggggaactcgagaatgtatggatttacctgaaaacaaattattcatttaatcaacaggtgtgttttttttaagatttattttttaaaaattatttttgtggacttgggtatcaatgatggcacctacttttgggaatctgtagctgtgctttgagaattgccatcggtcatgtgttgcaccgttctctgtatgtttacgtcctttggactggcttctcccaggattcttttctgtttttgtttttttgatttgggctttatttttttctgtgtactgtactatattgtaaaagggattttagcagagactttagtctttggggcaagaggagaacaggaatgctgggctgtttactttaggtggagaatccatcttcagacctttggactattttctttcaactgcagtgtatagaaaaaccaaactacgacctcagagcagagtattaatgaaaagcacaaaaaaaggaactaagttcagcgaggggtggggggaggggggagatttttcttttgaaaaataatgactcttaggacatttgtttttaagttcaagtgctcttcagcactgtcttgtctcccaatataccaacccactggcacattttctctgtttctctctccgattttgctctgtctcctcagttaagtgtttccttcctttgtgccccccgctggtgaccctctgcttccctctctctttccctttggcagctgcaatacacagtgttattttggggaaataaatctagcaaagcctcgccttccatgccgagcgtcctcttggctctgagagggaaagtctgtcctgggatgcttctctgtcttttttccccctaagtctttctctttcccatcatacccttccctgccccaccttgttttctgttccccttttattaggaattcccaagtgaattttattaatgtgggagtggaacagatgctaaaagctatccaggattttgtttctgtttgttttaaattttgtggttccttccctttcctccccctcccatgcgtaagacgttctgtgtaacctccattaaatttggtacaaaaccactcgccagagctgtggtgtcagaaaaataaaatatattgtttctta

SEQ ID NO: 1701 - DNA, 369 bp, Homo Sapiens
atttaaggctgtacttaactaatttgggctgaggatgaatatatcagccacagcacattaaagaatgagccaaggatttgtcatggttggtcactttttaaagtatttgattactgcaactggagaatgaaaagtgtatattggtgacgccaacctcagtttctgagcactcctgctctgtggtgagaatcagacaaaaattcatcggggtgaaaaaaaaaaggcattacctgattcacacccttgtcttgctagccctcttccattcatttctcacacagcactttgctctgttaaatcctctctctgtctcagaccattgcttgccccttcaaagggtatggttcaggctcctttcaagacatttgg

SEQ ID NO: 1702 - DNA, 343 bp, Homo Sapiens
ttttttttatgactgcaagacacagtttattggctagaaaacacacatggataaatcataacaataaacaaaagatgtgcatttttataaaccgaaatgaaatggacagtgcttctgaaaattaaagaagggggctacaaaatacaacactcaataactcagacaatttaaacccacaaatgtgagaccaccacaattaaaattataaaaaagaagctactgagtaactctgggcatatttcaagactgtttcctaatcacatgcatttaatatccaatatattgaattttaaagcactataagcccaaaatgaaagaaccagaccgtagccaaagcaacaac

SEQ ID NO: 1703 - DNA, 2564 bp, Homo Sapiens
ggaggagctcatcgggcagattagcgacatccgagtgcagaacctgcaagttgagagggaaaatgtgcagaagaggacctttacacgatggataaatctacatctagaaaagtgcaacccacctctagaagttaaagatttattcgtcgatatacaagatggcaaaatcctaatggctttgttagaagtcctgtctgggcggaatctgctgcacgaatacaaatcctcgtcgcatcgtatttttcggttgaacaacatagcgaaagcacttaagtttttggaagatagcaatgtaaaactggttagcattgatgcagcagaaatagcagatggcaacccttctttggttcttgggctgatatggaacataatcctcttcttccagattaaggagctcacaggcaacctcagcagaaactctccatcttccagcttgtcccctggctcagggggcacagactcagactcatccttcccacccacacccactgcagagaggagcgtggcaatatcggtgaaagaccagaggaaggctatcaaggccctgttggcgtgggtgcagaggaaaacgagaaagtatggcgtggcggtgcaggactttgcgggcagttggaggagtgggctggctttcctggcggtgatcaaggccattgaccccagcctggtggacatgaaacaggccctggaaaattccacacgagaaaatctagagaaggctttcagcatcgcacaggatgccctgcacatccccaggctcctggagccagaagacatcatggttgacacaccagacgagcagtctatcatgacttacgtggcacagtttctagaacgttttccggagttggaagccgaagatattttcgattcagataaagaagttcctatcgaatccacttttgttcgcatcaaagaaactccttctgaacaggagagcaaagtcttcgttctgactgaaaatggggagcgtacctacactgttaaccatgaaaccagccacccaccaccctccaaagtctttgtctgtgacaagcccgagagcatgaaggaattccgcctggatggtgtttccagccatgcgctgtcagacagctccaccgagttcatgcaccagattattgaccaggtcctgcaagggggcccaggtaagaccagcgacatcagtgagccatctccagaatcctccattttatcatccagaaaggagaacgggaggtccaactctttgccgatcaagaaaacagttcactttgaggctgacacctacaaggatcctttctgcagtaagaacctgtccctttgctttgaagggagcccaagagtggcaaaggaatcattgaggcaggatggacatgtcttggcagttgaggttgctgaggaaaaggaacagaaacaggaatcctcgaagattccagaatcctcctctgacaaggtcgctggtgacatttttttggtggagggcacaaacaataattctcagtcttcttcctgtaatggtgctttagagagtacagcccgccacgatgaagaaagtcactctctttcacccccaggagaaaatactgtgatggccgattccttccagatcaaggttaacctgatgactgtagaagctttagaggagggagactattttgaagccatcccattaaaagcctcaaaatttaacagcgacctaatagattttgcttctaccagccaggctttcaacaaagttccttcacctcatgagacaaaacctgacgaggatgctgaggcttttgagaatcatgctgaaaaactaggtaaaaggagtattaaatctgctcacaaaaagaaggattcgccagagcctcaagttaagatggacaaacatgaacctcatcaggactccggagaagaagctgaaggctgtccttcagccccagaagagacaccagtggataaaaagccagaggtgcatgaaaaggccaagagaaagtccacccgtcctcattatgaggaagagggagaagacgatgacctccagggtgtgggcgaggaattatcttccagccccccaagcagctgtgtcagcttggagacccttgggagtcacagcgaagaaggcctggatttcaagccctccccacccctctcaaaggtttccgtcattccccacgacctcttctatttcccacactatgaggttcccctggctgcagttttggaggcttatgtagaagacccggaggatctaaaaaatgaagaaatggatctcgaagagccagagggctatatgccagacctggactccagggaggaggaggccgatggctctcagagcagctccagttcctcggtgccaggagagagcctccccagtgccagcgaccaggtgctgtatctcagcaggggtggtgtgggtaccacaccagcctcagaacccgctccactggccccccatgaggaccaccagcaaagggagaccaaagagaatgaccccatggacagccatcagtcccaggaatccccaaacctggaaaacatagcaaaccccctagaagaaaatgtaacgaaagaatcaatcagtagtaaaaaaaaaa

SEQ ID NO: 1704 - DNA, 280 bp, Homo Sapiens
  misc_feature (93)..(93): n is a, c, g, or t
  misc_feature (127)..(127): n is a, c, g, or t
  misc_feature (254)..(254): n is a, c, g, or t
ccaagatggctgcctccatagtgcggcgcgggatgctcctggcgcggcaagtggttcttcctcagctctctcctgcaggtaaaagatacctgntttcttcagcctatgtagacagccacaaatgggnagcaagagaaaaagaacattactgtcttgctgatcttgcatctttaatggataaaacatttgagagaaagttgcctgttagttctttaacaatatcacggcttatagacagcattttcctctcgggnagagatagatcatgcagagtattacc

SEQ ID NO: 1705 - DNA, 237 bp, Homo Sapiens
  misc_feature (5)..(5): n is a, c, g, or t
  misc_feature (16)..(17): n is a, c, g, or t
  misc_feature (43)..(43): n is a, c, g, or t
taccncacgcgtcctnncacgctgcagctttcacgaggcatcntggcctactcattagaaacattagtcccgcgcgtcttgtgctgcgcgtgcgcaagcttttgggccctcccgagaatgttaagtgctttctcgcttccgtagcggtctccgccggttgggggaaagtaattccggctgttgcaccatggcgtccatggggaccctcgccttcgatgaatatgggcgccctttcct

SEQ ID NO: 1706 - DNA, 3997 bp, Homo Sapiens
caagatgtcggcggatggtagcttcgagcccttgcggagaggagcatctctgtgacagaagcttgtcgacggcggcttctaggagctagtcgaaggagcgaggttgaggcgggcagcgacccgtcaggtcgctcacctgggcaccggccagctgcgagacgtgacttggggaccgcaggggagtggagagtgtgaggtgccaaagactagtaatgccccgtatccccctaggaagccgggaagccaagctccgcgggaccgcttcatgccgctgactggtgtagagcccgccagaatgaacaggaagaaaggagacaagggctttgaaagcccaaggccatataaattaacccatcaggtcgtctgcatcaacaacataaatttccacagaaaatctgttgtgggatttgtggaactgactatattccccacagttgcaaacttgaatagaatcaagttgaacagcaaacagtgtagaatataccgagtaaggatcaatgatttagaggctgcttttatttataatgacccaaccttggaagtttgtcacagtgaatcaaaacagagaaacctcaattatttttccaatgcttatgcagctgcagttagtgctgtggaccctgatgcaggaaatggagaactttgcattaaggttccatcagagctatggaaacacgttgatgagttaaaggtcctgaagatacacatcaatttttctttggatcagcccaaaggaggtcttcattttgtggtacccagtgtagagggaagtatggcagagagaggtgctcatgttttctcttgtgggtatcaaaattctacaagattttggttcccttgtgttgattcatactctgaattgtgtacatggaaattagaatttacagtagatgctgcaatggttgctgtttctaatggcgatttggtggagacagtgtatactcatgatatgaggaagaaaactttccattatatgcttaccattcctacagcagcgtcaaatatctccttggccattggaccatttgaaatactggtagatccatacatgcatgaggttactcatttttgtttgccccaacttcttccattgctgaaacataccacatcataccttcatgaagtctttgaattttatgaagaaattcttacatgtcgttacccatactcctgttttaagactgtcttcattgatgaggcttatgttgaagtggctgcttatgcttccatgagcatttttagcacaaatcttttacacagtgccatgattatagatgagacacctttgactagaaggtgtttagcccaatccttggcccagcagttttttggttgtttcatatctagaatgtcttggtctgatgaatgggtgctgaagggaatttcaggctatatctatggactttggatgaaaaaaacttttggtgttaatgagtaccgccattggattaaagaggagctagacaaaatagtggcatatgaactaaaaactggtggggttttactacatcccatatttggtggaggaaaagagaaggataatccggcttcccatctacacttttcaataaagcatccacatacactgtcctgggaatactacactatgtttcagtgtaaagcccaccttgtgatgagattgattgaaaataggatcagtatggaatttatgctacaagttttcaataaactgctaagtctggctagtactgcttcatctcagaagttccagtcacatatgtggagtcagatgttggtttccacatctgggtttttgaaatccatttcaaatgtctctggcaaagatattcagccgttaataaagcagtgggtagatcagagtggagtggtaaaattttatggaagttttgcatttaatagaaaacgaaatgtcttggaactggaaataaaacaggactatacatctcctggaactcagaaatacgtgggaccacttaaagtgacagtgcaggagttagatggatccttcaatcatacactgcaaattgaagaaaacagccttaaacatgatataccctgccattccaaaagtagaaggaataaaaagaaaaaaatcccactgatgaatggagaagaagttgatatggatctttctgcaatggatgctgattcccctttgctgtggataaggatagacccagatatgtcagtattgaggaaggtagaatttgagcaagctgattttatgtggcagtatcagctccgctatgagagagatgttgttgcacagcaggaatccattttggctttggaaaaattccctactccagcatctcggcttgcactcactgatatattagaacaagagcagtgtttctacagagtaagaatgtcagcttgtttctgtcttgcaaagattgcaaattcaatggtgagcacatggacaggaccaccagccatgaagtcactcttcactaggatgttttgttgtaaaagttgtccaaacattgtgaaaacaaacaactttatgagctttcaaagctattttctacagaagactatgccagttgcaatggctttattaagagatgttcataatctttgtcctaaagaagtcttaacatttattttagacttaatcaagtacaatgacaacaggaaaaataagttttcagataactattatcgtgcagaaatgattgatgccctggccaactctgttacacctgcagtcagtgtgaataatgaagttagaactttggataacttaaatcctgatgtgcgactcattcttgaagaaatcaccagatttttgaatatggaaaaacttcttccgagttacaggcataccatcactgtcagttgtttgagagccatacgggtacttcagaagaacggacatgtgccaagtgatccagctctttttaaatcttatgctgaatatggccactttgtggacattaggatagcagctttggaagcagttgttgattatactaaagtggacagaagttatgaagaactgcaatggctacttaatatgattcagaatgaccctgtaccctatgtaaggcataagattctcaacatgttgactaagaaccccccatttactaagaacatggagtctcccttatgcaatgaagccctggtagatcaactttggaaacttatgaattctggtacttcacatgactggaggttacggtgtggtgctgtggacttgtacttcacactttttggcctcagtagaccttcctgtttacccttgccagagcttgggttggttcttaatctaaaggagaaaaaagctgtcttgaatcctaccataattccagagtcagtagcaggcaaccaagaagctgcaaataatccaagcagtcacccacagctagttggatttcagaaccctttttccagttctcaagatgaggaggagattgatatggatactgttcatgatagccaggccttcatttcccatcatttaaacatgcttgaaaggccgtcaactccagggctctcgaaatatcggccagctagctcccgatctgctttaataccccagcactcagcaggctgtgacagcacacccaccacaaaaccccagtggagtttggaacttgcacggaagggaacaggtaaagaacaagcacctttggagatgagtatgcatccagcggcaagcgctccactctcagtctttactaaggaatctacagcctccaaacacagtgaccaccatcaccaccatcaccatgagcacaagaaaaagaagaagaagcataaacataagcacaaacacaagcataagcatgacagtaaagaaaaggacaaggagcctttcactttctccagccctgccagtggcaggtctattcgttctccttccctttcagactgagaaggggacaaaaagacctttcctttcatgtccagaagaatgtatgtaactaaagctttgtcctctgtgaagaattataaatggaggggggaaaggattcgcctctcctacagaaattctgaattcatttaa

SEQ ID NO: 1707 - DNA, 441 bp, Homo Sapiens
tagcaggagatatgattacttggagataagacagttttgttacatcatttacatttggtatcccacctaatagagacacagcttttgaaatctacaatattttacattttggtcatcatttaatgctatttgcatttctctttaacattttaatagtatttgtgatatatcatgtttaactgaaagctttgggttatatattttaaaggaatatcttactttttgactaaatagttctgtaagggcctaatatttgaaaaattagcttgttacctgaagcaactatcctccttaatcattttaaaataatgggtaaagatgcatctttgtaaatatattttgaaaacttgattagtgtattagaaacagacaccagaaattaaaaaaattatttctaggactggcatacactacagtgaattacttcaaatgttactctag

SEQ ID NO: 1708 - DNA, 449 bp, Homo Sapiens
acgcgtccgcgcgcactccgccgccatggagcagcgccgcgtcaccgacttcttcgcgcgccgccgccccgggcccccccgcatcgcgccgcccaagctggcctgccgcacccccagccccgccaggcccgcactccgcgccccggcctccgctaccagtggcagccgcaagcgcgcccgcccgcccgccgcccccggacgcgaccaggccaggccaccggcccgcaggagactgcggctgtcggtggacgaggtttccagccccagtacccccgaggccccagacatcccagcctgcccttctccgggccagaagataaagaaatccaccccggcagcaggtcagccgccccacctgacatccgcgcaggaccaggacaccatctctgagcttgcgtcatgcctgcaacgggcccgggagctgggggcaagagtccgggcgctgaagg

SEQ ID NO: 1709 - DNA, 373 bp, Homo Sapiens
caaatactgaaaatgggtcattgggtgagcacttagccagtaaaaatctgtgctttgtataaaaagaactttggactgaggttatatgagtcttcctgcaggctggagacctctgttacctttacttctctacttttgttgtcttgagaccagcttttttatttttggtgaggagaacagcaggcagttcaaatgtcagggaaagacaagttcagcttgctttttccttatttctgtcttgttacctgctatcctgccaggttagaaagatggaatcactcccttttgccctatcatcaagacttcagtgttccctggggcactctaaaatttgccatcagacttgggatccatcctctaattaccaaggtcc

SEQ ID NO: 1710 - DNA, 2826 bp, Homo Sapiens
ctgcaggcggccctggagggggcgccctcgccgagcgcgcgccccgcgccgccgccccggactcctccccggcgccgcgcgggcaggttcgaccaggcggccgcgggctccggttcccggccagctccccagggcccgcggcgccccgccccgcgcgcccgccccgctgcgctaactcgacccaagttggaagccgatcgcaggcggccgcactcgcgcccagcgagggcggcggcggcggcggcggcgcagctccggcgagcgaggcggcggccgcacggcaagcgtggaccgcggggggcgcccgcgccgggagcagccggaggactcgcggcggcgccggcgccccgcccgggaaagtaaagttggagacggagggagcgcgcggggcgggcccggaggagcggcggccggcgccccggcgcgcgcagccctagccgccggatgggaggcggacggcccgggccgccgccgccttgtcgcctgcgccccggctgggctccgggaccgcggggccgctacggcaccgccgctcggcccgcgtcgcgtgggctcgccgccggggcgctcccgtgagccgggccgaggcggggcgcgcgaggaccccgggacctgcccccctccccccgcagccgcgtcgccgctcgctccgggcgcctcctgctctgcacttacacgctcggcagctgcggggagcccggcagccacgctctccggcgcgccgcccgcggagccaccacggccgagggccggctgctgggcgccgcggtccccggcgggcgcgcccgagcagcaggcggcgatgcgggcgccgaccccggctggggggcgcccgagctgccgcggctgcgccccggctccaggaggggcggcgtagcccgcgggaggaccatggcgtccccggcgctggcggcggcgctggcggtggcggcagcggcgggccccaatgcgagcggcgcgggcgagaggggcagcggcggggttgccaatgcctcgggggcttcctgggggccgccgcgcggccagtactcggcgggcgcggtggcagggctggctgccgtggtgggcttcctcatcgtcttcaccgtggtgggcaacgtgctggtggtgatcgccgtgctgaccagccgggcgctgcgcgcgccacagaacctcttcctggtgtcgctggcctcggccgacatcctggtggccacgctggtcatgcccttctcgttggccaacgagctcatggcctactggtacttcgggcaggtgtggtgcggcgtgtacctggcgctcgatgtgctgttttgcacctcgtcgatcgtgcatctgtgtgccatcagcctggaccgctactggtcggtgacgcaggccgtcgagtacaacctgaagcgcacaccacgccgcgtcaaggccaccatcgtcgccgtgtggctcatctcggccgtcatctccttcccgccgctggtctcgctctaccgccagcccgacggcgccgcctacccgcagtgcggcctcaacgacgagacctggtacatcctgtcctcctgcatcggctccttcttcgcgccctgcctcatcatgggcctggtctacgcgcgcatctaccgagtggccaagcgtcgcacgcgcacgctcagcgagaagcgcgcccccgtgggccccgacggtgcgtccccgactaccgaaaacgggctgggcgcggcggcaggcgaggcgagaacgggcactgcgcgcccccgcccgccgacgtggagccggacgagagcagcgcagcggccgagaggcggcgcgccggggccgttgcggcggggcgggcggcggcgagcgggcgcggaggggggcgcgggcggtgcggacgggcagggggcggggccgggggcggctcagtcgggggcgctgaccgcctccaggtccccggggcccggtggccgcctctcgcgcgccagctcgcgctccgtcgagttcttcctgtcgcgccggcgccgggcgcgcagcagcgtgtgccgccgcaaggtggcccaggcgcgcgagaagcgcttcacctttgtgctggctgtggtcatgggcgtgttcgtgctctgctggttccccttcttcttcatctacagcctgtacggcatctgccgcgaggcctgccaggtgcccggcccgctcttcaagttcttcttctggatcggctactgcaacagctcgctcaacccggtcatctacacggtcttcaaccaggatttccggccatccttcaagcacatcctcttccgacggaggagaaggggcttcaggcagtgactcgcacccgtctgggaatcctggacagctccgcgctcggggctgggcagaaggggcggcccggacgcgggggagctttcccagagacccggggagctttcccagagacccggggatggattggcctccagggcgcaggggagggtgcggcagggcaggagcttggcagagagatagccgggctccagggagtggggaggagagagggggagacccctttgccttcccccctcagcaaggggctgcttctggggctccctgcctggatccagctctgggagccctgccgaggtgtggctgtgaggtcagggttttagagagcagtggcagaggtagccccctaaatgggcaagcaaggagccccccaaagacactaccactccccatccccgtctgaccaagggctgacttctccaggacctagtcggggggtggctgccagggggcaaggagaaagcaccgacaatctttgattactgaaagtatttaaatgtttgccaaaaacaacagccaaaacaaccaaactattttctaaataaacctttgtaa

SEQ ID NO: 1711 - DNA, 359 bp, Homo Sapiens
  misc_feature (46)..(46): n is a, c, g, or t
  misc_feature (64)..(64): n is a, c, g, or t
  misc_feature (99)..(99): n is a, c, g, or t
  misc_feature (232)..(232): n is a, c, g, or t
  misc_feature (317)..(317): n is a, c, g, or t
ccaatctccacttccggactcatccagccccttctccacccctttnagagacagcgcgattgcnatttaggtttccgcgcatttaattggcgaagtggnagcgctagtcttcgctgattggtgccgagaaatctgccccatagacacccgcggggcgcacagtttcagtcgtccgtgggtttcccgccagccgcagtcttggaccataatcatggtggacatgatggacttncccaggtcgcgcatcaacgccggcatgctagctcaattcatcgacaagcctgtctgcttcgtagggaggctggaaaagattcatnccaccggaaaaatgtttattctttcagatggagaaggaaaaa

SEQ ID NO: 1712 - DNA, 503 bp, Homo Sapiens
  misc_feature (343)..(343): n is a, c, g, or t
tactttttttttttgttcctttttttctttttttggcgggggatggggtgggaagaccttctggaaaaagtttcctggcttttggaaagaggtacataggaaagaaacagtcccttttcttctgctagttatagttttgtttgcctacggtatttgtaatcatggcatgccaaggattgcagagaaaaagagaaagaacctgggtccttgataacatccctgaatctctgaagtaaccacaccttggtctgctttcattttggattgtcaattgggtcaaaatattttctttattgttttactatgctgagttgatctttttttctttccttgtggctgaaanatcttaaccaagacactgactgagaaccttggccagacctgctcacagaaagcccttaagtggacacatgtaaaactcctagtacttgcagtgcagtgaagctgagcgacctagtgctgaaacagtaaagaacttatggcttaaaagagaaggaacaggc

SEQ ID NO: 1713 - DNA, 275 bp, Homo Sapiens
ttttttttttttaaattttttttctaataacaaaagtttttattttcacaaatattttaaaatgcagctacctttgagccacaaaaggaaaaagcagtattccttttatgtatttgatacaaatattaaacataactcagttttagttcattagctcagctcagtgaaaatagctcaggaaaaaaaaagtcataggtaatgctattggtatatgcaggaaaccagaagcgacgacattgagttcaaaatccatttagaattgtagacaggccaca

SEQ ID NO: 1714 - DNA, 182 bp, Homo Sapiens
cctgcacttcgggtaaattctggatacaaatcaagggggcccgtgatatcctctgaacagtgccacagagcgagaaaatgacaagagcccaaacaggaagacagttcctaatgccagccaattcggtgtcacagtatagtgctccaggcgatatcgttgaaacacaaaggggtaacatttct

SEQ ID NO: 1715 - DNA, 564 bp, Homo Sapiens
gaaaagtgggcagagaaggcagtggactctctagtgaagaagttaaagaagaagaagggagccatggacgagctggagagggctctcagctgcccggggcagcccagcaaatgcgtcacgattccccgctccctggacgggcggctgcaggtgtcccaccgcaagggcctgccccatgtgatttactgtcgcgtgtggcgctggccggatctgcagtcccaccacgagctgaagccgctggagtgctgtgagttcccatttggctccaagcagaaagaagtgtgcattaacccttaccactaccgccgggtggagactccagtactgcctcctgtgctcgtgccaagacacagtgaatataacccccagctcagcctcctggccaagttccgcagcgcctccctgcacagtgagccactcatgccacacaacgccacctatcctgactctttccagcagcctccgtgctctgcactccctccctcacccagccacgcgttctcccagtccccgtgcacggccagctaccctcactccccaggaagtccttctgagccagagagt

SEQ ID NO: 1716 - DNA, 508 bp, Homo Sapiens
  misc_feature (168)..(168): n is a, c, g, or t
  misc_feature (294)..(294): n is a, c, g, or t
  misc_feature (325)..(328): n is a, c, g, or t
  misc_feature (342)..(342): n is a, c, g, or t
  misc_feature (353)..(353): n is a, c, g, or t
  misc_feature (359)..(359): n is a, c, g, or t
  misc_feature (374)..(374): n is a, c, g, or t
  misc_feature (385)..(385): n is a, c, g, or t
  misc_feature (392)..(392): n is a, c, g, or t
  misc_feature (401)..(401): n is a, c, g, or t
  misc_feature (418)..(418): n is a, c, g, or t
  misc_feature (443)..(443): n is a, c, g, or t
  misc_feature (451)..(451): n is a, c, g, or t
  misc_feature (463)..(464): n is a, c, g, or t
  misc_feature (484)..(487): n is a, c, g, or t
acacggggagtagaacctgctggtggtccagccaagtaccagtgtgtgtgtggggagatgccccaggcagttccagcctggaacccagccttggagtcttcttagctgagacttcagacatggattcccgatccatcagaaaatggttgttttgtaccgccaagtttnggggttttgtgttaaagcaagaccttgaatgctattccaataagttttagtgaccaaggttttcacttggtgacaattgctagggttaataatacaggagactcgtctattactttctgcattgtntgaaggctgatattcatgaaaatgtgggttnnnnttagatggagtttnggtcttgttgnccaggnttggagtgcaatggngtgatctcggntcactgnaagctctgnctcctgggttcaaattnatctcctccctcaccccctattggngatcaagnttatcgataccnncggactcgaggggggggccnnnncccaccccttttttttttttt

SEQ ID NO: 1717 - DNA, 1452 bp, Homo Sapiens
cgacttcacgcagggtccgtggggtccccgcggcgcgcagcggctgaaggaggccccagggccttggcgaccgcagcggcggctttagcgtcagtgactaggcagcagggggtcaggatgcggcgaagctcccgcccgggctcggcctcgtcctcgcgcaagcacacgcccaactttttcagcgagaacagctcaatgagcatcacctcggaggacagcaaagggctccggtcagcggagcccgggcctggggagcccgagggcagaagagcccggggcccgagctgcggtgagcccgccttgagcgcgggagtgcccggaggaaccacatgggcaggaagctctcagcagaagccagcgcctcggagccacaactggcagacagcctgtggcgcggcaaccgtgaggggcggggcctcggaaccgactgggtctccagtagtctctgaggagccgctcgaccttctcccgaccctggatctgaggcaggagatgcctcccccgcgggtgttcaagagctttctgagcctgctcttccaggggctgagcgtgttgttatccctggcaggagacgtgctggtcagcatgtacagggaggtctgttccatccgcttcctgttcacggctgtgtcgctgctgagcctctttctgtcagcattctggctggggcttctgtacctggtctctcctttggagaatgaacctaaggagatgctgactctaagtgagtaccacgagcgcgtgcgctcccaggggcagcagctgcagcagctccaggccgagctggataaactccacaaggaggtgtccactgttcgggcagccaacagcgagagagtggccaagctcgtgttccagaggctgaatgaggattttgtgcggaagcccgactatgctttgagctctgtgggagcctccatcgacctgcagaagacatcccacgattacgcagacaggaacactgcctacttctggaatcgcttcagcttctggaactacgcacggccgcccacggttatcctggagccccacgtgttccctgggaattgctgggcttttgaaggcgaccaaggccaggtggtgatccaactgccgggccgagtgcagctgagcgacatcactctgcagcatccaccgcccagcgtggagcacaccggaggagccaacagcgccccccgcgatttcgcggtctttggcctccaggtttatgatgaaactgaagtttccttggggaaattcaccttcgatgttgagaaatcggagattcagactttccacctgcagaatgaccccccagctgcctttcccaaggtgaagatccagattctaagcaactggggccacccccgtttcacgtgcttgtatcgagtccgtgcccacggtgtgcgaacctcagagggggcagagggcagtgcacaggggccccattaaacatgctgatttttggagtag

SEQ ID NO: 1718 - DNA, 6331 bp, Homo Sapiens
gtctcctctggatcttaactactgagcgcaatgctgagccatggagccgggttggccttgtggatcacactgagcctgctgcagactggactggcggagccagagagatgtaacttcaccctggcggagtccaaggcctccagccattctgtgtctatccagtggagaattttgggctcaccctgtaactttagcctcatctatagcagtgacaccctgggggccgcgttgtgccctacctttcggatagacaacaccacatacggatgtaaccttcaagatttacaagcaggaaccatctataacttcaagattatttctctggatgaagagagaactgtggtcttgcaaacagatcctttacctcctgctaggtttggagtcagtaaagagaagacgacttcaaccggcttgcatgtttggtggactccttcttccggaaaagtcacctcatatgaggtgcaattatttgatgaaaataaccaaaagatacagggggttcaaattcaagaaagtacttcatggaatgaatacacttttttcaatctcactgctggtagtaaatacaatattgccatcacagctgtttctggaggaaaacgttctttttcagtttataccaatggatcaacagtgccatctccagtgaaagatattggtatttccacaaaagccaattctctcctgatttcctggtcccatggttctgggaatgtggaacgataccggctgatgctaatggataaagggatcctagttcatggcggtgttgtggacaaacatgctacttcctatgcttttcacgggctgtcccctggctacctctacaacctcactgttatgactgaggctgcagggctgcaaaactacaggtggaaactagtcaggacagcccccatggaagtctcaaatctgaaggtgacaaatgatggcagtttgacctctctaaaagtcaaatggcaaagacctcctggaaatgtggattcttacaatatcaccctgtctcacaaagggaccatcaaggaatccagagtattagcaccttggattactgaaactcactttaaagagttagtccccggtcgactttatcaagttactgtcagctgtgtctctggtgaactgtctgctcagaagatggcagtgggcagaacatttccagacaaagttgcaaacctggaggcaaacaataatggcaggatgaggtctcttgtagtgagctggtcgccccctgctggagactgggagcagtatcggatcctactcttcaatgattctgtggtgctgctcaacatcactgtgggaaaggaagaaacacagtatgtcatggatgacacggggctcgtaccgggaagacagtatgaggtggaagtcattgttgagagtggaaatttgaagaattctgagcgttgccaaggcaggacagtccccctggctgtcctccagcttcgtgtcaaacatgccaatgaaacctcactgagtatcatgtggcagacccctgtagcagaatgggagaaatacatcatttccctagctgacagagacctcttactgatccacaagtcactctccaaagatgccaaagaattcacttttactgacctggtgcctggacgaaaatacatggctacagtcaccagtattagtggagacttaaaaaattcctcttcagtaaaaggaagaacagtgcctgcccaagtgactgacttgcatgtggccaaccaaggaatgaccagtagtctgtttactaactggacccaggcacaaggagacgtagaattttaccaagtcttactgatccatgaaaatgtggtcattaaaaatgaaagcatctccagtgagaccagcagatacagcttccactctctcaagtccggcagcctgtactccgtggtggtaacaacagtgagtggagggatctcttcccgacaagtggttgtggagggaagaacagtcccttccagtgtgagtggagtaacggtgaacaattccggtcgtaatgactacctcagcgtttcctggctgctggcgcccggagatgtggataactatgaggtaacattgtctcatgacggcaaggtggttcagtcccttgtcattgccaagtctgtcagagaatgttccttcagctccctcaccccaggccgcctctacaccgtgaccataactacaaggagtggcaagtatgaaaatcactccttcagccaagagcggacagtgcctgacaaagtccagggagtcagtgttagcaactcagccaggagtgactatttaagggtatcctgggtgcatgccactggagactttgatcactatgaagtcaccattaaaaacaaaaacaacttcattcaaactaaaagcattcccaagtcagaaaacgaatgtgtatttgttcagctagtccctggacggttgtacagtgtcactgttactacaaaaagtggacaatatgaagccaatgaacaagggaatgggagaacaattccagagcctgttaaggatctaacattgcgcaacaggagcactgaggacttgcatgtgacttggtcaggagctaatggggatgtcgaccaatatgagatccagctgctcttcaatgacatgaaagtatttcctccttttcaccttgtaaataccgcaaccgagtatcgatttacttccctaacaccaggccgccaatacaaaattcttgtcttgacgattagcggggatgtacagcagtcagccttcattgagggcttcacagttcctagtgctgtcaaaaatattcacatttctcccaatggagcaacagatagcctgacggtgaactggactcctggtgggggagacgttgattcctacacggtgtcggcattcaggcacagtcaaaaggttgactctcagactattcccaagcacgtctttgagcacacgttccacagactggaggccggggagcagtaccagatcatgattgcctcagtcagcgggtccctgaagaatcagataaatgtggttgggcggacagttccagcatctgtccaaggagtaattgcagacaatgcatacagcagttattccttaatagtaagttggcaaaaagctgctggtgtggcagaaagatatgatatcctgcttctaactgaaaatggaatccttctgcgcaacacatcagagccagccaccactaagcaacacaaatttgaagatctaacaccaggcaagaaatacaagatacagatcctaactgtcagtggaggcctctttagcaaggaagcccagactgaaggccgaacagtcccagcagctgtcaccgacctgaggatcacagagaactccaccaggcacctgtccttccgctggaccgcctcagagggggagctcagctggtacaacatctttttgtacaacccagatgggaatctccaggagagagctcaagttgacccactagtccagagcttctctttccagaacttgctacaaggcagaatgtacaagatggtgattgtaactcacagtggggagctgtctaatgagtctttcatatttggtagaacagtcccagcctctgtgagtcatctcagggggtccaatcggaacacgacagacagcctttggttcaactggagtccagcctctggggactttgacttttatgagctgattctctataatcccaatggcacaaagaaggaaaactggaaagacaaggacctgacggagtggcggtttcaaggccttgttcctggaaggaagtacgtgctgtgggtggtaactcacagtggagatctcagcaataaagtcacagcggagagcagaacagctccaagtcctcccagtcttatgtcatttgctgacattgcaaacacatccttggccatcacgtggaaagggcccccagactggacagactacaacgactttgagctgcagtggttgcccagagatgcacttactgtcttcaacccctacaacaacagaaaatcagaaggacgcattgtgtatggtcttcgtccagggagatcctatcaattcaacgtcaagactgtcagtggtgattcctggaaaacttacagcaaaccaatttttggatctgtgaggacaaagcctgacaagatacaaaacctgcattgccggcctcagaactccacggccattgcctgttcttggatccctcctgattctgactttgatggttatagtattgaatgccggaaaatggacacccaagaagttgagttttccagaaagctggagaaagaaaaatctctgctcaacatcatgatgctagtgccccataagaggtacctggtgtccatcaaagtgcagtcggccggcatgaccagcgaggtggttgaagacagcactatcacaatgatagaccgcccccctcctccacccccacacattcgtgtgaatgaaaaggatgtgctaattagcaagtcttccatcaactttactgtcaactgcagctggttcagcgacaccaatggagctgtgaaatacttcacagtggtggtgagagaggctgatggcagtgatgagctgaagccagaacagcagcaccctctcccttcctacctggagtacaggcacaatgcctccattcgggtgtatcagactaattattttgccagcaaatgtgccgaaaatcctaacagcaactccaagagttttaacattaagcttggagcagagatggagagcttaggtggaaaacgcgatcccactcagcaaaaattctgtgatggaccactgaagccacacactgcctacagaatcagcattcgagcttttacacagctctttgatgaggacctgaaggaattcacaaagccactctattcagacacatttttttctttacccatcactactgaatcagagcccttgtttggagctattgaaggtgtgagtgctggtctgtttttaattggcatgctagtggctgttgttgccttattgatctgcagacagaaagtgagccatggtcgagaaagaccctctgcccgtctgagcattcgtagggatcgaccattatctgtccacttaaacctgggccagaaaggtaaccggaaaacttcttgtccaataaaaataaatcagtttgaagggcatttcatgaagctacaggctgactccaactaccttctatccaaggaatacgaggagttaaaagacgtgggccgaaaccagtcatgtgacattgcactcttgccggagaatagagggaaaaatcgatacaacaatatattgccctatgatgccacgcgagtgaagctctccaatgtagatgatgatccttgctctgactacatcaatgccagctacatccctggcaacaacttcagaagagaatacattgtcactcagggaccgcttcctggcaccaaggatgacttctggaaaatggtgtgggaacaaaacgttcacaacatcgtcatggtgacccagtgtgttgagaagggccgagtaaagtgtgaccattactggccagcggaccaggattccctctactatggggacctcatcctgcagatgctctcagagtccgtcctgcctgagtggaccatccgggagtttaagatatgcggtgaggaacagcttgatgcacacagactcatccgccactttcactatacggtgtggccagaccatggagtcccagaaaccacccagtctctgatccagtttgtgagaactgtcagggactacatcaacagaagcccgggtgctgggcccactgtggtgcactgcagtgctggtgtgggtaggactggaacctttattgcattggaccgaatcctccagcagttagactccaaagactctgtggacatttatggagcagtgcacgacctaagacttcacagggttcacatggtccagactgagtgtcagtatgtctacctacatcagtgtgtaagagatgtcctcagagcaagaaagctacggagtgaacaagaaaaccccttgtttccaatctatgaaaatgtgaatccagagtatcacagagatccagtctattcaaggcattgagaatgtacctgaagagctcctggataaaaattattcactgtgtgatttgtttttaaaaacttgcttcatgccctacagaggtgccagctatttctgttgatactatgtataatttattaatctggagaatgtttaaaattttatataatttaaaggtaacagatattattgtacatagttgtattttgtagtttcttctgtaaatatgtatttttcataatgtttaatattaagctttatataatactatttttccacactaaagtgttcatgacttgttctacataaaactaattcaacctgtaaa

SEQ ID NO: 1719 - DNA, 135005 bp, Homo Sapiens
gatctagaactagaaataccatttgacccagcaattctattactgggtatatacccaaaggaatataaatcatgctgctataaagacatatgcatgggtatgtttattgcggcactattcacaacagcaaagacttggaaccaacccaaatgtccaacaatgacagactggattaagaaaatgtggcatatatacactatggaatactatgcagccataaaaaaatgatgagttcatgtcctttgtagggacatggatgaagctggaaaccatcattctcagcaaactatcgcaaggacaaaaaaccaaacaccacatgttctcactcataggtggaaattgaacaatgagaacacatggacacaggaaggggaacatcacaccccggggcctgttgtggggtggggggagggatagcattaggagatatacctaatgtaaatgacaagttcatgggtgcagcacaccaacatggcacatgtatacatatgtaacaaacctgcacgttgtgcacatgtaccctagaacttaaagtataataaaaaaaaaaaaaagaggaagctgttaaccacttacggttgcatcacttggccaccagcacctcaggcttatccatgaagtaactacagctgagaataagtcagtaacttgcctactgagttcaggtctccagaccccaagtccggtgttctttccaccacatggcacattccaaggacctcgctcccccaggccaagcagccattgaaggttaaggaaagagagagcttaagacctctctccccaacaccaggaataggcctgggtgacacagcagagtagggataggtgacaagggataggtgtggggggctctttttatttttattttttaagacagagtctcgctctgtcacccaggctatagtgcagtggcgcaatatgggctcactgcaactttcacttcccaggttcaagcaattctcctgcctcagcctcctgagtagctggaactacaggtgcgtgccaccacacccagctaattttttgtatttttagtagaaacagggtttcaccatgttggccaggctgacctcaggtgatccacctgccttggcctctcaaagtggtgggattacaggcatgagctaccgcgcccggctgggagctcatctctttggggcaccctgtgggaccccacataggcaatccatcatgagtttctgacctctacctcccagacaagtattcatccacaaatatttatccttcaaggactattcacagcactatggatacagaaaagaagaaaagaatcaaacatcttcatctgtaagagctacaggccagtaaatgatagcacttttctattaagaaacgcatccctccccactgaacttgttttagtttaggtcttcattatctcttacctgaactgttcctacccaactccaggtcccaccagaagatctagattttgggagacctgaagcttatacaattggaggagtaactccttaagaagaatacaaaattatgaatacacaattatatgtaaccatgtgaacctgtcacgaggaatattcgagggtccttggaaggggccggtgtagatgaaagcctgaagattaagcctcatggagaatcagcctctgccaagtcctctccccacttcacccgggacaaggggaaaaatagctccctcctgcctaccctatattcccctcaccccctacccctaccgcaccctgctctacctcaaggataatagtttcctttcttctagacccccactcccccaccctcctcctacctccccagcaatttgggtttttgtttttgttttttgagacagtctcattctgttgcgcaggctggagtgcagtggcacgattggctcactgtaacagcctcttcctcctgggttcaagcacttctcatgctttttttttttttaaatattatgctcttgcttttttgcttttaatgtaatagtttaagtataaatatttgtccctagtatctatttggaaaatgaaataagctgcttaatgtctccaacaaagacagttatatatctttcccacttccacaggaaaacccaaggtgctgaacgcccagaatagcaaccttacacaggtatagtgttcaaaagtttgtaaaattgttttcctcgtgtttaattttatttcaccttcacaactgtgtgctatcattctcatttgatgggaaactgaggctcagtataagtttacaaatccagtgagtggcagagatgggattctgacttaagttcagcattttaggaaactcaaggcaggcgcggtggctcatgcctgtaatcccagcactttgggaggccagggtgggtggatcgcctgaggtcagaaggtggggaccagcctggccaacatggcgaaaccccgtctctactaaaaatacaaaaattagccaggcgtggtggcccactcctataatcccagctactcgggaggctgaggaaggagaatcacttgaacccgggaggtggaggttgcagtgaccctagctcgtgccactgcactccagcctgcgcgacgggagcgagactccatctcaaaaaaaaaaaaaaaaaagagactcaaacgtgatctagaataaacgcacctactgccaaccggatgttgggtcaagtgagaatgaagacaatgtagccatagtactgaagttcaatttacgccagtggcgagacattgatttaaaccaagtaacttgaactcaggtttgctccccatgtacttggaatttaactgcgctgagcttttacttatttatttcaagtactctatagtagttctgagcccctgcctcctgtgttgctgggactagaggcacatgccactgcacccggataatttttgttttctttgtattgtttttgtttcattttgtttgtttttttcagtagaagcgggtttttgccatgttggctgggctggtctcgatctcctggcctcaaatgatccaccctccttggcctcccaaagtgctgggattacaggcgtgagccaccgcgcctggccctccccaacaatttgaaaatgaatttgatcttgccccaccggtaaatatatatatatatgtgtgtgtgtgtgtgtgtatataatatttcaaaattgttgccattgcctatgagtagctaaggggcagccgtcagggatagtgttgggtgctgctgcagttttaggtttgagactgcagggaacagccgtgctctgcaaaatagcagggagtgggcatagcttgctgcactgggaaaacggtccccttcctcttcctcaatgggcattgagaccgggtgtctttgaagtggtttgtgattggcaggtgtgtgaacaaccaggaccaatgatcccagagcctggggataggagctcgactctcctgccaaagggtccaccacgatagctcctattgttttattattcaagattgaataactgggcctagatgtgggatggaatggatcctaaggcaagactaatacttgtggtgtggggttttcttgaagcaattgaagaggcctcaggaatcaacagcgaggaaggcccagagctggcgcatacctaccagaccaccttcttggatggcccttgtcattctggatttcttcatggaactatgagaattgccataattaatgcgcgctttagtttttgtattcctcctttcattttaattaccatcggggatctgacaggaagtggatccaagtgccggcatcacactctggggcctccggggggcgctatggcccaacacacagcgtggccaagcgcgcctcagcctaactcaccacttcctatctgttttatacggtttgcacccgcttaaggcggcggaggcgtgggggagttctgctgatgtaaaaaaaaaaaacattgttttatgactagacctacagaaaaaatgtccaaactccttagcatggcatgttaggcaccagcatgaccctcccggtgctgggtgctaaaacctccaccttgaaggaagtgcagcaaacccattcattccgctctgctagtccttacacaagctgctcccgggcccctcctcaccttcaggctcaggccctttttctgtgcttgtcccaggacttgctccgcttctgtaacagcccaggtcactccagagtgacattgagcattcatgagtctcctgccacctgactgtgagctcataagggcgccacctgggtttcattatctgctcactctctagcactggccactcacaaaaaagcccttctcgtggacatgagcacaatgaaagggtagaatgagacccaaggctctggcctaagggtttgtggtgagcccctgccagaaaagagtggcattctctgcaggcgtgcaccacgcttcctctgtcatcaccacccctgtagctctctgtggccacagttggagcacttcgccccaccccacccaccaaattcctttctcatggagaagatgcagcagttggaacgggacaatatacaaaggaactaagataaataatgcatggccggcacagtggctcacacctataatcccagcactttgggaggccaaggcatgaggatcacttgaggccaagagttcgagaccagcctgggcaacatagcaagacctctgtctcaaaaaaaaaaaatatatattagccaggcatggtggtgcacacctgcaatcccagctacttgagaggctaaggagggaggacttgagcccaggagtttgaggatgcagtgagctattatcgcgcgactgcactccagcctgggtgacagggtgagaccctgactctaaaaaaataaataaataaaaggttaaaaaataagataactaatgcaaaataaaagcgcacagagggttccaagaaacaacagactttcacctggatctaaagcagagacactcacctctgacccccaagtgctgccccagaactgctcattgaccttcctcccttcatcaccccttggttcagcagctctaacccaggagcccttctctggggctgcaggctctgggaagcctcaaacaccatcctggctggttttctgttccatgtggttaggatagaacagaaacccacgcaagttgggagtctgccccagctatgactgagccttaactcagtgccactttcctgggctgactgattccaccttctgcgcaggttaattctgagcatctatcccccaatctatcttggggacaaccttccagaatgaaaagcactccaaccaaatcacttcaaccatcacaaaaaggaatgctgcaaagtgagggcattccggcaggaagggccagccagcatgaaggctggagctgggagacagggagctgggtttgggaaacggtgtgatctcccatgctggataagcaagaaactcacacagcaagggagtggaggtaaggctggccggcaagagaaattggatagggcatcaaagggcctagaatgttcccaaactaagggcctaaatgtttatttgagaagccacaaaagacatttaagtttctaagcaggcgatggcccaatccaagcaacactttttaaaactgtggcaggaggatgggggtgtttgggggtgagcagctggggacgggagctaagggaggaggctgtgggcagaactgggaattccatatctgctccaagccagggtggagtccagtggaggaaaagtacgttttgctgttagatattctctgtgggcactggggtagggaggaaagggaagggggacccgttaagaccaaacaaacaggtagctgcaggacagggagagaaaagtattggagatgattcccaaactccaagcctggtgggcagcaggaggaggtgcccagcacagacacaggggagtcaggaagaagagctggctggtggagagtgaacctgtggagaccaagaagccccatcccagcctagggacagagcctcttgggatagggaccctccccggaggcaggtgctcctctcctctctgagggccaagcccagccctgtcctcacccactgatgttcaggactgacagaagtgagagtcccatatggggagaccatttcctcaaagatgttctctgagactgtggaggaacgtgaattctgtgaggggagaacagaagaagagcgccaggcacagcagcttgaggtgctcagagggcagaggagaaagacagtgtgctctggtcatcagggcagtttcccaggtgtgtgtaaatatatatacaccagatatatatatttcccaggtgtgtgtaaatacatacacatgcatatatatatgtgtatatatatatatatatatatatctggtcaccagggtggtttcccgtgtgtgtggggttggggggtggggtagcccactgctgccaggaggtcccaggccctgaagcccaagagagaccacggagtctgagagcagaagcaggaaggcagggctggaagggagccagcacacaagggccccaggagtggcttgctgggggccagtcaggcatccttggcagagcgttcctgtgaacggtctcagacacaggaggggcagaaattgaagaaggaggcgaggaggaggggacagttcttttaagaatggggagatctgagcagagaaaagaacatattgagacacaaacaggagatcggtggggtaatctcaggaaaggcagaagacaggactaagcaaaaaggttccacatccatctccacagtggaagaccgagagaagagaacgggtgaaaagacagaaacgaggaggagcatacgccgctgatggtgccagcagggttctgccaagattccctgagtcctctccactgggtaagaggaagggtgtctgctggaaatgagagagccagaggtgggtctgaatgttggggagaggagtggagcaagtgtggaacagctctgggggggcttctcacatgtaatgtgtgtacaggtcttggtaaattgcaggttccgattcagcaggtcccggcagggcctaagagtctggattcctcaccagctcccaggtgatgtcaatgctgctggtccggggaccacactgtgagaagcaagatttagagaggcagatcaggagatggagaaagagactggcttaagaattgtcttaaggagaaacccatgtttgataatcccacctagggtaaaagctgagacctgaaggagtcctggtgggaatggcagccccctgtgggtgatggggagaggcatagagagaaggggtggtaaagagaccaggaaaggaggtgagagggcctctgtgatggcaggagaaccagcagtgcccccaggacgcctcatctgggccaatgtgtgacagaacgctaactcacacttggaggccccccagaagaggatgggagtgagttggagcaggaaggtgttattgcaggggtgtctgagcgtgaacatggcaggcagggcaggtggcccccatgctgttctgcaggaaagtgctggactcagtctgggcttgctcgaagcctggccaggacaacgtggggagaggggcagaaatgtctctgccccacggtcaagggccagacgacttctgtgccaggaactaataaaaaaaaaggaatgggatctgagacgggacgcggctggggagaaacaggaggtgagctgggctctgagcctacctgtccaactcgcaatcagaaatcaggaggttcctgaaaggcacagatggaaactgaaaatgctttaggcttaggtaacccagcatcaggaatcgggatggttggatgcagggacctcgcccagcttgtctggggccgcagcctacggcagggacgtttcagtccttagctggggtgaaagtgaggtcagggtcgccggggaaatgcgggagtacagtcacgcgggagaaagacgtcaagagcgaaagctcggaggcgtcaaaatgagcagcaagtccaggcacaaggcgtcgggcgcggagagtacggcgggtgccgggggagggagatgaggccgcgaagacgccggggcttcgtccggcggcgacggggaggccgcggaggttcccgagcgcagcggggcgcgcacctcccgctcgggccgggctccctcgccgcgcggccccggatcctccctgcgcgggtttccgtggcccccgccgggctcttccgttccctcccgcggcctcgaccaggccgcagcccccagcccaggcgaccgactcgccagggtccgccccgccgccgcggcccgggcccggccgctcctcccccgatgatgtcacgtccccggccgcccctcggccggccgcgccgccccgcccccgcctcccccgggcccccgtcccctgggcccgcccgctcccgacatccctcctcccgcctgcgctccctcccttcggctaccgctcccccgggagcggcggcggcggcggcggcggcggcgggatggcccgggcccgaggccaggccccggggagcggcgggcggcggcggccgcggcggggcggcgcgggaaccgggccccggggggagtcggccgggctgctgctgctgctgctccaggtgctgccgcccggggctacggcagggccgggacgccggggcacgcggggcgctggcgctggcggcggcggcgtctgctggcccggcgcggccccagcctttccccgggacgcgcggctgctgctgctcctgccgccgctgccgccactgtcgccgccgccgccgagctccgcgcccgcagcctccgcctcccggatggtaatcagcgccccgcgctggcgccgcgggcgggcgggcgggcgggaggtgggggcggcgagggggaaagggcgggcggccccgcgcccccgccttgcccgaggcagctcccggggcgctcgggccccccctccgacgaccgcggccccgggcagccgccagagcgcgcctctggggcgcctccgcgcggaccgggtgcgggctccgctccccgccctccccgccccgctcgcagtccgcccgccagcgctcaggccgcgggggaatccctccatctccccgcccagcgccccaggaggggaggggacagcgccggcgcccgcggacccgctttctccgagggagcgcccaagaggcgagcgcgcactgagccacccggactcggcgctgcgctgctggaggcgcctggtgccgtcgggtcgggctgagctagacgcccgcagcctcagcgggaccggatccggggcggcgggggcgctcactcaccgcgcgccctcatgttccctgcgcaggacgctctgccccgcagcgggctgaacctgaaggaggagccgctgctgcccgccggcctgggctcagtgcgctcctggatgcagggcgcgggcatcctggacgccagcaccgcggcgcagaggtaagcgctcggaccggacccggtgcgctcgggttggacggctgcgcgccgcctcagctcagcttgctggagctgctggagccaggggcggaaggagccctaactctggacggtcccggcgagctccccggcccaccccgtccggagtgcctgtgctgcctcctgaggctgtggggcgggctggggcggggcttctgcctccactccgggctgccccggtagatttctgacggccgctcgcgggtgcggcggtgaacgccaccccagccgggctgtctatggctctgagagaagaggcagagctcccagccatgacccacagccaccggccgtctaggaacgtccagcccctccttcctgggcagtcccagtgactctccttgtccaattccgcagctctctgtcaggaaaggcacgaaacccagccccctttttcctttcccacgcccctcagagttggcggatgggggtgtgcagagccagagaagcggctgggggctggacggtggcgaagagatgaggtgggcagtcggcctggctggactgattggcctgggaactgggcagggcccctgcctttccctcgggtgtttttctggtaggtcctttggaaggcagagagtccctgggaacccagcacccgcgccggtctcctctgactcctttgcaggggtctgggagtctcagtagggggttgactccaggatttgaaagcgaactttaaaagtttattgacctgcccccaaagcccctgcaccccctggctttttgcaccttcagctgtgaccatggagggaggcatttaggtatcctatggggagtcacagtggttaggattagggaggtgccagctctgctgacagctgggacagggtgggcacttggcttcccagaagtctgagctgttgcagcagcccgaagggattctgaatggggggcttaatgcagaccgggcctgacacaggagcccacattcacactccgcaggacgcctcaacctcaccgtgtaacagacacacaccgcgcttcatgtgcaaactgaagccgtttctgcacgccggtcctttcctggctgtcgggagggaacgctggggggctctggagctgatctcttacggaagagaaagggtcttgtggatgaattaatttccaaaacttttacaagggatatagctatattctagaaaaattggaaaataaaaaatttagtccctcctctgtaatacaactactgtcaacattttagtgtatttccttcctatttttcttcccattaacttgtgttttcctgtgctatgcttacaattccacctcctgcctattcttctgttggttctggcttttttttttttcaacttgagaaggttagtttcttaacatggccccctctttggccccaccacctgctgtgtggcgagagctctttgtaagagtgggtgaggagtgctgatgggggcctctgggagttaaggttccatttctctgcaacctttccctctgtgcctacccagaggcaggtctgatgaaggggaagcagacgtgaaggaggcagtgcccttggagactgcgtggggttcaagaagtgtggggataaggcttcccccagagcatgggccacagcagtggtgtctgcgcatagtggggttgagtgggcttggggtgtccagtctgactccccacattgtgagggccacattgctgggatgcagagggcttccgcaatgtgaacaggggctttcttcaggctcggtctgctaatccccaagtgtggagacttctctgtctcaggacatagactaggagcccccactcgctttgttgttcagctgactttcctccctgtcccagagggagctgcctcatccttcctccccactcttccccgtgttgtctgtcatcactacagttgtatctggttcctcagtcagtcctctgcacgggtcttctcatcccaaaacagcaacaatgaaaattcctccccctggccctgcctccgccttcatcacggcctggtttctctccctctcatctctgagaaactttcacggaagtgctctcccaaaagactccctgggatccgagagttggctttgacaccttcctcagcctcaccccacagttgcctgattgtcaaggcttaggaatgttcttttccgtgtcctagtcccaatctcagtgccctcagccaccacttttagcaatgaaaccccctggccctccacccgcttcctccctggcttgaaggttaactgcaccctggttaccacctcagcctcctggcccagtgcctagccccagccattcaccactcccctaaaaccatcttccctgcattggggaccaaagcagtatttccaaagtacttttttaagatcatgtctctctccgattacaaataaagtgaccaggctgggcgcggtggctcacgcctgtaattccagcactttgggaggccaaggtgggcgtttcacttgaggccaggagttcgagaccagcctagccaacatggtgaaaccctgtctctactaataatacaaaaattagctgggcgtggtgaagcatgcttgtagtgccagctacttgggaggctgaggtgggaggattgcttgagcccgggaggcagaggcttcggtgagccaagatcgcaccactgtactccagcctgggcggcagagtgaaactgtgcctcaaaaataaataagtaaataaataaaataaaataaaataaagtgaccaacccccaagccccactgcttcctcatggatatctccaacattcaaggcctatcatggtctgactccagccttcctccccagcctcctctgcatgatgcttggcaggcagtggatacttggagaattagctgcgcctccagtaagtgctatggtctattgaaacaatccctctgccctcagcacccgcacatcccctggattaagtctcaccagcctcaggactccctcttacacccaccgaccccagcaactgctctttctgtgccctcccaccctgcccacgggagtggctttaatgctgcctacgaatgcttaccataggccagcatctgctctcctctgcctgtcccggtcctccttgccctgccagctggggccttcccctaaggcaagggtagcggtccgttcatccttgtgtccacagcacccagggcaggctcaggcagtccatgggggatgggggtgatgactgtctgccggaggaagcagtaatgtttctcagaggctcccaagtccccttatattggttcccctcttgactttggaagactccaggttctacctgacccaggaatcagctactggagcagcttctcctgcccagttctacagcttgacttttacaacaatgccaagattttacagaaggtgggtggggaggaaaaggcccagaaggcctgctaagatcagcgagggaggctctgccaacaggaaggaaagttctgagcaaaagaggggtagggagggccgggtgcgatggctcacgcctgtaatcccagcactttgggaggccgaggcaggcagatcacgaggtcaggagatcgagaccatcctggctaacacggtgaaaccccgtctctactaaaaatacaaaaaattagccgggcgtggtggcgggcgcctgtagtcccagctactcaggaggctgaggcaggagaatggcgtgaacccgggaggcggagcttgcagtgagccgagatcgcgccactgcactccagcctgggtgacagagcgagactctgtctcaaaaaaaaaaagaaagaaagaaaaagggggtagggagagcagaggggctgcatacccttaaactggaggcaatggggatgggaacgctggtggagagggctgccctctccctaccaatgtcttcctaccagggaagtctgcacaaggaccccctgcccctgccctgagccaacaggacgttatctctgagatccatttgcccagccccagcccatcttcccctgactcccctgaagactcaagtcctcctgctggcacactcagcacagaagtagctctcttctccttctgatgtgcttcccagtctggggagacctctggaaggcccaggccagacctccccctggagctgatccctgcacactagcagggccccggagagggaggccagctggggctgcctttcctgtaagcagctgcaggctagcatccctgctaggaaatgcttttgtttgctttaataattcatagccgattctcagcctgggacctggcaggcaggcctgtgggtgggtggcgagagggtgggcagagagcagtggagtggggagtctttaggtagaattgagggccaaaagaagagggggagagcaggcctgtgagattcttccccctccctttcccctgccctcagggactttggtcactgtgccaatttcctggggcaggtgagcagggcagctgctgggggcagtgggaagaggggatagggaccctccccagacccaaacctcatctccagcaggaccaactggacacaggctctgggcagctgcctgcagccaccaggtcctccctgtgcaagcattgttgaggtgggtgtgccccactgggctactgcttttatcttccccagtctgcaccatggccaggggctggcatgtcaggggctgggcagggccaggccaatagatcttgtctggggcaggagggccaggcccagcttgatcatcatcagcagtcccggggtccagagggtgcctgcaggggagagcaggggccaatgggatgcttggaggaaggggggatgtagaggaaagggactggtggagccctgtcaggatggggctaagaagagctggacttagcagagagagactttggggaaatctgcgaaaagggatgagatgcaggagtttttgctccctccacttcctggggtgatgggtgtcaacaaagagcctccccccattactgatgaaagtagggcttgtcccccgtagccctagcatcccagactcaaagacaaattaggaccagggcaaggcacggctcaaaaccttgagttatcaaggcagccaggagttaggttttggtggggagaagggaaggcaagacgcctgggggtgcctctgagaggaggccgaggctccagccttggtcacttgtcctctgtgggatttgagctggctgtggttaaattgcttactataacaagcatgcagtcaaggatgtgaagagccgtgagtggccttgggaagagagaacagagactgtgaggggggctttgtctgtaccagacagttatgctgtggcaggggagagcagctgccgcgaaaagggccctggagtgtcctgctcagccttgcaaaggagcatctcccgggacctgctgggcagccccagcaatagcagtcagacacctctgcagctgctggcatctccccacaggcatctgcatacactctggagcacagtccacctgaatgacctagtctgtgaaggtcaggttgcccttggtgttgacttgaacctggattcccaacagtgctcaggaagtccatgcacacccatgctcactacaaagcatgttgactctgaccaaaatgcatctgtgcaacgtaaatcttttttggtgtctcaaacagtctcctttaattttcggtctatttaagaatgaaagatggaaaggaggtgagtggggcacaatgaaaatacaaaagcgagcatattctcttcccaaatctgggttctttagtacgggggcaaatgtcccactgcctcaggacactctggagttgagaagaaagtgttttgaacattgtgctttaaacaatctttttaagaaagcgaggaaatgtataattcattttgcagtcttgcagaagtggttaatgtggctgattttgtcactcagctgcatttctctggaaaaggcgtttatgtggcatggtttgttcactaatgatgctaagtgaataagctgtttctgaattatgggtgccagcagtacatgtgccaggtgaggcagttcttacttgtatttgtcataaactgatacctgccaagctgcactcaggcccttggggctgtagctttgctggcatccatcgtaccccaggcctctgaatggctggcagttggtacccacccacatcccctcaggaccattggtcaaggctctgcctcccctgctgttagctgcttccctttgcttgaggacttgctcaggctgccagagcctgctctgctcagcccagaagtacctgagaagtaacagccgtagaagccctccaccagtgactgactggagttggtggataaataccccagctccctcacccatccctctggtgggataatgctgaggcacacattccatgctgtttccagagttccccgtgggatggagctccaggtgcctacagtggggacttgaaaatgcaccctctataggctgctttctcatctttgtctcacccccaacccccagtgtttccgaatcactgcccagataacactgttggtatttgcatccttgtccccaggtctgcttctcggggaacccaaataaaatacttgcctctccaggcttcagaggctctattcccccttctctccccctttctttcttttaaattaaggatacatatcaaaagacatacgtgcagtttctctccacaccccaatgtttgtcttaggcagcgccactttggagcggcaccatgagatcaaagactttggccttggtccacatctctctgtctctaagccagtctgagagcagacagtggcccccacatcccacctgtgtccccacacatctgcacccaggatgtgctcatcaggggccctcagaccactcagcacctcctgagctgtttgagtctctatccctgtttctttttttctgttctttagtccgggtttgttttctcattacaagagcatcagcttgtaatcagcttgtaatctccccttccccttccccagccctctctctttggaacttgcatttccattctacaagtgttgattggtcacctcctgcatgttggggtcaatcaggagaaggaggcaccgtccacacctgcctctgttgctctcgagtcctattccccgcaacatgctgttcctcgtgtccttctccgtctcttgttcataggaagtatcctttgcttgagcttctccaagcctggcagggctatgaacagggtgagccggagacattcccaggcaaggggcagccccatgtgcgctgcagggctcttgcccactctgcagtcctcctctggttggaaggggcgggggccgtcattaacactgccctgttgttgtccatggcacggatcttgtcctgcagctgtaaactaaccagtgctgctccatgggtgggtgtgagcctgggaggatgagtgtgcctcagacccactgagccgtgctggggaagtgcaggatgccgctctgggctgcctcggggcagtggactgatcctaaacctactatggggcagggcacaggcatgcaaagcagggcagcccctccatgcccccagctggcaggagacactggcccagagaccccaggggaacctgctgtcttcccccctcccaggtccctgtgcccttgctcctgtgtaatcccctcctgcagggatgctgagccctgggaaggaagcttggcttggggcttatgccagacttcccaggtctggtcctcagcagcctggcaggagctggggggcagccaggacccagcaatggctgatatttgggtgggacaggaagctcaggccagcatctgtgatttatgctgcaccagtctggaatttggcctgagcacttgcagggtgtctgtgtagaaagggcatgtccagtggtctgggagattccgttatttctcagcacccaccactcctctggcaaggcttccttttctctctatagcctccctccccactgcctgagagccttccaggccccttcgctgggctagatgacaggatataaaagccacagggacctgggagtgcttcacaaacccatctcctctggccttctctcccactaggtggtcctggaacccatccccagtggagttcaagttaagctggtcctgggagcaggagggaggagctcagggttgaggcctcattagcatattcatcaacagtaatcagggccccgctgtgatcgaaagccctcttagggcttccctgcctcttgctggctggggagcgggtgaggggcgatcaaggcctcaacttgaaaggactgcagcctgagggcaagggggtggagggagcagggaaagatggagggacagtgaattccctagggaaaggagcatctgtaaaaagaatctgtggtcagaaagaaaggtgttgaggccgggcgcagtggctcaagactataatcccagcactttgggaggccaaggcaggaggatcgcttgagcccaggagttcaagatcagcctggataacacagtgagaccccatctctccaaaattaattagctgggcatggtggctcatgcctgtagtcccagctactcggacggctgaggtgggaggatcacgtgagcctaggaggttgaggctgcagtgagctataattgtgccaccgcactccagcctgggtgacagagcaagatcctgtctcaaaaaaaaaaaaaagatactggaggtcccctcccctcatcttgatcagggacaagaagacttatggcttctgcctcctaagtcagcatttcatgtggataactgagggaggctccggggcaagctttcaagaggaggaaacattttccattttactatttattataacttgtatgtgtaaaacaatagcaagtccctcatgcccatgacatcccaggtgttatggcttagcctgaagccaagtaaaagaataaattgatttaaagttatatgaagaaaaatagtaagtagtggtgactgtggcagccattgtcacaggagcatgctcatgatgggcacctggacaagctgacctaagtggtcctcaaggcagttccccatcctggtcactcccctgcatccctgcagcagcctctctcttgtcccccacactgcaccctcctttcccccatagcatctttaagccctgcctggcttcagaactttctagtggcctttagtcatgtttccgaaaccatgaccctcaacaaaagtgctccgtagtcaggtaagcagggtgtgttagttggccaggtgtagtggttggcacctgtaatcccagcactttgggaggccaagatgggagaaagctggagcccagaagttcaagtccagcctcatctctacaaaaagtaaacaaaattatccaggcatggtggtgcatgcctgtagtcccagctagtcaggaggctgaggtgggaggattgcctgagtcccagaggttgaggctacagtgagctgagatcacaccactgcactccagcctggacaacagagcaagaccctgtcttaaaaaaaaaaaaaaaaaaaaaaagttactccaagctgagtatggtggctcacacctgtaatcccagctctttgggaggctgaggcaggaggatcgcttaagtctaggagttcaaggttgcagtgagctatgatcacgccactgcactccagcccggatgacagagcaaaaccctgtctcaaaaaaaagtattccaggttgggcatggtggctcatgcctgtaatcacagcactttgggagtccaaggcagaaggatcatttagccgggtgtggaggcatgcacctgtagtcacacctacttggaggactgaggcagcgggatcatttgagttagtaggtcgaagctgcagtgagctgtgattgcagcctgcactccagcctgcgtgacagagtgagatcctgccttgaagaaaaaaaggcggggcaggtcttgagcccaagtcttcaaatttgtatctaaaaagaaaaaaaaaaccgactccaaaacttagcaacttaaaacaacaaacatttattatctcacacaatttctgaggtcagaataagggagcagactagcctggtggttctggatcagggcctctcatgaggctgcagcaagatgagagctggggccgcagtcgtctgaaggattgactgaggcgggtggatctgcttccaaggtcgctcatgctggcaagtcagggctggctatcggcaggaggcctcagttattctccctgtggacctctccatagggctacttgagtgtcatcaagacatggcagctggcttccccctgaatcactaatccaaaaaagggaagaagtcagaagctgcagtgcttttatgatctaaccttggaagttatatgctattactcctgccatagtctattgacctcacaggccaatcccaacacaatacaagagggggctaactaagggcatgaatcccagggggtggggctcactgggaaccatcttgtaggctggcttccacacatgcagagcaccagccctagccaactcaagcagggtacattcctggagggtgtcctaggggcccccaaatacacccatgtctgtggccacagcacccttttctaaagggaggctctggagccatgagagatctaaggaacacactttggaaggccgtggctcagagaagagaatctaaccccttcccctggtgtctgtgtccttccatgatctggcacgaacttccagtacaaactttcctcctttcacttcgctttttgacacctgcggtacagcagcagcctctacacatccagccattccttgtgctgtttattctgccctttttcttgttcatctgttgagctcctgtttattcctcaaggacttaggggaaagccaccattccatgaagccttcccttcatctcccataaaaagaattaatattttcttcctttgcttctccagtttttttgcatggacatctttggggggcacctgcccctttgtctgatgttgtacctctctctctgtctcccctcttccaggcatttgctcctagccccagttgttgccatgtgtccagtgcttggtgtatcactgggatgcaggggatatttggggaagagggaatgccttcctcctgctctcactctggccttgcttctgggcatggtttctgatgagccaggagagatcccttagcaaggccagaagagaagttcctcctgcccaagggagcctgtggttgtctctcccaaagcctggaggcaggttcctctacactttgggggtgctccctaccttcagccagggcccaggccaggcagactagtggtcctgagccagtttgatgcctccaagggtctgatggacatcgccattccccaggcaacaccacaggctcatgacagcctcagcctgggctggggtttagtgggatatttgttctagggcccccggggtctccttgaagccctaaagggcagtcacaagagcctctggtcagaaagacagattggttcatacttttgatttttgagactggccttgcaaaatgtgctgcccagggaaaagcctgggagggagactgacagggcctcctcctttgcagtcaccactctgcctcttgttttccagggggcaggctggggtgccctaggtgctgagagacctctatctggaagcgagatggccctggtcaggctggaaagggcctgtctagttggattttttgcccaaactcttggcatcttggagccatgtcctggctagcatgcctgcctggcccgaggcgctggagtctttctcactggggggccttccagtggttttccagctcttttcctcccacagtggcgtgggtctggcacgagcacattttgagaagcagcctccctccaacctcaggaaatccaacttcttccacttcgtgctggccatgtacgaccggcaggggcagcccgtggaggtggagcgcacagccttcatcgacttcgtggaaaaggaccgagtgagaggctcatgggcttggctgggactggccccgggagggaacccccaaccacacacacacacacacacacacacacacacacacacacacacacacacacactgggacagatgaatggatggaagctggctgagtggctggaagggtgggaaagaagttggggttaggagaaggggtggacaagggaggctggaggatccctgagcacccgagcatcctcccatcttgtccctgcaggagcccggggcggaaaagactaacaatgggatccattaccgcctccggctggtgtataacaatggtgagtggaggcccctgccctacccagccctgcccctgaagtctgggcactgcagcatcatgcgacacctaatgccccctgtgccagggctggggagggtgtgatgtggtctggtcattgaggctgcacatgctcccccagcagcaagccctctccatcttcccatcctaggactgcggacagagcaagacctctacgtgcgtctcatcgactccatgtccaaacaggtgagtcagcgcagagggtgctgaggcccatctcactctcttcccggaccctgcctccccctggtctgagtgagcctccttgttcctgccctcatctccctatgccctccgtccccatcagcctagctcccccagttcccaccccagcctgtgccggagggtgtgtggcttttgccctctgttctagaaaagacaatatttgtacaaaaaccctggcttgggtcatgtttcctagcagcccagccttagatgggaactcaggtgcaggtagtttatttggggagatgggaggggctcctaggagcaggggagggaggtaagctggacagaaaactgcacagggagctctggagaaggaatggcaccagaagtgtcccccctcgaagcaagtaccaggattttgcaccccgtatcaattagtcattggctgggaaccactcctaagggtagcacgtaacctctgagacattttcagaccaggcagttcctgtccactgagagcagttctcaggaggaagccctctgcagctgacatcagccacagccacgggaaggtgcacatttccagtaaaggggatgtgggcacagccctgggaatttccactgcagacccttgcaccttgctgatgtgacggttacgggaaggaggctcagaggccagcacaaggagctggaggaaactgaaacctgaacaggctctgatggattctgccaacacagggccccaaatctcagggcttttcagagaagctgtgcatgctggcaaggagggggctgagtctcaaatgggccagattagtgggctaggaatgcaagctggagatctgggcttcctacataggcagggtcttttggcagcctccacccaatcccagggcagagggaagaatggtttgtttctagaatacccatggccactgggctgggggaggcaggccaggcagtgcctagtggaactgtcaaggggacgggtgtggaaggggttcgaggaagtccacagagagagggatcccacaaatgggggaaggcacagagggttataaactaggaaggcagatttgcagttaggaagctcacttcttgcttctgggcagagggaggctggaagactggtgaggaggtgatgcagcagtcccaggggaagaccgagcctgggctagggatggtatgggggaagaggcgatagttatctagggggaagaggcagctgtgcagccctcggagctgactgggctggcagggatagctgagaaggacaacactcatcaacagaagcagaggtccgtcaggacatggaggatgcacacaggaggatgctgggggaggggaggggcctggtgctgggtgggcacaggagtatgtctaccccaccagccacctgacctttgtcctggcaccctgaggaaccccctgccccaagcagagccagctctggaaagagccacctacagacagacagaatctgcagacttcataccattcttgccagccggtggtggtccggtttgggaggaggggttatcccccgcctgggcagcccagagcaaggcagagggcgtgctcttccctggggcagggtctccctgggcctaggcttgggagatgccaggtccgtctgtgctgccacctgcacctcagaggagcctccttcccctccagcctgtgcacctccctctccccaggccatcatctatgaggggcaggacaagaaccccgaaatgtgccgagtgctgctcacccatgagatcatgtgcaggtgagatggccatgtcactcacacctcacccctctgccaaggcgtttctgaggactctacccaggccctgccccctcgccgcccttgcccctggctgctctctgctgctgctccctggagaagcctggtggcaggtgatgaagggagtggtgaggcccctgggcacagcgctggctgaggagagggtccttgaggccccattagcctggcctgtttatgtggcttctccgagtgtttttgtaagagaggcctcctgctgccactgggaagcttagctaataaagctcaggggagggctgctggggttgcgggaacagggtctgggaaggcctctgggattagctcagaagctaatctttgaggaaattttgaatcctagggcagctctctggcagggcagggtgggagtgaaggggtgcacagcccttggctcccttttccccattatcccagagcttggcatttctagtaaggtctccccaagagatgccagtcgtacagggtcctcggaggcagttcctgatgcatggaaaagagaacagggttctgaaatctgtggttggtagccaggcgcctgtaatcccagctacttggaaggctgaggcaggaaggctgaggcatgagcgcaggagttcaaggctgcagtgagctatgattgcaccactgcattctagcctgggtgacagatccagaccctgtctctaaaaaaataaataaagtaaaataaatttaaattaaataaatctgtggttggaactgtggctacccttggaaaagggagtgacaaggaagaggcatgaccggcatctgggctgctggccacgcagcacttcttggtgtggatgctgctttcatgggcagattcactttgtggccatccattggccaggcacaatggctcacgcctgtaatcccagcactttaggaagccgaggcgagcggatcacttgaggccaggagttcaaaagcagcctggccaacgtggtgaaaccccgtctctaccaaaattacaaaaattagccaggcgtggtggtgcacacctgtaatcccagctatgttaggaggctgaggcacaagaattgcctgaactcaggaggcagaggttgcagtgagccaacatcacgtcactgtactccagcctgggtgacagaatgagactctgtctcaaaaaaaagaaaaaaagattcactttgtggtcattcatgagctcaccgtttgagctcctgtctctgcgtagactgtgcttccatagagagaaaccctgtaggtgacctgcagcctgccctttcctgggtcctccaggaacgaggtgcctttggggcaggggtctctggccagcctcatccccaggctaggctctcagggtccctgcggaggagcccacagcctttctcccccaagccctgggagtgagcccctccagcccagggattccacacccagagacaggacatcagcaccctcagctcagggcgccccccacaactcacacactgtcgtggccccctccttccttggcttctgccttccctccttcctcatctttccttcagccggtgctgtgaccggaagagctgtggcaaccggaatgagacgccctcagaccccgtcatcattgacaggtacaggctcagggagggggcctggaagctcagaggagagtgggggaggggcagctgttttcaaccacagagcaccaaggctcaagggaggagcggagcagcccccccggggcaccaggttgggtggctctgagcagagagggaaactgccaggcaccagggagcctccagccgtggcccctgagtgaggccccaggtggccaactttctggagctgctttccccgactccctgagagaaggagccagggagggcagggaggttgagaggggggtgggaagggaggggaggaaccagcactcaggaaccgtccaggtggagtggccagcgtggtcatgtcagcaaaaaccaggctcaggttcccagttcacccctgtgctgtctgacctgacttctctgaacattcgtttctttcactggaaaagtggggaaagagctggcaggtttcagtcatagaattgtcgaggtgatgcatgtaaaagtgcatttgcacaccatgatttctatttctttattttgtgtgtgtgtgtttgttttgttttgtcgcccaggctaaagtgcagtggtgtggtcatggctcactgcagcctcaatctccgaggttccggtgatcctcccacctcagcctcccaggtaattgggactacaaggacacgcctccacacctggctaattttttgtattttttgtagagaccgggttttgccatattgctcaggctggtcttgaactcctgggctcaagcaatccacccacctcgaccttccaaagtgctgggattacaaacatgagccactgtgcctggcctacttctttttgaagaggaaatgcataaataaggtgtaaaattcaaatggtacaaaacagtaaataatgaaaaggaagtctccctccacccctatgtagagcatactgtacatgttttttttttttggtaacaatatattttagatattccacacaggaacataaaccatatcttattctccttttaatagaaaaagcattcataggtgcaaaaattcaagaagcttaaaagggtttacagcaaactgtctcccacctctgtctcccacccatccattccccaccaaataagctaccactattagcagtttctgttgtatccttcctgagatagtctgtgcatatacaacaaaatagttatatgttctttttgtaccctttccttttgtttttataaaaatggtgacagtggctgagtgcagtggctcatgcctgtaatcccaacactttgggaggctgaggcagggggattgcttgagcccatgagtttgagaccagcctggccaacagggtaaaatcccatctcaacaaaaaatacacacacaaaaattagctgggcatggtggtgtacatctgtggtcccagctactcaggaggccgaggtgggaggatcacctgagcccaggaggtctagactgcagcgagctgtgattgtgccactgcactccagtctgggcaacagagtgagaccctgtctaaaataataataataataataataataataataaaattaaattaaaattaaaatggtggcaggaagcagaactttcagcacctttctttttccttgaaaaatttagatctgggagtttacatcaggacacaagaagtctccttattcttttttgccactgcaaaatatttcattgtatgggtatgccataatttatttaaatagtcagatattgctggacattttggttgttttcatcccttttcagggatttaaaaatgctgcagtgaattactttgtccatgtgccatttcacacgtgtaaatttatatgaaggctattactaagtagaattgctgggacaaagaatatgtgcatttgtagttttgatagctactgccaattcgatctctgtaggggttataccaacagcattgaaaccagcaattttgagaatgcctattccttacactctggccaattaagtatttttgtttatttgttcaatcaacaattcttgagcatctactctgtgctaagaacttttctacatgctgtggattaagcaatgaccaaaatagacaaaaagccttgtgttcacgggcttacaatctggtaggggaaatagacattaacaaactaaatgaaaaaaatacatagcatgttagatggtgataacagctaagaaaaataaagccattgaggaagatctgggagtgcctaggaaggaaggtttgaagctttagggtatttaaggtctcactgaaaagatgacatttgagccaagacctcaaggaagtaagagagtgagcgatgtatttatgtatctgggggaagaatattctcggcaagagtgtgcctgctgtgtttaagggaaaacaaggaggcccaggtggctggagcaaggaaggtagtaggaggaaatgatgtcaggaataatgaatggggcagaggaaggcacgaccatgcagggtcttataggctgcatggaggccacacttgtgggtcattgtaagggctttggcaggacatggaagccattgaggggtgttgagaatgataagacctgccttatattttagcaagatcactctagctgccatattgacaatgacctgtacaaggcagggagatgagttaggaagccagtacaatagcccaggtgaaggatgatggaagctgagactagggatgctataggggaggttgtaagaagcggctgcattctgtgtacatttcatttcataggcaggactgacaggatttgttatggaaggagagagagagagtcaaagactcaaagatgtctccaaggtttctgacctatcaacttagaaggatggagtttcctgagaagggtgtgatttggggaagagcaggttttggaggagaaagatctggagtttggtttgagcatgttatgtttatgatgctcactaaacatccaagtgaggagctgaaaaagccacagaaaacatgaggatgggactcaagagaaaggttcaggctgcagatgtaaatttgaatgaatgaaatcatcgaggggatgagtgttgatagcaaacagaagaggcctaagaactgaatcctgaggtgtctagtatttagaggtcatggagatgtggaaccagcaaaggagaatgagaagaagtgaccagcaaggtaagagggaagtcaggggagtgtcgtgtcctgaagccaagataagaaaatgttccaagaaggaggcatctgtgtccagtgctgctcatgggtatgataacaaagactagggactgaccattagatttagcaatgaggaggatattggtgactgtcacgggagtcatttcagtggagttgaggggcagaagactgatagaattgtgtctaagagagaacaggaggagagagattggagacagtgagtagaggaactcttttgagttttgctctaaagaaatcaaaggaatcagatgatgtctggagcactgtgtagtgccaagaaaaaatacagcttgctcatatgctgacgagaaacagccaggagggaaggggaaaatgaggatgcaagagagaggggagaattgctgaagcaatatccttcaggtggcaaaagggatgtgacctagtgcataggtagagaggctggttttagctgggagcatagacagttcatccatggaaaagcagggaagacagagacatggacacagaagtggataaatgggtatatccaagtgggagcttggatgttgtcttctgattgctttgttttctccatgaactgagaaccaaggtcaacagtggaagataaggatagagagggagacactagagggcgtgatatagttatccaagagagtgagtgaaccagggggatgaatgtcatgtgattgacaagcggcactgagggtacccttgacgtttatgatcataaatttggtgataactttctccagccatgttgagctgcacaggtgcaggtgcagaacaggtgagtggttgcataaaaccagagttagaggtttgtcagttgagtagaaggaaacatgagagggcaagagactgaaatgtatgtgcaagggatatttattttttaaaaatggaaggatttaagctgggtaaagagacgagtatgatgagagtgtggacatcaattctgatggggccaaaggattgttggagttgagatatgagacaggggttgaactggatgttaggtggatggagaatgggttgcctgcagatgggattcagggttgaattggtaatgcgtggccagggaaggtggagacaagatcgttggagaaaagatgctcacggaatggagaagagagtgcattggaataattatctgtctatactgacattgaaataaccaagaattatgacagggacaaatgttcaagggtgtatataatgatccaggagtaaagcttcatggagtgaaggtaagtgatcttggggaagataaatggcagcaacaagcagtggttaccgtaactattttttctcatatttctccatcgtgtaagcgaacagcagtatcccagtgatttccgtttctcttactctgagtgaggttgagcccaccagggctatttaaaggctatttgtgtttcctttactgtgaactgtctgttcatatcctgtgcttatttttcttttctccttccttccttccttccttctttccttccttccttctttccttctctctttctctctctctttctttctttcttttctttctttcttcttttttgacagggtcttgctctgttgcccaggctggagtgcagtggcgcaatcatagctcactgcacctcgacctcctgggctcaagccatccactcaccttagcctctgaagtagctgggaccacaggctcacgccaacaagcccagctaacttgtgtattttttgtagagatggggttttgccatgttgcccaggctggtctcgagctcctgggctccaggaattcttctgccttggcctcccaaagtgctgggattacaggcatgagccacaacaccccaccatgtgcttatttgtatgtaaattattgactttttaaaaaactgatttgtaggagtgtgtattaatgaaattatccctttgtgatgagttgtccatattttttcaagtcatttaactttgcctatggtgaaatttgcccagttcctaaatcttttacatactccgggttttcattatatttagaaaggcctttatcactccaatattattttttaaatgtatcctgtggttgcttccagtatttagatggtttcattgtttacatttaaatgtttgattcatttgaaaaatatcttgttactatatcctatatgatacatgcaaaagaaaagtaaaacaaaataaaaattataaggtataattaaaaattataaggtataataaccaatgtacacctgtgaacctaccaacaaacttaaaattagaacatgagaaataccattgaagccagctccccccagtccccataccactgcctaaccctctcctacaggtaaaccaagttttgtgtttatcatgacctggcttgttaaaaaaaaattcatcacagattgcataatcctaaaaaaagtgtgttggtgtagtttagttgtgcttgtgtttaactttataaaaaaaaatgataccatgttgcagcaaccttctgcaatgctctttttaaattcagcatatttctaagatttatctatcttgttgtatttagctgtagtttgttgtatttagctgtagtttgtcatatttagtttttgctattataagcaaagctgctatgagcattcttgtttgtgtctcttaatttgagtaagtacaagagtttgtttaggatataaactaggtcaggaattgtcaggtcatggatacgcacatgatcatcttaacaagttgatgtcaactgttttccaaggtggtttgactaagtaacactcccacccacaatactgagtttctatcgctccacatcctcaccaacacttaataatgtcacacttcttatcgtttgccaatctggtgggtgtacagggcattttgtgatggccttaatttgcattttccagattactattgaagttgaacatcttttaatttgttggcttatttatttatttatttatttttgagacacagttgcactccgtcgcccaggctggagtgcagtggcgcaatctcggctcactgcaacctctgcctccctggttcaagtgattcctgtgcctcagccttccgagtagctgggattacaggcgcacgccatcacaccctgttaatttttgtatttttagcagagatgggatttcgccatgttggccaggctggtctcgaactcctgacctcaagtggtctgcctgccttggcctcccgaagtgctgggattacaggcatgagccaccgcgcccggccttactctgtattttactttaaaaatcttgccaggcacaatagctcatgcctatagtcccagttactcagaggttgaggtgggaggattgcttgagcctggaaaattgagggtgcagtgagccataatcccatcactgcactccagctggggaacagagtaagaccctgtcttaaaaaaaaaaaaaaaaaaaatccttgccaggcgcagtggctcacgcctgtaatcccagcactttgggaggccgaggcgggcagatcaccggaggtcgggagttcgagactaggctgaccaacacggagaaaccctgtctctactaaaaatacaaaaaaatcagccgggtgtggtggtgcatgcctgtaatcacagctactcgggaggctgaggcaggagaatcgcttgaactcaggaggcggaggttgtggtgagccgagatcgtgccactgcactccagcctgggcgacaagagtgaaactccgtctcaaaaaaaaaaaaaaaaattctttttctctgctgaggtcatgaagatattcttctatattttcttccaaaggtttcacagttttccctttcacatttgtcatccctatggaactaattaggggtatggtgtgaattaaggaatcaatgtaattattttttacttaggaactaccaattattccaataccatttattaaatagctcatcctttcccactgagttgtagtaccagctatgtcctatatcaagttttctgctatttgtgggtctgttcctagactctctattttattcctttgatctatttgataactcctatgtaatcatcactttttaaaatcactatatctgtataataccaatgcaaggacaagtgtatagggcaagtcttccaccttccctgaacattcttcagttgaatattggatattttggccttttgtgtttccatgtaaacaccacactcctcttagagttttaagcaatattacaatgaacctatacgtcaatttgaagaagaatttgtctttatgctactgagtcttctgatccatgaatatggtttatctcaccatttttgtagatcttctttaatgcttttcaatatagttttataattttttcaataacggccacaaatactcattactttcactaattcatttattcaataaatatttattgagcatctactatgtaccaggcactaggtaaacagtacacttaccaggttctaggctttaggaatacaagagtaaacaaagcagacaaaaaaaacctgttctcctggagagagaatatatagggatggggaataaataattattgtaagtctttagaaggtaataaatgaaaaaatagagaaaaataaaacaaattaggattgggggaatgtacaattttaaatgaggtagtcaattaagccaaattgagaaagtggagttacaggaaacactgaagagatgaagaaatgagctatttagttgtatgggtagcttatttccaggtactatttgtattttgttgctattgtaaatggcatcttttgttatgttttctaattctttgtttatattatagagaaatgcaactatttttgcattgatctttgtctttagatttgccttgtttttatttttttatgtagacagccatcttatacaaacaaatactgttttattttatctatccagtccttatatattttatttctttttcttgctttattgcactggctaggacctcagttacagctttgaatatacgcagtggtagtgggcattctttttttttttttttgagacagagtctcgctctgtcgctcaggctggagtgcagtggcatgattgcagcttactgcaacctctgcctcctgggttcaagtgattctcctgcctcagcctcctgagtagctgggattacagatgcatgccaccatgcccggctaatttttgtatttttagtagagacggagtttcaccatgttggtcaggctggtctcgaactcctgacctcgtgatccacccacctcagccttccaaagtgctggaattacaggcgtgagccaccgcacccggctggttaatgttaagccaattctacatttcccagataaaccccacttaataaggatgtattatctttttaaatatactgtttgattctactttacattttgttaagaatttttgcatgtatgttcataatggatatttttctgtagttttcttgtaatttctttggttttgggattggggtaatgctggcctcatttgaattgattgggaagcatttccttctcttcaaatttttttgaagagcttgtgtggaaccagtataatttcttctttaagtgtttggtggaattcaccataaagccatctggggctggagttttctttgttggaaggattttaactgtaatctcaatttctctaatagatatagaaggttattcatttctttctgagtgagctttggtaatttatgtgtttcaaagaatttgtcaatttcttatgagctgttgaatctgttggcataaaatgtttataatattcccttatcatccatttagtatttctagaacctatagtgatgtcacctctctcattcctgatactggcaaattgtgtcttctctttttcctcatcaatctggctacaggtttatccattttattgagcttctaaacaaaccagcttttggtttcattgattttctctatcatttttctgttttttgtttcattgatttccactttggtatttatttcctttcttctgcttacttttggttaattccttctccttctggtgtcttaaggtggaagctaagttattggcttaaaatctttcatttttgtcttaaaatagacttttagagacatacacttctcctcaagtactgctttcggagcatacccaaaattctgatatgttttcatttttattcagtttagaatgctttcaaatttcccttttgaggtcttttttgacccacatgttacttaatttccaaaaacttggggggattctcctagaatctttttattatcaatttgttttatttacttatttattttgagactgagtctcactctgtcacccaggctggagtgcagtggcattatgatggctcactgcagcctcaacctcctgggctcaagcactccctctgtctcagcctcctaaatagctgtgactacaggtgtgtgccaccatacccagctaatttttgtattttttgtatttgtttgtttgttttgagacggagtcttgctctattgcccaagctggagtgcagtggcgcaatctcggctcactgcaacctccacctcccaggctcaagcgattctcctgcctccgcctcctgagtagctgggactaaaggtgcccaccaccacgcccagctaatttttgtatttttgttagagacggggtttcaccatattggccaggctggtctcaaactcctgacctcaagtaatccaggccctggcctcccaaagtgctgggattacaggcatgaaccaccgtgcctggccttttgtattttttgtagagacgaggtctcaccatgttttccatgctggtctcgaactacagggctcaagcaatctgcccacctcagcctcccaaagtactgggattaaaggcgtgagtcaccatgcccagcccttcattattaatttctaatttaattgcattgtttgtcagacaacatgtactttgtgtgacttgaatccttttgaatttattgaaacttgctttatggcatagaatatggcccacgttggtaaatattttgcctgcgcttgtgaagaatgtttattctgttgttattgcgtgaaatgttctataaatatcaaacaggtcaagttaattgatagtgttgttcaagtgttgttttagctgattttcttcctatttattctactattgaaagaagggtattaaaatcactgaccattattgtacatttgtctatttctccttgaggttctatcaattttccttcatataatttgaaaattcattgttaggtacatggatgtctagaattattatgtcttcttgtttaattgacttctttatcataaaattcacaaaatctactttgataatatatagtcacactagctccctgcaacctccgcctcccaggttcaagcaattttcctgcctcagcctcccaagtagctgggattgcaggcacccactaccacgcccagctgaatttttgtatttttggtaaagacagggtttcactatgttggccaggctggtctcgaactcctgatctcatgatccccctgcctcggcctcccaaagtgctgggattacaggtgtgagccaccgcccccggcccattcttcttttctttatctttttcttcattttttttccccctttctttagatgacttgggtttttcagattatcttatttttgtctcctgtgttggcttcttagcaaaactctatattttgttatttcagttgtttatttagaacttattgtatatatcctaaacttactgcaatctaccttcaattataccccttcttgtattgtatgctattactgtcgcagactttatttttacgtgttataaaatccaaaatacattgttattattttgctttgtcaattgcttttaatgagatttaaataatatttaaaatattttatctatttatccatgtagttaccatttcctttctgttgatccaaatttccatccagtatcaattttcttaggcctgaagggcatccttaaatatttcttgtattgtttgtgaaagctattttgctgggtatagaattataggtgatagttgggtttcttttttattggtttgtaagatgtcgctccactgtcttctctcctgtgtttctgataagaaatctgatgtttatccttatctttgttcctctgcacataacatgtctttcatttctagctgcttttaagatattcttataattcattttgagcaacttgattatgatgtacattgatggagttttcttcatgtttcttgtgcttagggtacattgatctttttgtttctgggagtttacagttttcattcaatttggaaagtttttgaccatgatttattcagttatttttttctacccctcttctttggggactccaattactcacatattggaacttcttgaagtttttctgcagctcactgattctcttctttttttttttttttttttggatttttttccctctgtgttcgttctgaatagttttaactgttatgccttcaagttcactaatctttttttctgccagttttcatctgccattaatcccattccatgcaattttaaaaatctcagacattgtagtttttatctctacaagtttgatttgatttgtatcttttttatatcttccttgtctctaagtttctttttttttagatggagtctcgctctgtcacccaggctggagtgcagtggcacgatctcggctcactgcaacttccacctcctgggttcaagtgattcttctgcctcagcctcccgagtaactgggtttacaggcaagtgccaccatgcccagctaatttttgtatttttagtagagacagggtttcaccatgttggccaggctggtctcgaaatcctgacctcaggtgacccgcctgcctcagcctgccaaagtgctggaattacaggtgtgagccactgcacctggccccatgtctctaactttctgaacatataaaacacagttataataactcttctattatatttttctgctgattctaacatctgtgtctgttctgagtcagtttcaattgactgattattctcttccttacagatctttttttaagcatcttggcatgcctggtaatgtgtaattggatgtcagatattgtgaactttttcttgttgggtagtagatatttttgtatttctgtaaatcttgagctttgttctgggatgtagttaaattacttggaaccagttttgtctttttgagccttggtcttgtttttgtttttgttttttcttttttgagatgggagtctcactatgttgtccaggttggacttgaaatcctgggctcgagcagtcctcccacctcagcctcctgaagtaaccaggactacaggtatgtgccactgccctcattgagccttgcttttatgatttcttagatggtccacagagtactcagtctggggctaattattcctcactactaaagtaagactttcctgagtactctacccaatgccctatgaattacgaggtgtttttttttttcagtctagttggtagaaacaagcactattttcatccttatgtgagcaccaagtcatgcttcctttattcgttttgagtaattctttacttggcttcagatagttttctcacatgcatgcctttatcagtactctactaaatgttcaaggaggttcctccgcaaatctctaggatactctttgtatgcagctgtctcctctccaagaaatctagctaccttggtctccctggaccctgagctctatctcctcaactctgggagtctgctgggaagtgcctcagttccttctccctatgccacagcctgaaaacactcagagcattatgctgggatatttgtaaggtttagcctgtttatttctcatctcttggggatcactgcccttcattgtgtaatatctattgtcttgaaaaatgttttatttatttcatctggtatgttttgttttgttttgttttcaggatacaggtaaatgtggtctccgttactccatcttggctagagcagaagtgtgtttcttaatttccaaatatgtggtatttttctagttatctcttgtcactaatttctaacctaatcgtgtgtcttattggatctactatattacacatgtccattaaatcaagattgtgttgttcaagtctatctttacttataattgtctgcttgatctattggaaactgatagatgaggttataatctcccgcatgagttttcagcttttccctgttgttccatcaatttttgacacatatatattattactattcgataaattgtggacaggcttttaaaaactttataacttccttctgaattgaaccttttatcagtattcattgatactttatttctaataatacttttgcttcaaagtctgttttatctgatattatttacaggctccctcaaaacacttttggtgatatttgcctcagatactttttactctgcatttattttcaaccattatgtgtccttatgtttagatgtttgtcttttatttatttttatttttttttattttttctttgagacggagtctcgctctgtcgcccaggctggagtgcagtggcgcaatctcggctcactgcaagctcagcctcccgggttcacgccattctcccgcctcagcctcccgagtagctgggactacaggcgccgccaccacgcccggctaattttttgtatttttaatagagacggggtttcaccgtgttagccaggatggtctccatctcctgacctcgtgatccacccgcctcggcctcccaaagtgctgggattacaggcttgagccaccgcgcccggccagatgtttctcttttaatagcacgttgctggattttttaaatctagtctattttttaactggcaagtttagttcatttactttattgagattatatttttttcaattttattggtgtataggtgacaaataaaaattttatatctttaatatgtacaatatattttaaccattttctaccatattgctttgtgctttctatttgttccacttctatgtttctttgttttcatttcctgtcatttaaaaaattaagtatttcatttgatgtgtgtgtgtttcttatctcattttctcttctttaatggtttggaactgtattcacttcaattctatcctttgagttattgcccttgaaatttactacatattcttaagaaagtcataattcctttcctgactaatattacagtttttagcaatgatgtgttggagctggtttatactggctcacaagagctgattgttagcatctcttctcagttttatattcagtgacacccattggcagtttgaaatcaaccatgctgggaacatataaccatggaaatcaacaacactataaatcagagttttgcaccctgaaaatttggaaatggttgttaaacattaaccagtacactactgatcttaggccattctatcacacctgccctattttttaaagctgcatatcattgttatgcttttttattatatatgaataattttttttaactctgctaaattttctgctcaccttttccttcttgcattttgcagctttttggagggccattttctttctttctaaagtacatcttttagaagttccttgaaaagattggctggtaataaattgtgttctcacttttgtctttgtatgactccgtttcttgaaagatggttgttctgggaacacaattccacattgacagttattttttacttagtactttgaatatatttccatttttgttgttgaaaagtccagcatgccaggcatgatggctcatgcctttaatcccaacactttgggatgacgaggtacaagaatcacctgagcccaggagtttgagaccagcctgtgcaacatagtgagaccccatctctacaaaaattaaaaaattagccatgtgttgtggtgcatgcctgtagtaccagctacttgggtggctgaggcaggagaatcatctgagcccaggagctggggattacagtgagctatgatggcaccattgcattccagcctgggcaacagagtgagatcctttctcaaaaaagaaaaagaaaagttcagcataattgtcattcttttgtagataaactcactcttctctctggcagtatatgagagcttctttttgtctttaaagttcttcagtttcactctggtatgtctaggtgtggatttttaaaaattctgcttagaatgtgttggcttatttatatctatggatatacatcttttaccacgtctgcaaatttcttagcctttgtctctcctaatgttacatctcatttgctttctctcttttctcttctggcactccaaagaacactccaatttagatctttttatttcatcctccatgtatcctaaacaattttatatttcccacctatttttctcttcatattgcattctgggtaattgtttttcattcatctttcaagtcattaattatttctttagctgtatctaatttttaatttatcccatgagttttttatttcaatgattctattttttatttctgaaagttttatttagatcttttgcaatatgtctagttattttgcatggtctcttcttgcttgctcatatttctaagttgatttttatttctttaaatgttttgtagttattttacattctgtatttggtaatttcaatatctgaagtccttggggctttaaatctgttgtccattatttctgctattactcatggtggcttgtttctgtgtttggtctttttgttattgatgtggtggtggttattttagtttatatttggttgaaccaaatctggccccaaaccgggtatgttttcccccagaagaattttgtctgattctgcctggaacaaggggtgctaccaacctcagacttttctaggttcctcagaggatccagggccctcctctcaggtggttcctattctccatcccggtgtttatattggcatttgccacaagtacagttctgatatttgtgtatttgtgttagctcatagcttatggctcccaattagatttcaactcacttatttttgttttttagtatctttggcaatttcccttaccgtttttatgaaagcctggtatctagttctattgccggggggacctcaagatatgtagtctgctattatcctagaagaggaactcattcattcagaatttacactggtgaaaggtagaaaataaggctctacatgtatttttttttcttatggcttccagttgccccaagagcatttatttaataatccatctttcttccatcaattggaaatatcaatcacatcatattccaagttcccaaatgtaattgtatgtttttctggacttttcattcaattttattattccatctgtttttcatggggaaatatgatgctgtggccaggcaaagtggctcatgcctgtaatcccagcactttgggagggcaaggcaggaggtgaggtgtagtaccagctacctgagaggctgaggcaggagaatcctgacttgaagtcaggagtttgagaacagccagggcaacatggtgagaccatgtctctacaaaaatgttttttaattagccaggggtgatggtgtactcctgtagcctcagcttctcaagaggctgagttggaggatcactcgaacccaggagttcaaggttaccgtgagctatgattgtaccactacactctagcctaggtgagaaagaaagaccctgtctcaaaaaaaaaaagaaatatgatgctgtttcaatttttgaagatttaaacgtgttttaataactggtagatctagtccttttcccccattactcttatattttagaattttcccaaatattcttgattatttgttacacaaactttacaattagattatctagatcaccaaaacataacttcttggtgtcatttttttaggttgtggtaaaaaacacataacgtaaaattttccatcttcacattcatgagagtatggttcggtagtgttatattcaaattgttgtgcaacagatctccagaactttttcatcttgcaaacccgaaactctatatttattaagcagctccccatctccctctccccccagcccgtagtagctgccatcctaccctctgtttctatgaatttgactactttagactcctcacataagtggactcacatagcatttatctttttgcgactggcttattttacttggcatactgtcctcaaggttcattcatgtaacatgtgacaggattgccttcctttttaaggcttaataatattccattatatgtatataccaccttttattatatattatatgtttataacatgtatatatattttattatatacatacatcgcattgtatgtatatactacatttatccatcaatgaacccttcagttgcttctatctcttggctatgaacatgggtgtgcagatatctctctgagatcttactcctttccatttttttggatatacagtcatccctcagtatatgcagggattggccaggttccccatcctgcccacacatgtaccaaaagctgtgaatactcaagtgccacagttgtccctgcagaaatgcatatatgaaaagtcatccctctgataagcaggttttgcatcctttgaatactgtattttttaatctgcatttggttaaaataaatccacatataagtgtacccagacagttcaaacctgtgtttttcaagggtcagctgtatacctagaagtggaattgctgaatcaatggtagttctatttctaattttttgaagaaccaccatactgttttctatttaaaaggtcgcaccatttaaaaatcccaccaacaaagtttccagtttccccacatccttgccaacacttatcatcttttttatagtagtcatcctaatgggtgtgaggtaatatttgattataattttgatttgcatttctctaatgatgttgaacatcttttcatatgcttcttgaccatttgtacatgctctttggagaaatgttcattgagatccgttgcctatttttaaattggattatttgggggttttctgagtgttgagtgttaggagttccttctatattctagatagtaacccctcctcagatatatgacttgcaaatattttatcccattctacaggttgccttttcaccctattaattgtgtcacttttattgaaatcatgtttaactcagattaacctggaggaaatggaatatttatgataccaagtctttaaagtgctttgaaaatgtaattcatttattgtataagttgcactaagaagggtgcaaacaaaagcagctttaccatttctaacaactgccctataaacctgctcggtgagatcatttctctccatccctggatgaaataatggactattccttcatcttttttccaccactctcatgaaataaaaatcctctgatcacttaggtaagaaaatgtccagaggagtgtaacaaactccagagattgtctgattctaaagcatctcgtcatcctggcttggtcctgccttgggtttagtggtgaggatgggtttggtaaaagggtcttctccctttcttcattcaccttcacccctacttattacctgtagtctagagtcacctccatggttgaggtggctgaagggaaaagaggttcgggggcggggggttgaagggacaaggtgttcctaggtgacacagtggcaatctgtcatttgtgcctctggaaatggtgaataaccctggctttctttctgagcttttgtagatctctcaaatcccccatccaggaccctctgatggccttttgtgatcccctcagcttctagacctgattctttatccacagcaggattcctaacctgaggtctacaagaatacctgtgggtccataggtagagttctgggaacttagatgggaaaattccattttttttttacacagtttccagtcctggaaacctttagctaatctttagcattccttcaatggtgggaatgggcaacagatcaccatagtattaatactctgtgtaattttatcactagaatggttaatttccatatcatagtagagctgttgcagatattttgaaatcccattatactcactgccacttcaagattactgtagttgttagaacagctactagatcttattacttaataaattaataaagtgtgaatataactatataaccattttaaaatgttttttgataactttcaatataattggtttattttataattctatgaatttattttgtacatatgaaaacaatatgctgagaatgggttcaatgggtccatggcaccaaaaaaaaaaggttaagaactcctgactgaaagccttcgccgactcctattgagcgcattttcgcaacagttcacagccagccacgctcaaagaacccaaatctggctgatgaaaaacaggcatggtccttgccctaatcagctctgaaacagcatccggttcttaaagccacccccaccaatgtctggccccgcttagctactcaggatgagcttgcctttccccagcctcttgctgataaacttcacaagtatgaatttagtatggatctctctgctctttgaattctagtggatgcttgtcaacttctgcaagcagtccttttgaagctcccctactaggccgaagtgagacagacacaccccacacttcctccccattgagatggggggagctacagcatcttgagagctccacctaccacagttcctatttttcaccctagagagagatgatgagctcaaggacagtctatgaccgggtagcataggtggtccagcagctacattgtcgttcttaactttgagacctcagctgaaaccaagacaaaaagagtccgttttcacatcctattacacaaagagtagtaagtagaggttgttactatctatagagattgttaccctctagaagcagaacctgaggtggggattcaatttcctccctcacagggagtgaaggaagcaggaggaggcaggcagcagagctgagtaaggatgtgcattgaactggagtccaacctccagcctcagagccactggaagctctggaatgtggatcccactctgtggcaaggacacagtctttggcagctctttgagagcaagtcagtcagaggctgccggccagccctatggtgagggaataaccacccctggcatttccaggtgccctgtggctgagggcactttgcagctgggggatgaatgcacttgcttagtgtattagtttcctaaggctgtcctaacaaattactgcaagcttggtggtttaaaacagatgttaattatctccccattctggaggccaagtctaaaagcaaggtgttggcaggtccgtgctccctccaaaggccctaggggtgaatcttcccttgcctctcttagcttctggattctgttggcagtccctgtggcggcatcactccaatccctgccttcatcttcacagtgcctcttcctcttctgtctaatctccctctatcctattgttataaggacttcatcactaaatttagggcccactcagataatccaaattgatttcatctccagatcctgcaaagaccctttttccaaataaagtcagtttcacaggttctgggatgtagacataacttttgggggggccaccattcaactcactacccccagtaaagggggttggggtgaggcaacaatgacgtcccctatacaagtaatccttaagccaccatatcactcaaaacaagctctgtggactctgctgtccccttaactgctggagagactcatgagcacacatacatgaagcactgttccctttaggcatgcgaagctggcctgtccaccctctgcaaaaacaggacgcgcagggccctgtcggctgtgcagcagctctgctggtagaaagcattcgctttcttctccaccagacttcttatataccatcctatcagtcagtgctccaatcataaagcccatctcatttccctcctaccagccttgctgggttttttgtttgtttgtttgttttagatggagtctcgctccatcaccaggctggagtgcagtggcgcaatctcggctcactgcaacctccacctccagggttcaagcaattctcctgcctcagcctcccgagtagctgggattacaggtatgtgccaccatgcttagctaatttgtgtatttttagtagagacggggtttcaccatgttggtcaggctggtctcaatctcgtgacctcgtgatccgcccgcctcagcctcccaaagcgctgggattacaggcatgagccactgtgcccagcccagctttgctgtttgatgacactgtaagttagcataatgtgctgtgacaaagaatccccaaatgtggtggcttaaatatttgtttagttctctcaaaacagtccagggcatcagtccagggtggctcttctccataaagtcatccaggaccaagcagtcttttcctcagctctcccctaaggtgacaccctcatctgtatagcccaaacaggctcagagataccaaaaggggatagaagaaatagggcatgcagcttacttataaagacataacctaaaggtcccaccttacctctgctcatgccattagccacaccctgctgcaagggaggctgggaaagatagcgtctaaatgggcatccctcaacctaggtaagactcagagggttctatcatgaaaagaaaggaaggaagctagataacggggacagccagcattctctgctgcggacatctgtctggccacttctactgtccttcttcctacgaacaaaccaagtttttctctgtccgtgggtaccagatgcctctctctcttaagcaaacccctgtaatctatggtattccttttagaacagggaactggcacagaatccaggcctccatctgcctgtgacttgatgggccttgtgcttctgggatgtgaacgtgaattcttaggaatagagctaaagccaggagtacctcacctttcacttgccacttcacattgtgtgtgcagagcttcaacacacagaatgtgagtttctttatcagttgcatgctaggttgggccccagtcaaacttaatagttctatgcattcttgctagtagggtattgaagttgccagttattattgtttgttccttcaattctgttagtttttgcttcatgcattttggagctgttattagatacatgtgctttttttttttttcttttgagacagggtctcactccagttgaccaggctagagtgcagtgatgcagtctcaactcactacagccttagggctcactacagcctcaacctcccaagctcagctgattctgccacctcagccccctgagtagctgggactacaggtgcatgccaccacacccagttaattttttgtatttttagttgagacggggtttcaccatgttgcctgggctggtcttgagctcctggattcaagcaatctgcctgcctcagcctcccaacatgcgggggttatgggcatgagccaccacacccggactgttattagatacacatgcttataattgttatttctttctgatgatagacacttttatcattataacatgtccttctttgtctctcataatttttatcttagtgtctattcataaattagtatagccactccagctatctttcagttagggttcacatgttatctctttttccatccctttattttcaaagccttttgtacatttgaatttaaagtatgtctcacatagacagcatatagttggattgtgttgtagttttcttttttaatccattctgccaatctcttccttttaatgaagcatttcatccatttatatttaatgtaattgctgatagaacaggatttatgtctgccattgtgctttgtgttttctttttcttttattttttctttttcttatttttttttgagacggaattataaagagttcccatatatcccctatccccacaaatgtgcagttgtcttttaaattagataggaaaacaaaatcattacaaacaaaaatacatttatgctgtcttttatgtttacctatgtagtgacttttaccagtgctctttatctgttcatgttaattcatattactgtcttgtcttgtttcatttcagactgaaggactccctttagtatttcttgtaggacaaacctgttagtgatgaatcctctcagtttttgtttatctgaaaatgtctcaatttctccttcatttttgaagttgatcattttagaagttgatagttttgctggacatgcaattttttggtcgatagttgttttcttttaacacaatatatcatctcactgccttctgtccttcatggtttcagaagttatgtggtgatcttattaaggattccttatatatgacgagttacttctctctctctctcattgcttctcagatcctttctttttctttggctttcaaaagtttgagtatgatgtgtctttgtatagatcatacactttgtgttcatactacttggagtttactgagcttcttaagatgtgctcaataatgtttttcattactgagcacatttaggaaatttaggggcattttcttgaatatttttctgtcctgttccatctctactctccttctcagattcccattatacatatactggtatgcttgatggctcccacaggtctcttaagctctgttcatttttcttcattcttttttctttctgcttctgagctagataatctcaattggcctatattcaagtatactgattttttttcgtcccaccaaatgagatatgttgttgagttcctctaggtcaggggtgtccaatcttttggcttccgtgggccatattggaagaagacttgtcttgagccacacataaaatacattaatactagcgatagctgatgagaaaaaaaaaaaaaaagcaaaaacatctcataataagaaagtttacaaatttgcaggctaattcaaagccaacctgggctgcatgtgccccgtgggtcgcaggttagagaagcttgttccaggtatttttaaattttacttattgttcttttctacttcagaatttcatgggtttttaaaaatataatttgaaatcctttattgatttttttggtgtgacttcattctcatacttttcttgaattttttagacatagtttcctttagttctatgaacatatttataattgctcatttaaagtctttatctatgccagctgcagtggctcactcctataatcccagcattttggtaggcagagaagggcagattgcttgagcctaggagtttgagaccagcctgggcaacatggtgaaaccctgtctctacaaaaacctacaaaaattagctgggcatggtggctcatacctgtagtcccagctacttgggaactaaggtgggaggatcacttgaacctgggaggtcaaggcttcagtgagccatgatcacaccactgcacttcagcctgggcaacagagcaagaccctgttccaaaaataaattaattaataaagtatttgtctaaaaattctaacctctgggcttcctcagggatagttcctgttggctgctttattacaatgtatgggtcttactttcctgtaccttgcatgtctcataattgtttgttgaaaactggacattttaatcatataatgttgcactctggcaatcagatcctccctcccaattttgttcttattgctattgctgtttgtttgtttagtgattttcttggactaattatataaagtctatatttcctgtcatgtataatcactgaagtttctgctcttggcttagttatcaggccatgattggacaggcatttctttaaatgccttgaatgccaataagtgttcaacccattgccaaaaggttctgtatgtgtgttaagacatgccttcagtgctccagcgatttacaactctgccttgaccttcacttcctgcttgctcagggccttgggataaaccagaggtgagagaccaggggctttccatgccttttttgggcatgtgcctctccctgcacatatgcatagctttctagatctccaggaatatgtcagagcttttcagagcccctgtgaacatcttattccccactttttcctttaaaatattatggccaaacttttatttgcccccaacttgtattgctgcctcatgtagctgcaatgttaagcaattgccgctggctgttttcaacaaacaccctgaagatagggtctttcccactaagtaagttctgaatcgggtcaaataacaagttctgcaaataaagctgtcagggagttgctagaaaggttaaagagtgaaaactgactgggaatacagcttgttgagaggctccaaacccactctaccccttcctatggttgctagcttgctagttttcacaactacaatagtggttgcaaggtagctggtcttcaacagggctggggagtaggggatgggaatagggcaaattaaaacaccacaaagctttctgttcttattacaactcagccatttttcttgcctcaatgttccttgagttgttgcacacatgttgttaatttttagagttctgagaaagttgattttgaccatgtttgccagtgttcttgtttctttatggaagaatggattttcagaggtctttacttagcaattcccaaagtcctgtccctgtaattgttatttcttacctgggcacaagttaaaagtgccttgggggctttagtccagcattcatccagtcacagtaatttttgactcttgaattctatcatgaatcaatcagcacctgttgtggggctgggactatgatggatgcttgggagaagagaggcttaaacaatgatccctgccctctgagagcttacagagcagttgaggagacaaatataattatgtaaacaacaatttataattttgaaaaaaattcgtgtacttgaagaaaggtcagtagagattatctataattacataataataagaagaaatagaaaacaatgtaaggcttgaagaccacactatccaatagtactttctgcaatgatgaaaatattctgtaccaaccaatatggtagccaatagccacacatatttattgggcacttgaactgtagctaccgtgactgaggaattgaatatttaattgtgtttaatttaaatcaaatttaagaaataacacatggttactgtatctgacatcacagctctaagactttaaatatttgcttgattggccaggatgaccctgtggcaggggtagggaaacataccctcccatgggaggctcatagctcttctctggctcctagggatagatagaagctgggggctatggatactccctggcatttaattgtgcctgctgcctggtgggtgttgttcagtgacactattggaatagtttaggtccgagccacctggcaaaggtaagctctggtctactctattgggggcaaatttagaccctagatcaggcacattataagtgcaattagatgaaaggggctgtgggaactgcaaaagaatcagcccccttcctaatccactggtcaatgcaacattccctgttttcctctacagccacaaaactagcccaatgtcatccatctccttccacgctttccagcaggatctcccacactcatgctgcaagcacagacttctgtccagatccattctggcaatcccccttgaggttccagaacctccctgctgggtcagtgctgaggtgagactaaggtttccctcttgccacctgaatgcactgcacttccttccccattccccccaacccccaccactcttttcagagctgagagcatttgagagagggagaagcagagggggttcaagagagattcgctcatgtgctccgaaggtcatataggctgagatgccagtcataaggacaaaggacccctaatgaagaggaaggacttatgaggagacctctgggcagccgaagccaagcttagggccagactggcctccatgctgagacaggagcagagatttggacagtgcctccatagaaaattgggggaagaggaccgggcgcggtggctcacgcttgtaatcccagcactttgggaggccaaggtgggcagatcacaaggtcaggagatggagaccatcctggctaacacggtgaaaccccgtctctactaaaaataccaaaaaattagccgggcgtggtggcgggcgcctgtagtcccagctactcgggaggctgaggcaggagaatggcgtgaacccgggaggcggagcttgcagtgagccgagatcgcgccactgcactccagcttgggtaacaggagcgaaactccgtctcaaaaaaaaaaaaaaagaaaagaaaagaagattgggggaagagggggaccgcaggcatgaggcagcctgggaaccataataggtggagtggaggcggctagtgagtgaaccgcctgcaacttgaataataagctttctccacaaagtggagagttattgagggctggggactcaagccaacctgggatgtctggctatgtaactgggagcaagttctcacctcccagagcttcagttccctaatgtgtaaaatagagctgaccaatgagcctcctgtgattctgggaaggagaggatgctgtggagttagtaggatgtattcatgcagtgcccagcacagtgactgcctcagagtcatttcttaccctcctgccaccccacccttaccgatcatcttagagtaagtgcagctgagcctggacggcagcaagaaagttcaggccgggcgcagtggctcacacctgtaatcccagcactttgggaggccgaggtgggcggatcacttaaggtcgggactttgagaccagcctggccaacatggtgaaaccccgtctctactaaaaatgtgaaaaaaaaaaaaaaaatggcacctgtagtcccagctactcaggaggctgaggcaggagaatcacttgaacccaggaggcagaggttgcagtgagccgagatcgcgccattgcactccagcctgggcaacagagcgagactccatttcaaaaaaaaaaaaaaaagttcagtgggaaccaaggaggaacgtcctgcctccagaaccagagcccacagtcaggggtagacatcccaggctggggatgggtctttctctgaataggaagggggacattctcacttaatcttctgtctgttctctctgccctgggtgcttggtgaattgtagaagatgccaggccttgctaatacccgctacccacctctcacctgattcatagataagaggtgccaaggtctctggtcttagagcctgggtctcatctacaccaccacctctgcccaaggccagaggaacccacaacttctttccttcagactcccaccttctcctttaaatctctttctgacttgcaagcaccccttccagctctgtggcttctgctgccgtccatgccccatcccccctcctccctcctttttctctatctctccttctcttctgttcgtggactctgatagcctgcattgacagaagactccccaggcttgagaggacttgtgtgggtgcatgtgtacatctgtgtccacacaggcacaccatggtgaccatgcaccagccccttcctgccgctgcatgtggcatgcccagaggcctcccattagtggccactccacccttcctcctctcccctcaggcctggtttggggaaagtggagccactgccactcttggtgggcagctgggggccccttagcagtctctccacaccccctccccttctcctcaggccccatgcccagccctgaggtttggagagcctagtaagtgccctatcaacatgttaatcaaattacttaggagctaaaattgacgctgttcattaattatacaagattatgctaattgtgcatgcaaatgcatgcaggggaacagaaggtgttcaggcgcatggtgggccattagcatagaggatggggtgcgggtgcattggcatgctaatgtatgcgccctggctatttatagtcctccagcccatctgcactgcagccacctctacccgggtggggatcatggtggggaggccaggtccaggcctggcaggtggctgtggccctggggacagtctatcttggcttctaccgcaggctaagaccaggaagcagcctgggccaaccccacatgggcctgaactattacagtaagctcctcatttcccttcccttctctagcgtaggccctttggtgcctgtttctgcctgaagggagacatcccctgtagccttcccatcacccagaggatccaagtcccgcatgatttggtcccaaccccaggccccaagccacgctgccctcctcagtcttgtcaggcaccactgatcgagtgagccgtctgccccgtggtggagctgttagtccctttgcatggagggccctgcctcctacttctcggtgagatcctccaagacccatcacccaagaccaaattggagctctaggaagcattccgcctcccctaggcaaaataagtggccactgcagattacacttggcacatcctcctgccgtgcccaccactctgtcttcctgagtttctctttcctgttgggttgtaatttccttaagattttatacaatgccgcagtgcctaacacatagaaggtatttaataaatctttttaagtgggtgtatggaatgaatgaggggatgaatggcccagccctctgtgtcctcctctgtccctgagctgagggtagagagaagcagacagtgaacacgctggagagccagaaactgcttcagtttcttcggaggctcatgggagcccaagacaaatcttttaggataaaaattagcggagatccctgtccccttatttccccatctcaggctgcagtgccagctttgggcttggaaacacatatccaatttaatctacccttcactcttaacctgctgtctttcccaaggccttcacaggacacactgttgtttggaacatcctgccccagctcgtatatccattcactgcataccttctttctagatctgcactgtccaatatggtagtctcgagccacatgtgactatttagatttatgttcattaaaatggctgggcgcagtggcccacgcctgtaattccagcactttgggaggccaaggcgggtggatcaccagaggtcaggagttcatgaccagcctgaccaatatggtgaaacgctgtctctactaaaaatacaaaaattagctgggcatggtggcagtcgcctttagtcccagctactcaggaggctgaggcgggagaatcgcttgaacccaggaggtggaggttgcagtgagccgagatcacgccactgcactccagcctgggcaacagagcgagactccgtttcaaaaaaaaaatagatttatgttaattaaaatgaaataaaattcagttcctcagttgcactagccacatttccagtgcttagtagccatgcgtggctaatgcatatcattctggaaaaagttcccttagggagcactgtaatctagacacgttcttccttgcccctgacagacctgtagtggaaaatgcactcgggctctccttccagctctttgagttactgacagctttctctttggaagtgagaacataatttcagccctaagtatctcatggggatgcagggaagaaaaagctggtgaaaagccttagctctgtgacctaagttttcttagggtgggattcctggaagcagagcctgagatggggattcttgtgaaagaggtttatcaaaggagagctctcaggagaaaaggaatgagtatagagggagtttaacaaggaggtggtctcggtcggagtctagcgtcagcctatcccatgcagaggtctggagtgtgaatggccagagagttggtcctccttgtaatgtcaatctgtcattggctgtgggctactggtggggagtatatgctcttggctgagggtaattctcagattaccttggggcagctgcgagccatttgacagtctacactgcagctggggcatgagggaatcaggcaggcatcaactcactgtaaagttcctggacgttgtcttccaaaagaagctccaggccaggcatggtggctcatgcctgtaatctcagcattttgggaggctgaatcagaaggatcgcctgagcccaggagtttgagaccagcctgggcaacgtactgagacctccgtctctacaaaaaataaacaaaattagctgagcatggtagtgtgacctgtagtcccacctgctcaggaggctgaggtgagaggatcacttaagcctgggaggtcaaggctgcagtgagccaagatcacaccactgcactccagtctgggtgacagagcgagaccctgactgaaaaaaaaaagcagctccatcccactctgccttctaccccctgaaaacctagaatttaacagtggactcacatcaattgccttcacacttgccttctctactgagtgtctcttttgagtaaagcactgtgcttggggagttaatgcaatggtgtcacccctgagaagtagtgtataagttaaatgtttgcactttagccatactcaacccagagtttgcttctttggtaggaaatactccatggacaagacgtttcttttcatttcatcttgagctgtttttatggggaggaataaaaagcgtttatagacatgattacgaaggctaaaccaagttcaggatgtggtaaggtgggtgtgtgggtgaactactctgagctttcctttaagtcacaggcatcagagtcatgatgcataactaccatcctttagatacttcattagttggatgaccactgttcacagctcttcttctggtctttcattaaagtttttattgagaatgtggaatacaggcagaatggaataatgaagcccatatagccccaatgagctagaacaatttttaactattggttccattgttttttaatactgaagatcttctcgactgatagcagcagtcacaacagccaaaagcccaaaactaggagcaagaggacctgagtttgacctctgcaaccctgttgaatttgtaacctcgaggaaatccccacaacatactatcctggtccccacacagcctgcctctcagagctgcttttgaaggcaggcttgccgctgcagtaccagcctgggtcggactctgagagccccacttagaaggacttctaggactcttgtcggcatcagtggttcataaagacccgttttcatatccttactttagcattgactgtgactttgtcaagtcacagtcaatagcttagccttggttttctcatccgtaaagtgggaatggttgcagaccgacacgacctgggggattgagcaagataatgccaaagtgacaaactcagcagcgttctgggcagttgctaaggtgctgagtgcctgatgggttagacctggttccctgtttttctttttttgttgtttgtttgtttgttttgtttttgcatagttacctccctaatgcatttcatttgtaagtcatgcttgtatttatggtgttttcttccagtaatcctaatggaagcttctgcgacttggcctttcccttactcccttttctgtggggtctggattaggaagccatgccctccaagagcctcatggccacagtgggatggcactgggcactggtcctgcagtggtcaccctccatggggatcctcaggtcagagagggctgtggacttgggctcactttactcctccccactccctgccccctgcccccatcctggtcaggaaaaacgggctttcctagactccttttcagccccatagggccaggagtggggaggggtgctcagagaacacccccaggctcatccaagctttagaggtggggggtggttccatgctgacaagcagggcttcaagcccctcaacaaagtgcacatcccttcctgcctcaagtccctacagggtgtcccaggcccagaaccttgtcctcacttacccagccccttcccaggctctcttctttcaaggggaacacctgcccgcagttcccatgtccacatgtgttccatgtgtgtgtctccctccaactcccctgcccaccaggtctctcactctcccccagtccccagcccccacatctggcctctgtgcagacatggcttggaggacctgctgcccctccttcttcttccctgactccattctcatccttccctgactgctcaggtggaataaagtgtcaccccctgggcgtcagccaagggagaattctcctgggttgttctcacgttcgcccttccagcctctgcggtgtgtctgtctccccctggtgggcaaggagaggaccaggcagcggcacccggagggtcggcagtctctctaggtccaggggagagcccgggcactgctcctggttctagaccccaacggaagtcctctaattccaggtccagccttggaaggcaggagcctttaggggcgggtcacctttgccaaagcacagtcttcaaaatgtcaaaagcgtgattctcatacaaattgctactgagcatgtatcaaagttttctataacttattgatgagggaaccaatgggatgacaaagctgattcaaagaagacgaagagaaagtgatacatgtgcgagtgtgtgagtgcgtgcgtatatggaaaggggttgaggggagggagggagaggcaagggattgtgtggaaaatactggaataagatggccaaattagatataaagctagttaatgtccataggacaattttatcatctttagggctaatttctccaccaaacagaaattatttacttctcctgacaaatatcatttgtttccaagtcatatgaatttgggggcggggagtataaattcacagggtacaagtgaaagtatacaatgtgtggtgatccaatccagatatttagggtgtccatcacacaggtacaatacattttggctaagtatagtcaccccactctgctatcaaacatcaagtttattccttctatcttgctatttgtaccctataacccacttctcttctccctgccccccaactcacccttcccagtctttattatctgtctttccatgctctacctccaggtcatcaaagtttttatttattttttttatttttttttttttgagacgaagtctcactcttgtcccccaggctggagtgcaatggcgtgatctcagctcactgcaacctccgcctcccgggttcaagtgattctcctgcctcagcctcccgagtagctgggattacaggcgcctgccaccacgcccggctaatttttatatcaggtcatcaaaatttttagctcccactgacaaatatcatttgtatcttatcagttttctacaaattagcacttaactttatagtctgtgctccaatcaatcaatagtaaatgcgagtcactttcccctagagacatacactccagtgaagcattgtccgatattaatataatgcaagcaagccacatatgtatgtaaatatgcttttttcttttcttttttctttttttcttttctttttttttttttttttgagacagggtctcactctgtcacccaggctggagtgtagtggctcaaccttggctcactgcaacctccacctcccccgttcaagcaattctcgtgcctcagccacctgagtagctgggactacaggcatgcaccacctcacccagctaatttctatatttttaatagagatggagtttcgcagcattgggcaggctagtctcaaactcctggcctcaagcgatccacccacctcagcctcccaaaatgctgggattacaggcacgagccactgagcaaggcctcaagtcacatatgtaatgttaaattttccagtagccacaagaaactgatacaactaattatcataatgcattttatttaacccaatatatctaaaagatgagcattcccacatgaaatcaacataaaagattactgatgaattattttatattctttttttctaagtcttggaaatctgatgtgtgttttacacttacagcacatctcaagttcggactagccacactgcaagggttcatgccgcgtggggctggtggctatagtaatgggtagcgcagctccagtgcggtagttctcaaacttcagggtgaaccagcatcacctggagggcgtatgaatgcagagatgtgattctgactcagcaggtctgaggggaggcctgagattctacacttgtagcaaggtctcaggtgacgctgacgctgctggtcttagggggtggtgcaggctctctgactgggagaagcctcgtggactaccagctggaagggagtgaggtttcagccacaccatggatggtttcgactatgtgctagctctgaggacaggcccaaagggaagggagaaggggactgaccctcagcccccactgcaggccatggtcttgtgcagctgcttttactcacccacactctgcaggtaatgctagccaggctcaaacactgaggtgtccccatagacagaggtgctggcaggtccctagggctctcagaaaggggtggtccttgaaacctagagtggccagaaaatggtggctgtacagggcgtgagaattggtgtggacccaaaggacaaatgaaacctgtactgtaaagggacagtggcaagacctgctgagcaaaggcttggggaagggccagtgagggagcaggaaaccacagccttggggagggcagaagtaaaggatgtcccagaggcaggactagaaggtgtcacggcagccgtcaatcgctactctcccttcatgggtgtggaaggatttacctaccccgggtcatgcagagagtccaggcctggccagagcccctatcttggccccttcccaaggacccttcctcttgatcctgtaggtttgagtggagtggggtgcagtgggcacatgtgtcatcttttggtgcagtcctatgcttgtcgcatcttcagtggtatccaaaggtgagccttcaatccctttaggacagagaccatgccccatcctggtgtttttccctccatctagcacctgccaaaggaccgagcacacgagtacttaatttaaatgagctggtctgcctgtgtgtgtgagtagggagtctatactctgtcacatgtgaatgtggggcatggatgaggaacatgtcgcacatgtgggtgtagtgtgtttacaccatggggtgtcataaggggtgtagggagtgattagtaactaataagagagaaatggagtgcgcccactgtgcaggtgtacctctcaggagcactgaaggtgtctgcaccttggggtgacccatagggatatatatggcatctacacattggtgactactgtttgggggcataacagctgtctgcactgcagggtatcctgcaggggtaaatggattgtctacactgtaggggtgcaccatttgggaaatatagggggtgcccactgtgggggaacatgacaagtgctgagaatgtagacagaggcaggaccccagggagaggtatctctaggaaggtgactgccaccagctcccaaggaggggctgcctgctggggacacctcagttccagggctggtgcttactcctcccagcacttggtgacctcctttttggggactgggctttcaggacctgtaacaaattttcctctgaacagaaatttaatgtttgcagactttggaggcaactctggtgaattaaatgaacattcaaatttggggtatataagtagtacatgagtaactataccgtggttaaagttccaccccaggtttgggactcttgtatttgctttagtaaatagtatggtaaaaatatctcccaattgggtggaggtaaaatgaggaagctgactgactggagaaactcatacagtggcccaggaggctgttccacatatcaggacctactgcagacgttagccctgcactctacagtttgtaaagggtatcttcccagatgctcacagagtgctataaggcataaggcagacactgatcatattccgagtttaccaagagttaaacagggctgggtgcagtggctcatgcctgtaatcccaacactttgggaggccgaggtgggtgaatcacctgaggtcaggaatcgagaccagcctggccaacatggcaaaacaccgtctctactaaaactacaaaaagtagccaggcgtggtggcaggcccctgtgatccccctgtaatcccctgtaactcgggaagccaagggctgaggcagggacaattgcttgaacccaggaggtggaggttgcagtgagacatggcgagcctgggcaacagagcaagactctgtctcaaaacaaaaaacaaaacaaacaaaaaaaaaaaaacaggaaaaaaaagagtacaacagccagaatgttgtccatggctaccttactggtaggtgacaggaccaaggacccaccctcccagccaactgccaggaaggagaggaggacaaagtgctcatgtgtttgtctaaaaagcaacctcatcagcgcatatgtgtttttttcccaataactctatgtaaaaaagaagacattcacggtgtctctgtaccacatgtctgacagatacaccatgtgtatatggtgggtatgtgctctgtatgattaagcttttcctatgtgtataatggatataaaatgtgtgggaggaggatatgccatgtgggaggtgaatttgctgggggcatctgctatatgggatggctttacagtatttgcaataactatattttgggtaatcatttacaacataaaatgcgtattaatgtatttgttctgtgtatttcctatttctctgtgcatatactgtgtagggtgggcatacaccgtgcatgatgggtacaggctctgtgtctgcttagtatgccatatgtgtgggatgagtgcaggctatatgtggagtacatgttgtttatgcttgtgtgaaggttataccccgagtgtgtgtgatggctgtattttgtgagtaatagtatccaaggcataaacagtgtctacaaagaatgtgctgtgtctgaggagtgtacatggtgtgggtgatgggtatactctggggagggatgtgttgtataacagatgtgctatatgggtgatgagcatatactgtgacgtatacacagtgtgtgataacattacatggggtatgtgtgcgtacacgccacatacggagcatatattgtatgtgtgatgggtatacagtgcgttgggtataatgagtaataagtataggtagtgtatataatggacttactcttcatggtgaatatatactgtgtgggagtgctaagtatacactttgtggcataaataagccctgtgtgatcagcacacggtgtgtatggttgtatagcgaagttgtcattgtgatgggtctgtctggtgtgtatcaggcaccctggtatatggaggccatgatgggaatatgggatgtgtgcctgagtgggagcaggcagaggggactcatcctgtggggagggggcatggcagggagcagttggatcttcatctgtttccagaacccccagacccttgagcccaccgaccacactgtttcaggttcttcctcaagttcttcctcaaatgcaaccagaactgcctgaagaatgcggggaatcccagagacatgcgccgcttccaggtgggtctggagagagggtttccccttgcaaccccaccctttcctgatggaggggaggggagggggaagggaaggctgtgaccctgccaccctgggaaaggcctccaaggcagatctctgcccagccctgtgcctccccagcctggttggtgcctgctgggggtggggcagctccttctcaacttgtgctggctgccaagggaggcttcattagagtcccacttaagaagatgctaattgtgacatttttacatgattaacgacccaggcaatttgcatagcgtgaagcggagagcagctgcccttagcacatccccaagctgcacacccctctcagtgcagggcgggggaagaaggcagccccagttttctccccagaatagggcaggggctcctgctgctgagttctccggctgatgctgcccacctccacttgcctaagaccccattcctggcttggaggtccgtggatacaacccagcattctgtgtatgcaaaaacagtagccattctttgcctaaggagccagttttttcaggggtctttatttttgtagcgcctggggagtcagttcatctgggggtatcacctgatccagctggcccccttccaccagctcagacactgcaggattgaagccctcctcctcccaccagtgaccctaaattccagcatccaaccaccagcctcaaggtgctggttccccaccacattcccctcccgggagcccccgagggccccagccaggctggcctcggctctccccgcaggtggtggtgtccacgacggtgagcgtggacggacacgtgctggccgtgtccgacaacatgtttgtgcacaacaactccaagcatggccgcagggcgcgccgcctggacccctccgaaggtcaggacccccggcccagccccggccgccgcgggcccagccagccccccaggccccacctcagcgcggtcccctgacctgggtcctctcctgcctcccagctgccaccccctgcatcaaggccatcagccccggggagggctggaccacgggcggcgccaccgtcattgtcatcggcgacaacttcttcgacgggttgcaggtcgtgttcggaaacgtgctcgtgtggagcgaggtgggccaaccccgccagtctccctctgggcctaggggctgggccctcccctcgccggtgcgggacctgcaggcctcccctctcccctcgcagctcatcacgccccacgccatccgggtgcagacgcccccgcggcacatccccggggtggtggaggtgaccctctcctacaagtccaagcagttttgcaagggatgccccggccgctttgtctacacaggtaaggagtcgggcgggggagtggaggtctaaggtgcgcggagggagccccaccctgcgcactggtctccgttcttggtgataggagttagccgagctctacgctgtggccacgacccctagacggccccgggcccctttaaccacctatgcctgtgatcgctccgctcgcaggaccgtctttccctggctctgtgtgtttccctccctggcctctggctccttagtcccttccccggggcaaagtcccccccacaaccaacattcttactccctcagccatctcacctcctgaacattgtgtctcccgcccgcactctccagggtttagagcctctccaaagggatgtttattccaaagatgccaatggggtcgctgctccccgaatcttctctgggtctcttggttcccccacgctaccccaggcctcactctgcatgtacacgcacacacacgtgcgtacatacacaccccttgcacgacgccagggcgagcagtgaacacacgtggagaggcagtgtagaaccccccagcctggctctatttggccgctggccgagtcttctccatttccatcctcccgccccgccccagctgagccacccacttctcctctccaccccaccgcagtccccaccatcgcgcagccccccgcaccgatgctcatcgagcccttcgagggacactcggtagtgaccctacttagcctccccggagctccagtctaacgcggaaaggctgagcagagaaccgcatggggtgggtggggtcacgcggtcaaggggctgacaatcaaggaaaacctttggtagggagtgcctgctgagcccggctcaaccgaaacccgagggctgagtggggaggttgacctggggaaggaagggtggttgcagaaggaatgataaggaccgatccccagaagtgagtgctttctctttgccgggaaactaaaggaaatccactaagtcaggatcagaggtgaaggtagggctctgagactggtggattaggtcggggccaggctatctgaaaagggcggtgcggggatcaggaaaaggggaaggaggaggagaagggcgtggggagctgggtcagacgcgcatacacacacacaccccttgcacaacgccagggtaagcagtgaacacaacacacgtggagatgcaatgtagaatctggccgctggccggatcttctctacttccatcctcccgccccagcccaagccacccacttctccagttgcttccctggggtgcatgcaaacctctagccttcagatgctgcagagagtccacttgagccgtgataaatggagattgttaagttttttcttttttataataaactcctgatttgaccagatgaaaagagaaaactctccatcgagtcctgcccttaggactataactcatatgtgtatacggtttcccttttttctaatcacaaatgggtgcatgtgtgttcataccaagcgcctagggccgaggacagaggctggctcagtaaatatttgttgagtaaacaaacgaaagaactgaaacttccctgaatctcgctgccgggggtgcctggagttttccgggggacttgggctgggcctggtggagggggctgcagcgaggctctcggactgggcgctggcctgcttttggcgccctgcgtctcaccctgggagtggggggctgcgggggagacgtcctccaaacgccgcccccttccccagctctgaacgagcccaccattgactacggattccagaggctacagaaagtcattcccagacaccccggagaccccgagaggctgcccaaggtactcagaggggcggggcggggcggggctgagggtgtcctgtgggcaagggggtgaggaggggctcccgagggccccttggtcgcccccaggggctgcccctccgtcccgctgtctctccccctgtccccaggaagtgctgctgaagcgggcggccgacttggcagaagccctgtacggagtgcccggcagtaaccaggtatggcgcctccgccctcccagcgccgccgggaccggggccccccagcacgcggcgcccgcggctgccccggccgtgccccgctcttgtcttcgcaggagctgctcctgaagcgcgcggcggacgtggccgaggctctgtacagcaccccccgcgcacccgggccgctcgcacccctggccccgagccacccacaccccgccgtcgtgggcatcaacgccttcagcagcccgctggccatcgccgtcggggacgccaccccggggcccgagccgggtgcgtgggccgcgcctccccgccgtcctcgggcgccgccaccgcccctccccggccggcaccgccccctgacggccgcgctctctctcgcaggctacgcgcgcagctgcagcagcgcgtccccccgcgggttcgcgcccagccccggctcgcagcagagcggctacggcggcggcctcggagctggcctgggcggctacggcgcgccgggcgtggccggcctcggcgtgcctgggtcccccagcttcctcaatggctccaccgccacctcgcccttcgccagtgagtgtcccccgcccgcgagggaaggtctggggccggggagcggaacgggactcagccccgcccccgcccatcccggagaggttggggcgccggcgccgtgagagtcgaccctggctcagccctcggggtcaggcccaccgtccccgcctgggacctcccctgccgcagaacctcaaccccacccctaggctgcacatcccggggtcctggggccagagtactccgtgcacttttagccttctttgccggtccgttatgcacatcgcttctaggcctccggtccccctgaagtgggctctaatgggtggcgggcgtccatctgaaacctgggacaccgcccccttcccatctcgcgcccggacttggggaggaggctggcgccgcctgccggaagcctaaggaaactcagggctcgagggaagccggcttccagccgccccccagctcccaggactccagaggccaggtgggcgtggggaggatgtggtccccgcgatgtcgtccggcagagcgagcgagttctgtgtgatcagacagaatttgagtttcagtgtccaaatcaggagctgccgggcattcagcaagttacttatttgaacttgtttcctcgcagtcaaatagggtcaattccaccccctgcttaaggttgatctcggatctgaatgtgccactgtgcctaaagggccagtgtgtgatttcggagtcccagccctgactgtgggcgctgaccacatcccatctggcttcttagagtggggagctcagagctgggtggacaggcaatgtctgcatgtcatgagtgagtgaccttccgaacggctttgatgccttgtcattttacactgccctcaagactcttccatcatcaagttccagatcagcatgttcacagctctttttagcttagctattcagcaggcatttataaagcgcccactgtatgcaaagcccagggcttgggggatccccccactcctgtcacctgcaagaagcctccctatcaatcataagagagattgtccctgaagtcccaggcgactctgccgagctggagaggtggtgaaggctgtcccagaaggaactggtcatggctttgcccgtggtgccctctcctctccctgtcccatatttgccattgccgagactgcactgtctgtccaccagcctggctttccttgcagggcgtgtgtcctgcctgctttctggctgaaggcttgagcctggccctgtcctctggcctgggctcaacttctgggacccaaggccccataagccagagtccacataggccatggccttctggtgtccctcccaaggcccctgcctctcctggctctttgctcaggccaggattgactgctcctccttcccttcagttctggggcagtaccctcacagcctctctgtgggcacccccttgggccaacactggtgggggtatggaacatcacatacactgtggtcaacagtagaggaacactctgccccagtgtgcagaacccagcccagctggggtcttctgattcagcaagaagatcaagaattctagagctgcttaaacccagcatcagctggagacacactggacttgagggagggttggtcccatttcatgatattgtcttgaccgaggcttacccaggtacccttccactccccacgttcagggtgctttgtggcccgactccaaggggtgtcattctcattgagtttgcgagaacattcctggagtgacatcagaactgccccagccagaggctcaggggctgtttgcttgggtctctctttgtttttctgcttcagccaccagcaaccctggaatgaatcacaactccccacactacctacccaaggtacaaaatgtggccgtgagccctgggcattgagagctatagtacattttctggcattggtctcaagcccttcatcgggctctggggcctctccagctggcagtaactgttgtcttaaaggagatgaggctgagggcatttggaagaggggcagctgttgaaggcattcttgtatcaagggaggtaggagggccctctgatgccaaaggcagccttctcaggctattgctttcttccaggaagccccacccaccccactgcctgctgcctggacaatactcagatcacagccttaccagtctttacaggagagaggcagggaattgggttcagatgaggatgtagaaaggtgggatccagcgatgccccaggcctgagcccccaggagaggaggctgcaggaagagggggcaggcaaagtctgtgtgcaggaggctcccttgccattcccaggagggcaagccgcagcctgggtggctagggagtttgagagcaggaagatctgaggatgtacatccctgcaatttgctttaaaattgaccagctggaagtgggagattcaggagaccacccccccccacagggcccaggctggagatgacaaggacctgcattaagctgtaaggaaacaaagtaccccagggtgcagggggaagtgggagagggacagaggagcatagggaacattggcaaggagagcatatttgaggaggaagttggagtgctgtttgtgatgctgggcagagaggcttataacaggagcctgtgcgttcccccaaacttcatccctaactacttgttccagctcttctgtgactcctgaactatgactctagccttggcaccccaagcaaggctcataaatgtttcctagcatctcagaatcccaggggttttcagcagaaatcctgaagtagtccagctgttgctcatctcatttttggggggtacctcccactgtttgttttttttgaatgttctggttttgcttttgtctttacctggtctggccctgtcatccccagccccgagaaaaggtctccagaaccgctgagaggtcagggctggcccaggaccctcacagctcccagtgagatctgagcctggtacctgtgtcagcagcccatgtggggccccagccaagctgctcactctggtgctgtctccctgttgtgtctcccaccaccttccctgctgcgcctgcccctccccgccccgccccggagtcatgccctctagccccccgctggcggctgcctcctccatgtccctcccggccgctgcccccaccaccagcgtgttctccttctcgcctgtcaacatgatctccgccgtcaaacagaggagcgccttcgcccccgtgctgcgccccccaagctccccaccccaggcctgccccagagcccacggagaggggcttccaggtgagtgatccaccctgcctcactgtggcaggaaggaagggcccttgtggagcagctgggctacaggggcctgctctgtccacatctcaccagtgcctcatgctggctaacctgctcttcttggaggacggagagcagggagctctgctggggtccagggaggtccctctggccccctctgccctggcctcccagcctgggatggtcaccattctggatgctctcagttgaccacttggccaaggggaagagactcaaatcacagttgatgaggtctagaaactaccccaacactccatccccatccagctgagcccagagcaaagaccctcagagctggtgggctgcacgcctgtacctgtgcctccctgtgtccaccagagggtagcacacaccactgtgagggactgggtcgctgaccatggaaggggactgaccttagaagaggcttagcccagcttccctccccgcattttacagattaggacttgagaccaagtcatcttcccacatcccattcatgaaatggctgttctctcactttacccatgtgcagcagaacctttgaaccagcagagcctttcctatccacgtggtgattggaaactcactgggaggacagaggaagggactggctgtggaaaaggaggaggcaacaggatgtgggtggggcagaacaggtccttgttgatggggatggtgggggccagggccagtgtcttccctaagaggcttacaggtgttttcttttctggctaagggatgcttccacgggatcccctaggactcaatctggcatgcagcaggtgtttaataaatagtcaaattattgaatgaatatatgagtcagaagggcaccgttcacacccacacagaaggctgcagtgcagtttgtggggcactgatctggaagaggttgggttagagcacgtcctattgagtattccccaagacaataatgggtcagagcaacagagcattaggaaagaatcagtgttgaaattacgtaagtggctactgaagaatttgtcagagcctttcatgtgccagggtacgttgtgaaccttctaggaaacaggagatgcaaatttatttgagcacaaaaatgtatttttctaacagcatcttgagattagttcctggggaatgaccttgagatgcaggaagagacaccctcatggtttcctcagcctgatgtaggggctgatcaggctgggatgcctatcacaagagcaaggccagtggcttgggccccagaaccatctccaaatccaaggcaggggcaggtggggcagcctccaggctgagacaggggagggggctgtggaaaatgctctatggagcctctgtgctccagggtccctgtatgagagtccggggacgctggaaagaggatgggaaagctcagggcctgggagaacaactgaggatgatacatgtccgcagcgtcccacagaatcggctaccctgagggcagtcagagcaactaggtgcagcccagaagcttctgagaactgtgctgatgccctgccctgcacacagaatggggtcccttcccaccagggaaccccctctgcacagttcaggcaggcctgtgatggtgactcaaacaataacagacttttgtgccagggagggcgggagggcaagggggctgcttggtgacccatccagagggtagcccatattcagggaaggacttgcccaagcaaggtttgaagaaggcaggggttcttagtgggggaggaatgccctagatagagtagaccttaggctgaaggtatgtgggtgggaaggcagagatttggagcccacgttcaaaacattaagaacataacatggccagatgcagtggctcacacgtgtaatcctagcactttggcaggccgaggtgggcagatcgcttgagatcaggagttcaagaccagtctgggcaagatggcaaaacctcgtctctaaaaaaaatagaaaaatgagctgggtgtggtggcgcatgcctgtagtcccagctactcgggaggctgaggtgggaggatcacttgagactgggaggtcaaggctgcagtaagctgagattgcaccattgcactccagtctgtctagcctggacaagagagcaagactctgtctcagtaaataagtaaataaataaataacatacaaatatatgccaaagatttatttaactcatcagtgagggagctaacaggatgacagagcggcttaaaggagacagtgagagactgaagccagtaaaacaaggagggctggaataagattgctggctgcaaactgcttctacagagcaataaacttgtaaccttcctctggggactgtcttttctaccaatgagaagtcatcagccatttctcagcctcctccaagtgaacatccatccaaccgagcaaagcctgggccctagccagtagcgtgaagtcaaaagacgtcacatgccccagaataagatgactcttaagatgggcttatttgataatgctctacggtggctttgaaaggatacacagtcactttttttgccttatttccaagttttggataatttttcttaggtgtgtctggagcttagaatgtgaaggatggagagaacagagggtcaccaatttctcctgccagcaaagagaaccatgggagggggtcaggtaggggtggggagtggtggagtgacaaacttcgtaggtgtgggaggcacagaggatgctgttgtgggtatgtcagtcagtattcctggaggctggcctctttccttttctgccctggtacatggccatgcgcttgaggaagcagatgggccctctgaaggaggccaccctgggagaaggagcctggggtcgtctctctcttgagggaggtagggagcaagggcgtgggctgcatcccctgagcatctgagaggcacccctcaccccgatctgcagtgctgccatgggccagggctagggatggctgactgccttcagaaagtgctatatcccctgcctgctgtctccagcccagagagtgacaggcaggtggcttcccaggtggcacatggcttatggctcctttttccttgactactgcagaccagtcttttgaggattctgacaagtttcactctccagcccgggggcttcagggcctggcatactcctaattacggtaggtctctggctgggtctggcctcccccgccccacctggccctgagatgtgcttgctctctaaaggccttcatcctgtgctcaagcctccccgctagcagccccacagggatggggagctggggtccaagtcttcctccccggggcccatctagacagctttctgaggtacttggcccaccccagtaacccaagctgaccaggtagagagaagtggcttcctgtcccctggcagccagccttcctccccgaccttcttctctccctctctcgccccaccaggtctgcagctgttcccatggagcccggactggaggtccctctgggattcacagccacaccccggatggtggcacagacagatgcagggccagggccatgggcggacctcaacccgtgagctgaacggggagaggccttcaccccatgctcaagcctccccgctagcagccccacaggcttctctcgcctccctgtcttggggtagtcagaagccccagcactgtgcagatgctcttggcaggacagcatcgcagggaggtgctgggattctgggcctcactgtctgggtcttggttcctctgaaagagatggatcttgtgcagaccagggttgttgagtgaggggagcgtgggatggggaccgtgggaaagaggacagctcagggagaagtgacctggaaaggtcctgtttgcatctgacccatctcaactggcccagcatcccaacttctctgcagcgaaagggtggcgccccgcagcctcgggaggcctgcccaggctcccgtggagcttccaacagctgcttggccccgcagctgcccccacttcctttgagacctgcactctcatgcttgccgcatcatgcctccctgtgggggctttgggcatggaggaggcagaagagggggtgccaggcctcctgtatttggggtcttcccccagtggatgtctcatggactctggccccacacactcacaatgactctggctggccccacgcagcgggcccagccgccccccaggtggcctcacattctgctctgctaagtttggagaaaacagaacaataaaccagatgcaggtggtgcccgcccggcctctcacctgcctccttggtgtgagtttgcttttcttagcagttcagcagctctaggggaggctccaaaccctgcccccggggagccctcttgcgcctcgggctttttaagcagccccagagttcgactaaagcaagtattccctgccccacgtctgttcttggggactgttgggggagggggagcaggctagcaggcctgagctctgcctgggagcataatagggccactgaggactcagctgcccagctctccagtcaagatcaaagtggtggttgtcaggacattgctgagaaccaggacagaccaaaccaaatatgacccagatgtccagaggctcagaaattagatccaatccaacacagaggctgcagggccacgcctgggctgggtggggcagcttgtggctcccagggctgtttatctgagctgcaccccaatcccatcccacggcccccacccccaggcctaggcaccttacggctcacctgcctcagagtttgggtggaaggagggtaaggaggcaagattcctatgcccattcgctccaccacccacccctctaggatgagtcccagttgtccccctgagatatgtcccctggatgatggtctggctgtctgaccctgaaagccacttttttgacccatgatccggtgagccccgtgtctagccccaggcctcaggctttcctctttctcttcctggccctgctcctgggctctggcctctggacaccctggccctttcaacccatgcgtccatgacctgcaaatgcagccttctggacaggcacacttgccagggcacatgggctggtcctgtctttcagaggcctctacttctttctctggtgttcttggctagcacctgggattcatctctcctggacacagggcaagaggtcatgctgccttctggtcatcctgtcccattctcagtgcttgcgtggcctcccactcagagcaccaaagcctgcctgcccacgccctgctttatttggctctgagcagctcccattgcccagggccctcccagctgaggccctgcaaagttctaatctgcactggacacaggtgataactggatagtggtcacactctggttcccaggatgggtcaggtgccatggtggatataaatgagacatgatgtctgtccctaacaatcccacaatgctgctcaagccaccatttgagtccacactgtccttttccttcatccacagcagacatagctaaccagttaccatgtttgcaatggcctggattgtgcctccctaaaatccatatgttgaagcattaacctcccatgtgactgtattgaggatggagcctttaaggaggtgattaaggttggacgaggtcatcagagtagagtcttgatccaatagaagttgtgctcttataagaagaggaagagacaccagagtgcactctctctgtcaggtaaggacacagagaaggcagccgtctgcaaaccaggaagagagccctcaccaggaatcaaatcaactggcaccttggcctgtgacttgcggcctctaggactgtaagaaagcaaaattctgtggtttaagccacccagtccatggtattttgttatggtagcccaagcaaactaatacaacatttttttttccatctgtgagctgagggctgcctccaggaaattaaccctttagtgtttctggcctgcccctccccactacatggaggaaaaatcaccagttaggctttgttgtagaatattgtcagcaaattctgggacagtaatccgagatgatgtggacagggcaccaagagcctctgctatgccacaaaaccaccgtgatgacagaatcattttcaacgaagctactgatcagagttgttatttgagatgaaaactattagccaagtcaatatcacaccaggccttcttgtagtctataatcagtgaggagcaagtcaaactgctgaccatgagtcagtacaagaccggcccaccagcaaaccggggcctgtgtctgggtctgtggcaccttctgcaaagcaactggggcatcttctgggccttgcaaatggaacacctttcagacttcccacatcctgtagtcaaagaggttccattctcaatagcacctgaggatgacattaagccaagtggcagaaacttggcctggagcttacataaatctgtagtggagacccactacccaataaatgctatcaaatgactaggtcttagtttagctcagtcctgaggccttgcacacaagtagaattgattggctcattggcattcatccctacagagcctggatatcccaggcaagtgatgaaaatcctaaccttagctccaattcctatgtgaatattggtcagggtgggatcattcgcctggaatggaagttgtcttcatttcagttcccccagcagcagaccttgggacaggaggtgggtccagatggtttatttgggcaacaattgcagaacgcaccggtcaggggagcagggaggggaggcagcagaaagaaggaagcccaatacagagtgctactgagcacgctactactgtgggtttttctgaagcttaatcccagctgggagctctgggaggctataaaatgcatacctcaggaatttcgcacctgaggagtgaggcagctggggtacttatacactaattctcatcagtcagtggttagggcttctggatggagtgggagggcagcactagctttctggcacctccagtcttccccacaggtggtaaaacagtcccagtagctagagaaaacactcagacaaagagaagcaggagctgacagttggaatcagacaggagtacacagaggaggtacagatgaggggatgtgggtggggcacatacctggaggtggtccctggcagtcatccaggggaagatggttttttctacttaaagtaagtttggagtaggcatggatttttcctatatctgcagatcccacctctacctggcaccaggtgacaaaaactgcccaggctatttcttgttgaagtaccaagatgccaggtgacaaaggggtccctctcagcgtcagcccacccccaggcttctaatgggggtgggaatagaaagggcaccagacgcttggctgctcaccgttcagagagagtgcatctccagtaagtcctctgctttcctcttacaaatttttcccagcagaaccaggctgctacactttgcatctgaccctggggaccagagagcttctggggctacattttggctcagacaggacccgctatagacaggtctcactggctcaagagaagccaggcagcagctttgaccagccctctgctgactattctgcaaaatagcattctccctgccccctccccatattggcagagccttttaacttcttccaaaaagaaaaatcccctagagaaatggaaactgctgcgcagtgtggaaaggatggtcttttaaaaatatgacgttagagcccaggcagctatttgggaggctgaggcaggaggattgcttgagcccaggggtttgaggccagcctgggcaacaagtgagacccccatctctcaaaaaagaaaatggtgttgggttaattggatagccatatgcaaaaattacatttggcctctacctcacaccatacacaaaaatcaatttcaggtggattgtggatggaactgtgaaacctaaagcaataaatctttacgcccctgaagatagactagaagctttttgccagagtgatatccaaggtctgtttttctacccatgtgaccaactttggaatgaagcaagcactggacatatttgaaatggttcaaatggaccctaaagtctcttttcacttctctaggagaacttttccaaataggaaaaagttcacagttcacagtgtctttctacccgaggagagactaggtcttcatggttagtgatttcccaaagctcttaactgcttatcctgggccagccgccttccccaccctgtccacagctccctcctctgctaccacctcagtggtagtaacaacactcactgggtgatggaagggaatgggtcacctccttggagccaccagcctagaagttggccgttcacaagaagaccttcactgtgagagtcctgatgggggcgaggcatcgaccacaaatatggacctagcatcctcttatcacttctcccatgctccccttctcttcactcttactaagaggtgtgtgtgtgtgtgtgtgtgtgtgtgtgtcagggtttcactctgtcacccaggctggagtgcaatggcacaatcatagctcactcctgggttcaagcaaccctcctgcctcagccacttgagtagttgggactacaggtaccacacccagctaattttttagggggtaagagatggaggtctcactatattgcccagactggtctcaaactcctgggttcaagtgatcctcctgcctcagactcccacagtgctggtattacaggcgtaagccaccacgcctgccttcattatgagattttctttttcttttcttttctttttttttttttttttttttgagacagggtcttgctctgtcacctaggctggagcgcagtggcacaatcacagctcactgcagcctcagcctcctggctcaagtgatcctcccgcttcagcccccagagtagctgggaccacagtcacgtaccaccacgctaggctaatttttgggtgtgtgttttgtagagacaagtttctccatgttgcccaggttggtctcaaactcctgggctcaaataatccacctgcctcagcctcccaaagtgctgggattatagttgtgagccacacacccggccattagatttttgataaccagaatgtcttaattgaatgtagtctaagttattaatcttttctttatgattagcgtttctcgtatgcttttaatttatgtattattttgcttcacgcttcacctccccttttgtgtgcttttaaacaaatcttctgccaggtgcggtggctcacacctgtaatcctagcactctgggaggccaaggtgggcggatcacctgaggtcaggagttcaagaccagcctggccaacataatgaaaccccgtctaccccgtctctgctaaaaatacaaaaattagtcgggcatggtggcgcatgcccgtagtcccagctactcaggaggctgaggcaagagaatcacttgaacccaggaggcagaggttgcagtaagctgagatcacgccatagcctgggcaacagaatgagaccccatctcaaaaaaattaattgattaattaaatgaaattaaaataaaataaattttaaaatcttcacttacaccaaagtcaagaagatattttagaatttttcttgtttgtggcttttatatttaggtccacaatccaactaaaatttatttttgtgtacagtgtaagctagagatcaaatttaattttttttcatatggttagccaattggcccagcaccatttactgaaatgagtatattttcccccacttcattgaagtgaaatctttgttataaatcaaatgttcatatatgtatgtgtctgtcctggattctctattctgatccatttgtctttttatctagccttatacccgtgccacattatcttaataactttagatttatagtatgttttgctatgtagtatgtatggcaagtcatccaatttaattcttcctttcaaatttttttatttttatttttatttttttatagaaatagggcctcactatgttacccaggctggtcttgaacttctggcctgaagtgatcctcctgccttagcctcccaaagtgctcgtattacaggcttgaaccactacacccggcctgttcaacttagttcttcacaattatgttggctacatgtggtccttttcatttcaatacaaattttatactcagtttattaatttctattttttaaactggcaggcagattgcctgagctcaggagttcaagaccagcctgggcaacacagtgaaaccccatctctactaaaatgcaaaaaattagccaggcatggtggcatgcgcctgtagtcccagctactcaggaggctgaggcaggagaatttcttgaaccctagaggcagaggttgcagtgagccaagatcacaccactgcactatagcctgggcaacagagcaagactccatctcccaaaaaaaaacacaaaaaaacctgctggattttcattgggattacattaaatttacagactaattaatggagaattgatgtctttaaaatattgtgtgtttcaatctatgaatattgtatatccctccatttatttagatcttttaagacttctcttaataatgttttatagacttctgtatgaaagttttgcacctatttcatttatttctatttgattattttgtgatattataaatagtatcattttcttaattttatttgttgtgaatatatagaaacaatggatttttgtataattaccttgtatccagcaatcttgcttagccacttatccttagattatcttgaattttcttagctacatagttatgtcatctgcaaaaaaaggacagtttcatttcttcacttgcagtccttacttttttatttttacttatttttcttgcttaaatgcactggctgcaacctccaatacaatgttgaatagaagtagtgagagtggacatctttgttttgctcctgattctggagggcaaacttttaatattccatcattaagcatcgtatttggtttatagatatccttctattcctaattttctaaaaatgtttaaaaattataaatagatgccaaaatttgtgaaatatttttcttcatgtattaagtaatcaaattactttctccattatttcgttaatgtgctgaattatattaattacatgtctaattttaagccactgctttagctaattgtatgtttaattgtaaatggccatatattcttttttttttttttttgagtgcaatggcacgatctcagctcactgcaacctcccctccctggttcaagtgattctctcgcctcagcctcctaagtagctgggattacaggctcacaccaccatgcctggctaatttttgtatttttagtacagatgagctttcaccatgttggccaggctggtctggaacccctgacctcaagtgatctgctctccttggcctccgaaagtgctgggattacaggcatgagccaccatgcctggccttattctttatacagggtataccaattattaacacagagcccattttctctttctctctctgcactactctctaagaaggcactcactggccctcgcccttacccgcttctcctggaggagctaggctttctgcagaccacctcggtacctcacactgctacactggctttggctaccttctaggagcagtggagggaaaaacacaagaacaaacacaaattaatctctcactaagtcattctactttgactctaacccatcttttaccattctattctaaccattaagattcaaacccagctgggctccttagctctgggtcccctctgttggaaatccagaacagtcctcgtgagtcctctgttcaggagcccctgaccactcacttccaaaggtgaagatactcaaagcttccctccttgcctcaccttggcagggggtcacagagtggcagcctcaggagggtgggaggtcctgggtttgaagctgcagagactgccaagcagaatgggtaggagggtctcagagacccccactggagacagaacggaagagaattcatggctctaaagatgcaggagaggctgcctagcagggcaggaacagcaacaagacggttttatttgtatacattcctttttgagtattttattccttgagagagaaggcgccaagtgtttatgggggaaggaaagctggccgtccagtagcagatttgctgttccctggggctcagcatcccagcatcttcattctccaaagcctctcctgcccctcccctgccagcctgggagcgagcgctgccctgatgcaccctcatctggtggggtgtgaggaggaggctcgggctaggctgccgcagctccgggcagtcatcccatgagtccagttcctgaagggctgattcgtgtagggcagaaaaaccctctggcttggctcctgcccctgctgcctctctgggggttccacccatgtaggagcctgccccctccacgcacccacccgctcacccagaactgagttcacctttaggtgggtgggggaggctccagccactctcaggctggcactgcctcaagcccagccagcgctggcttctgtggtgaaagctggtttgtctgggctgctccccagggccttcctggagctgggcctggaggctgaccttgccaagacaaactgtggctgccggtggaatgtggtcgagtggctgagcaggcccaaacctggcaggtctgtccatggtgcccctgcaggttccacaacacagagccctacagagtcaggtggggccaggagcaggtaccgagagacttctgggcatctctctgtcccttgttgagtgaggacggggcagcatctcttttggtctcaactgaaagtgtaaaaggctatcatcaagtgtgaaggttgacagaattcctcaacccacttcctctgggaagcagctgtgcaggagaagacatggtggggagggggtgcggggaggagtgtgtgcctgtgtgggtgtgggcataaagcaggagctgccaggggaggagaaagagctctggcaagacctcttcttcccttaacacagcccggtgggatggggctacgttgctgttagagccagagtttaatttttttttttttgagacagggtcttgttctgttgcccaggttggagtacagtggcactgtctcagctcactgccgcctcgacctcctgagctcaagcaatcctacctcagcctcctgagtagctgggactacaggcatgtgccaccatacccgactaatttttctattttttgtagagacaggggtctcactatgttgcccaggatagtcttgaactcctgccctcaagcaatcctcctacctctgcctcccaaagtgctgagattacagatgtgagccactgtgtccagccagatccacaatttgttcagcccataccatcagcccattattttagcgggggttccctggacgcagagcctgaaatggggatttgtgtgcacatgaaagggctctctggacaaaaaggagagaagaaagcagaacagggtaggggaaagagctgggcaagtctctgcaggaggctagcacagtcccacgcggagcctaagcatgaagggcacctcagttggaccctgccatgacaaggagatgcctctaatatccctgagcctgtcagccactggttggaggctgccagaggagagtggagagtgaaacctcctgggcaaagcagctcccatttggccaaggacaatacttgggagaagggggcagctgtgagctgtcagcagccaacactcaccccagttggggatgagcacactggctggtaaggatctggtggaactctaagagcctccactgcacccctctacctagtaaatccgagaccaggagcgacgcccgtctttataccagccctacttcttgggtggcaaggactccccttctgtttcaagtagggcttatagggaatgtcctgggccattgacaaacaaagggcaggaatccactcagggagatcaggtgatgctcaacagagctgtgcagcagaggtggacacacacagcaagcacgcagttgactcaatcatagtcactgcttgggagggccataggtgctgtccacatcagctctgctggctcgggacacccatcattgccttggatgtctctaaaagctgactcgctcttctgcctgtcctcccacctaccccctacccaggctgaaccccatttcccttctcttctacctcccagatcagtgacgctgagccagtccctaaggtagggtgagggctggcagtcttgctgttgctctagtctctttccaagatatcgccttggcatctgctcctgcttccctgtggccttccattttcatactcaagagtctgtttccaggccaggtgcggtggctcatgcctataatcccatcactttgggaggccgaggcgggctgatcacttgaggtcaggagttggaaaccagcctggccaacatggtgaaaccccatctctactaaaaataaaaaactattagccgggcggggtggggcgtgcctgtaatcccacctacttgggaggctgaggcaggagaactgcttgaacccggtaggcggaggttgcagtgagtcgagatcacgccactgcactccagcctcggtgacagagcaagactctgtctccaaaacaaaacaaaacaaaacaaaacacaaacaaaaacaaaaaaaaggagtctgtttcccaaacaaaacaaaaactctgagtctgctctgtttctccctctgcaatgcccggcagcaacactaatttcccttaggcaatagggacactactgactaagtaggggaagctcacagaaattagaacaaagtggcgaagggaagtccaagggactcaatccagtgcccagagaggaaggacagcagtgtcctctgggagggtgagccccagaaagaggcaccccactggaaatatgacaggaggtggaggaagctgaagagaaaagaaaacgtgtgaaaagcacctcatgctccaaagacaaacaaaacaagaaaagtagagacttcccagaagatggaatgatgtaggtttgccatttcttctgctaagtctaatttaaaaccctggatggctcacgcctgtaatcccaacactttgggaggcccaagtaggaggatcacttgaagccaggagttcgagaccagccagtgcaacatagtgagaccacctgactctacaaaagaaaaattagccaggcgcagtagtgcgcacctgtagtcccagctactcgggactgaggctggaggatggcttgaggccaagagtttgaggttatagtagcaccactgcactccagcctgagcaacagcgagaccttgttgcttaaaaaaataaataaataaaaatgaaaaataaaaccctggacattatatataaaacaagcataaacagattctggggggagaaaagggttctgaatgggggagaaaaagaggcagatgatttagaggcctctgcaccccaggaaagacatggcagagaatcccctgggttttctttctgttccacatatcctagatttggaacttaagaaactggcaacacagcaatgccatggcatgccaaaaaataaaaaaaagctccaataaaaacctgctcctctagccaaaggaccaagtgaacagcaacctagtaaggctgaaaccgagacacaaaaaccactttacttcagccaagccccacagaataaactgagaccccacctacatccgcacagcaaaggcgcagtggggagcctaaattccaccctcccaaggctgcagtgaggttccccaacgaccatcaccagagcagtgccagtgaagaccgggcagagagttgagccatccatctgtgtcagccagcaaaggggcctcctccgtgctccacggtatcactagcaccaccaccacgctgggaaccacgtgaagaacctggatttccggcctgtactccccagtaaagaggcgcctctcccgcttcctgctgagatgtgtcacaggaagccttgtggagagtcaggattttcgccatggcccagagcaatttattagaccacctaccctgcctcttcgccctccagcggtggtgtcagtggagatcacaactggagtcagacttcccacctttgcccatcagtaaaaaggagcacctgccccctacaggtgtcaatataggtcattttttactcccacctggcagggaagacccgacctcacccctcccgaccctgccttgccctgccagacagataggtgtcagaaaaaagtcagctaaaacataaagtttatatttatctattcatatttttcaattttatttttaaagagacagggtcttgctctgtcatccaagctggagtgcagtggcatgatcacaactcgctgcagccttgaactcctgggctcaagcaatcctctccactcagcatcccaagtagctgggactacaggcatgcaccaccacgcctggctaaaacataaagtttaaataagatccagagtctggtaacacaatacaaaaaggtccaaatttcaggccgggcgcagtgactcatgcctgtaatcccagcactttgggaggccgaggcgggcggatcacctgaggttgggagttcgagaccagcctgaccaacatggagaaaccccgtctctaccaaaaatacaaaaatagctgggcgtggtgactcatgcctgtaatcccagctacttgggaggcagaggcagaagaatcacttgaacccaggaggtggaggttttggtgagccgagatggcgccattgcactccagcctgggcaacaagagcgaaactccatctcaaaaaaaaaagaaaaaaggccaagtttcaaccaaaaatcacttgtcatgccaggaaccaggaagatctcaaaccaaataaagaaaggccatctattggatgtaacaccaagatgctagaattaaccgatgaagatattaaagtagtcatgatcaagatacttcaacaaacaactaagaatatgcttaaaataaatgaaaaaattgcctcagcaaagaaatagaaagtctctgaaaaagtagatgataacaagagccaaatggaaacactgaaactgacaaaacagaatcactaaaattttaaaattcagtggatgggctcaacaacaaaatggaaggtacaaaggaaaaaatccataaactcaatgacagaataatagaaatggccaaatctgtaaagagagaagagaaactgaaaaaaaaaaaaagataaagagaacctctagagactgtggagctataacgaaagagctaatattagtgtcactggagttccggaaggagagcagggctgggtgtggtggctcatgcctgtaatcccagcactttgggaaactgaggcaggaggattgtgtgagctcaggagtttgagaccagcctgggcaacatggtgaaaccttgcctctacaaaaaatacaaaaattagccacatgtggtggcatacatcttagtcccagctactcaggaggctaaggtgggaggatggtttgagtgtgggaggcagaggttgcagtgagctgagattgcactgttgtactccagcctgggcaatagaatgagaccctatctcaaaaaaaggaaaagaaaaagaaagaaaagaagaaaaatactggaagaaatagtggctgaaaatttgccacttatcactcatgtcataagggccttcagccactgaaacactgttttcattttttttgggggggggtttgttctgttttgtttttttgtttttgttttgagacagagtctcgctctatcaccaggctggagtgcagtggtgcgatctcagctcaccacaacctctgcctcccaggttcaagcaattctcctgctcagcctcccgagtagctgggactataggcacgtgccaccacgcccagctaatttttgtatttttagtagagacggggtttcaccgtgttggccaggatggtctcgagctttgacctcatgatctgctcacctcggcctcccaaagtgctgggattacaggcctgagccaccctgcctggcctctgtttttttttttttttttttaagacacattctcactctgtctcccaggccggagtgtagtggcacgacaataacttactataaccttgaacccttgggctcaaacaaccctcctgctcagcctcctgagtagctgggaccacaggcacgtgccatcacgcccagctaattttttaattttttgtagagatgcagtctcgctatgctgcccaagctgatcttgaattcctggcctcaagcaatcctccttccttgacctcccaaagtttgggattacagacatgagccactgcgcccagccctgaaacactttttgaagctcgtattagtaacctaataagtaacctaagccatcagaggtatctatatttcatatagctgtgtttctaataaagctgtaattaaaagaacatttgtaacttaaagttctaagttgtctcaggggttgggtcactatattgagtgtactcccccaattcttctcctcacatgcagattttagtaagtgatagttttaaattaaattttgaacctgtgctttgctttgttttgttttgttttgtttttttctgatacagggtctcactctgtcttccaagctggagtgcagtggcgcgatctcggctcactgcaacctctgcctcccaggttcaagcgattatagacatgtgccaccatgcccgactaatttttgtatttttagtagagacggggttttactatcttggccaggctggtttcaaactcctaacctcaggtgatccacccaccttggcctcccaaagtgctgagagtagaggcgtgagccactgcatcctgccaagcctgtgctctttgttgcctccatactgcttcacaaacatgggggcattgagcttggaactttctcgcagaggctgaaaccacctttgtcttcctctccatggaaattaaataggtttcatgtcaagcatagtacatatgatgtctgtacaaattagaaaaaggtgtctcttcctcaagccccccccccaaaaaaagtgttatgttaatatttattccttaacgacaataattaagataaacatacaggagcacttgcccctcccccaaagccgacagccttcgtgtcacctgatgtattagctgaagcagtattcctgggtgagaaatgtgttgtttccagaatccagaggccaccaagtgctgtgcttccttctttgtggcaggggatacaaaatacagcaattagtctctaactttggaggagctatcctggcatgcccttggccaacagaccccgtaaaacttgaccaaaatggcaggtccctgaaccctcccagagtttatctcctaccatctggattgcatgtgtctcaccaaggcctccagtgtgctagccatgttgtgctcatcctgcccgcctgcatgacgtcagtaacataaaggatcactgcagtgtctgcatgacatatggatagtacagagaccttcaaactatattatgatacagaccaggaaaattaacatagccctagggcaaaacactgagtaaatatttatgtgaatgaggactgtttctgatcttcttttctaattgggatggaactctaatataaaatccaccaccgtaacaaactgaaagagagaaaatatacggtcacctcaaaagatgcagaaaaagcatttgacaaacctaacatctgctataaaaattctcagccagctaggatgagaagaaaacctctacaacatgataaagggtatctatgaaaacctaacagctaaccctaaactgaatgtttttgccctaaaatcaggaagtaggcaaggatgcccagtcttaccacttttgtttgtgcttctttgatctgaaaatatatggctttcacaaaatttgagcagttttcagccattgtttcttaactttcatttaatatagtactagaagccctagcaagtgtgataaggcaagaaaaataaacaaaagtcttaatattgaaaggaaaaaataaaattattcccactcacaaatgatataatcatctgtgcataaaatcctaaggaatatatatatgtatatatttggaaaaaaacagctccacggccaagcatggtgcctcacacgtgtaatcccagcactttgggaggccaagacaggagaactgcctgaggccagaagttcgagaccagcctgagcaacacagggagactccatctctacaaaaaatgtttaaaatggccagacatagtggtgtgtgcctgtggtcccagctacttgggaagctgaggcaggaggatcacttgagcccaggagtctgaagctgcagtaagctggatcgcaccactgcagcacacagcctgggcaatagagtgagacagctgtcaaaaaaaaaaaaaataaagcttctaactaatattcaagtttatcaagatcacaagatttgagatcaatatacaaaaatcaactacatttcaatatattagcaaggaacaattaaaaatcaaatttaaaaaataacacctgcatttgtttgctaggactgacattaaaaagtaccacagaccaagtggctaaaacgacagagatttattttctcacagttctagagggtggaagtcaaagatcgaagtatcagctgatttggtttctcttaaagcctctctcctggccctacaggtgcctaccttctccctatgtcttcacatggtggacagagaaaactcttgtgtctctctcctctctttttttttttttttttttgagacagtctcactcagttgcccaggctggaatgcagtggtgcaatctcggctcactgaaacctccacctccctcgttcaagcgattcgcctgcctcagcctcctgagtagctggaattacagactcgtgccaccacccctggctaatttttgtatttttagtaaagatggggtttcgccatgttagccaggctggtctcaaactcctgacctcaacagctccgcccaccttggcctcccaaagtgctgggattacaggtgtaagccaccacgccagcctctctctcttcttaaagggacactagtcatactggattagggcccacccatgtgaacttaattacttctttaaggttctgtctccaaatacagtcacaatctgaagtcttgggggttaggacttcagtatatgaattggggtgaaataattcagcccataaaaataccattgataagagctcgaaaaatgaaatacttcaatataaatctaacataagatgtgcaggatctgtatgctggaaactacaaaacgccaatgaaagagctagaagaagacctaataagcgaataaacacacagtgttcaaggattgggaagtacagtatagttttgttttgttgttgttgttgttgtttttgttttttttgagacagagtcttgctctgtggcccaggttagagtacagtggcgcgatcttggctcaccacaatcctgcctcccaggctcaagcgattctcctgcctcagcttcccaagtagctgggactacaggtgcttgccaccatgcctagctaatttttgtatttttagtagagacggggcttcactgtgttggccaggctggtctcgaactcctgacctcgtgatctgcccgcctcagcctcccaaagtcctggattacaggcgtgagccaccacacccagccttacattatagttaagatgccaattgtccccagattgacccacagatttaatgcaattccaatcaaaatcctagcaaaattctttggagatagacaaggtaaatctaaactgtgtatggaaaggtaagaagacggtaatagccaaaacaagtttgaaaagaaaaaggcataggattcacactacccatttgtatgtgtatgtgtgtgtgtttcccagattgatgtttgttgtttgtttgtttttgagacgaagtcttgctctgttgccccggttggagtgcaatggtgcaatctcagctcaccacaacctctgcctcccaggttcaagtgattctcctgcctcagcctcccaagtagctaggattacaggtgcacgccaccacgcccagctaatttttgtatttttggtagagacagggtttcgccatgttggccaggctggtctcgaactcctgacctcaggtgatccacccgcttcagcctcccaaagtgctgggattacaggcgtgaggcactggacccggcctcccagattgttttattgtggtaaagcatggataagatgaaatttaccatttagctttttttttttttttttaaagaaatggagtctcactatgttgccaaggctagattcgaactcccgggctagagtgatcctcctagctcagcttcctgagtagccgggaacacaggcttctgccaccacacccagctctcagccatttttaagtgtataattcaaattcagtggcattaaatacattcacaaggttgtgtagccagcattactatctatttccagaacttgttcatcattccaaacagaaaccctgtacccactggacattaactcctcactccctcccccaagtccctggtaacctctattctactttctgtgtctatgaatttgcctattccagttacttcatataagcggaatcatatatttgtccttttgtgtctggcttatttctcttagcataatatttgcaaagttcatccttgctgtagctgcttgtgtcagaattttattcctttttatggctgagtaatattctattttgtgtgtataccacattttgtgtattcattcatctgtttgaacacatgggttgttttcaccttttggatattgtgaataatgctgctgtgaacacttggtgtacgagtatctctttgagtcactgctttcaattctttggaagaatattgagaagtgaaattgctgggtcatattgtaattctgtgtttaactttttgaggaatcactgaactgtttcccaccacagacgcaatgttttacattctagcaatgcacaaacgttttgatttctccacatcaccaacacctttttgtttgtttgttttgttttgttttgagacagtctcgctctgttgtccaggcttgaatgcagtggcaccatctcagctcgctgcaacctccgcctcctgggttcaaggaattctcatgcctcagcctcctgagtagctgaggctacaggcaagcgcccccacgcccagctaatttttgtagttttggtagagatgaggtttcaccatgtccgccaggctggtctcaaactcctggcctcaagtgatccacctggctgggcctcccaaagtgctgaaattacaggcatgagccaccgtgcccagcccaccaacactttttattgttaattttattgatagtagttattctaatttagggtgtaaagtggtatctcgtttccatttgtatttccctaatgactaatgatgttgagcattttttcatgtgcttattgggcattcgcgtatcgtctttgaagaaatgtttattaaagttccttgtccaggccgggcgcggtggctcacgcctgtcatctcagcgctttgggaggccgaggcgggcagatcatgaggtcaggagatcgagaccatcctggctaacacggtgaaaccccgtctctactaaaaatacaaaaaaaattagctgggcgtggtggcgggcgcctgtagtcccagggctgaggcaggagaatggcctgaacccgggaggcggagcttgcagtgagccgagatggcgccaccgcactccagcctgggcgacagagcaagactccgtctcaaaaaaaaaaaaaagttccttgtccatttttccatttttgaattaggttttttgtttgtttgttttatgttgagttgtagaagttctttacatattctggatatttacatttctgcaaatattttctgccattctgtgggctgtcgtttcattctcttctttgatgcacaaaagtttttaattttgatgaagttcaccttatgtttttttctcttgttgactgtactttggtgacatatccaagaaatgattgacaaattcaatgtcatgaagatttttcactgcttttttctcctaggaattttatggtgttagctcttcagtgcagggtttgatccattgcgaattaatttttggatacggtgcaacaaaaggatccggctgcattcttttgcatgtgcacactacccggttctaagatgtatcataaagctaccaatagtcaaggcattgtgatattggcaaaaagacaaatgccaatggaacaaactaaaaattctagaaatagacccacataaatatggtcagctgatttttgacaaagatgtaaagacaattcaatgaagaaagaacagtcgtttcaacaaaaggtgctggaacaactggacttccacatgcaaaaataaaaacctagacttacatttcatatatatatataaattaactcaaaatatatgataaacgtaaattaatatgtaaaactataaaactcttagacttaggagaaaatattcgtgacctttggttagtcaaagagcttccagataggacacaaaaacaccatctataagaggaaaaaaaggataagtttcactttctcgaaatttaaaacttctgctctgcaaaaaacactattaagagaataaagttgtttcctttcgtcactgcagcagcagctgtatgtccaagcttcagaagagacttgcctctaagattctccactgtggcaaaaagatggtctggctggaccttaacaagaccaacgaaatcgccaatgccaacacctgccagcagattcaaaagctgatcaaagatgggctgataatcccaagcccctgactgtcctttcctgggcttcatgcaggaaaaacaccttgacctgccaagagggcaggaatatgggcgtaagtaagtgaaaggatattgtcaatgctcgagtgccaaagaagttaccctggatggggaggatgcgaattctgcatcagctggtcggaagatactgggaatctaagaagactggccaccacatgtatcacagcctatacctgaaggtgaaagagaacatgttcaaaaatacacggattcttatggaacacatccacaagttgaggtctaagaccaaggaagtatacaaatatattcacctgccgtccaagaaggttcatcaaggctcagtccaaggagaaagagacaaagaaaaacagcgcccccaccctccttgtctgtactcagtggcctcagcaattacatagaccaatcactcaaataaaacaagtctcttttttttccttaagaaagtgaaagagagaatgaaaaaacaaaccacagattgggagaaaatatttacaaatcatatatcagaaaaagcacttgtatctaactctcaaaacttaaaaataagaaaagaaacaatccaattttttttaaatgggcagtttaaaaaaactctgcagttaaaaaaaaataaaaacaatccaattataaaatgggcaaaagatataaacagatatttttccaaagaggagatttaggtggcaaataagcatgtgaaaagatgtccaacatccttagccattagggaaatgcaaattaaagccacactatttcactgtacacctattagaacagctaaaataggtgcgtaatgaacagctaaaataacaagtcatggtaacaccaagtggtgacaagtacgcagagaagctggctctctcgtacattcctgatgggaatgtaaatggcacagacactcacatacacttactatatgatccagcaatcacacccttgggcatttatcccagaaaaatgaaaacttatgtgcatacaaaaatctgttcttgaatgttcctattagccctatttataatagcaaaatactggaaacaactcaaatgtcctttaatgagtgaatggttgaacaagctctggaacatccatataaagcaatataattctgcaatacaaagatatgaactatcgaggcatgcaacaaccttgatgaatgtcaagggcattatgcttagtgaaaaaacagtccatctcaaaaggttacatgctgtattattccattcctataacattctctaaatgacaaaactatagaaatgagagaacaaattaggagtaagcaagggaaagaagtggagatgggggaggcagggacacaaatacaaaaaagtaacataagggagttctttggtggtgagggagcagttctatatcttgatcgtggtggtggttacacaaatctatacataggataaaatcttacaaaactaaacacaacacacacacaccacacgcacacaaatggatacagggttttggggggttttttaatgccaaaaactgaacgaggtctgtaatcgagttgactgtaatgtaccaatgtcagttttctcatttggatgtttgtgttagtttgctagggctgccataccaagtaccacagactgggtagcttaaaccaacaaaattattttctctgccaggtgcggtggctcacgcctctaatcccagcactttgggaggctgaggagcgtggatcacctgaggtcaggagttggagaccagcctggccaacatggtgaaaccctgtctctactaaaaacacaaaaatcagccaggtgtggtagcaagcacctgtaattccagctacttgggaggctgaggcaggagaattgcttggacccgggaggcggaggtttcagtgagccgaaattgcaccactgtactccactctgggtgacagagcaagactctgtcttgggggaaaaaaaaattatttcctcacagtattggagtctggaagtccaaggtcagcagattttattcctcctgaagcctctcttcttggcttgtagatggatatcttctctctatgtcctcacgtggtcttccctctgtgtgtatctgtgtcctaatttcctttgtttttttttttttttttttttttttgaaacagggcctctctttgtcacccaggctagagtgcaatggttcaagcaatcctcccacttcagcctcccaaagtgctgggattacaggcatgagctaatgcacccgacctcctcttcttataaggacaccagtcatattggagggaccatctgtttgacctcatttgaccttaattacgtcttaaaagaccctatcaccacatacattctgaggaagttggggttaggactacaacatatgaatttgggaggaagacgattagggccatacgatattgtactacagctatatgtcacccactggggtaacagtcaaaagcgcatggatctctttgtactatgtgaacaacttcctgtgaacctataattatttcaaaataaaaagttggccaggcatggtggctcacctgtgtagtcccagcactttgggaggctgaggcgggccaatcacttgaggtcaggagttcgagaccagcctggccaacatggtgaaatcccatctctaccaaaaaatataaaaattagccaggcatggtggtgcgcgcctgtagttcccactattcaggaggctgaggtgggaggatctcttgaacctgggagggggaggttgcagtgagccgaaatcacaccattgcactccagcctgggcaacagagactctgtctcaaaaaaaaaaaaaaaaaagtccgggcgcagtggctcacacctgtaatcccagcactttgggaggccgagttgggcagatcacgtgaggttgggagttccagaccagcctgaccaacatggagaaaccccatctctactaaaaatacaaaattagccgggcgtggtggtgcatgcctgtaatcccagctacttgggaggctgaggcaggagaattgcttgaacctgggaggaggaggttgcagtgagccaagattgcgccattgcactccagcctgggcaacaagagcaaaactccgtctcaaaaaaaaaaaaaaagaaaagttaaacaatggggaaaagatgtaaagacattacatcaaagaatatatatgaatggcaaataagcacatgagaagacgtttagcataattagtcattaagagaaatgcaaattaaaaccaaaatgagaaatcattgcatgcctattacgataactaaaattaaaaatactattgatacctaatgctgatgagaatacagagcaacaagaactctcataattgcttgtgggaattcaaactaatacagtcactcaggaacagtatcttatagttacacatacacgtatcacatgacccagcagtcccacctctaggtatttatcctaaagaatgaaaagtatattcacacaaaaacctgtacatgttcacagcagcattattcataatggtcaagacaacctaaaagtccttcaatgggtaaatagagccacaagatgggatactgctcagagataaaagggacaaatgattgacacgccacaacatggatgactctgaaatgcattatgctaagtgaaagaacctagactcaataggttacatactttatgattccacttacatcacactctgggaagggcaaaactacagccacttcggttctcttttggttactgtttgcatagctttttttccatcccaccttcaacctatttgtgtcttcgaatctgaagcatgtctggtgaaaacaacaaataggttttgtttttcctttttctttttcttttttctttttttttttagacagaatctcactttgtcccccaggcttgagtgcagtggcgtgatctcagctcactgcagcctcaacctcctgggttccagcgatcctcctgcctcagtcccccaagtagctgggactactggcatgcgccaccatgcccagttaatttttgtacctttagtagagacggagtttcaccatgttgcccatgctggtctcgaactcctgagctcaagtgatctggccaccttggcctcccaaagtgctgggattacaggcgtgagccaccgtgcctggccaacaaatagttgagtcatattttttaatccattatgtcagtctctgctgtataattagagggtttgtttgtttgtttgttgtttgtttgtttgtttgtttttgagacggagtctcgctctgttgccaggctggagtacagtggtgccatctccgctcactgcaacctccgcctcccggattcaagcgattctcctgcctcagactcctgagtagctgggactacaggtgcgcgccaccacgcccggctaatttttgtatttttagtagagacggggtttcaccatgttggccaggatagtctcaatctcttgacctcatgattcgcctgccttggcctcccaaaatgctggtattacaggcgtgagccaccatgcccggccgagggtttaacccacttacatttaaactgatgaggtaagatttacatctgccattttgctatttgttttctgtcttcttttattcttcttcttccattgctgccctcttctgtattaaataaatattttccacagtatctttttaattcccctgctcttcctttcctatatattttttgaattgttttcttggtggttgtgctgaggattacaataacatcttaacttttaacatctaggttgggttaatgccaaattaatttcaattaataccaacataacttaatttcaattttctctcatttagttccatttctcccctcccctttgtgctcttattgtaatacaaattacatttttaaacactgtacactcatcaatgcagatttttttgaaaacagttttgagataaaattcacaaccatacaattcatccatttaatgtgtacaattcaactttttaaaatatattcataagtatgtattgccatcagcacagtccattttaaaacatttttatcacctaaaataaaaaattaaaaaggccaggtgcagtggctcacacttgcaatccaaacattttgggagaccaaagcaggactatcacttgaggccaggagtttgcgagcagcctgagcaacacagcaagactccacctagtcccagctactcaggaggctgaggcaggaggggcccaggagttcaaggccacagtaagctatgatcatgccactgtactccagcctgggtgacagagcaagactctgtctcttaaaaaaatgaaaataaaaataaaaactgttctctttagctatcatccctcttcctcaattatgcccagccctaagcaaccactaatctgctgctttctgtctctatagttttgcctagtctggatatttcctacaaatggactcatacactatatggcccttgtcactggcatctggcatcttctacttaacataatgttctcaaggtttatccatgttgtagtatgtatttgtacttcattcccttttttttttcttttttctttatatatattttttcagacagggtcttactttgtcacccaggctggagtgcagtggcgccctatcagctcaccgcaacctctgcctcccaggttcaagcgattcttgtgcctcagcctcctgagtagctgggattacagacatgcatgaccacgcccagctaatttttgtatttttaatagagacagggtttcaccacgttggccaggctggtttcgaactcctgatctcaagtgatctgcccacctcaacttcccatagtgctgggattacaggggtgagccaccatgcccggcctttacttcatttgtgaaggatgttttgctggatttagaattcttagctgacagtctttttctttcttttggatatttcctcccgctcctttctcctccaccaccccagccaccatggtttccaataagaagtaagctgttaatattactgaggattccttatacatgatgagttgctcctttcttgctgctttcaagattttctctttgtctttggctttgacagtttgattataatatttctagatgtggatatctttgaaattgtcctgctgagagttcgttgaactaaagcaaaagtataaaaacaggaaatagatcagcggttgcctagggttggagtagaagaaggatccgaatacaaagggacagcataagggaattctgtggtgtgtttctttttttttttgagatgtagtctcgctctgtcgcccaggctggagtgcagtggtgccatctcggctcaatgcaacctccacctccccagttcacgccattctcctgcctcagcttcccaagtagctgggactacaggcgcccgctaccacgcccggctaattttttgtatttttagtagagatggggtttcaccgtgttagccaggacggcctcgatctcctgaccgcgtgatctgcccgtctcggcctcccaaagtgctgggattacaggcgtgagccgcggcacccagccctttgatgtctgtttctatgagggtggtggtagtcgatacaagaatctatgcatgtgactcatagaactgtacatcgaaaaggtgaattttatcatatgcatattttttaaatgccaataaatgaaaattgataatttttttttttagatggagtctcactctgtcacccaggctggatggagtgcagtggcatgatggcagctcaccgcaacctccacctcccaggttcaagcgattcttctgcctcagcctcccgagtagctgggactacctggctaatttttgtatttttagtagagatggggtttcaccatgttggccaggatgctttcaatctcctgaccttgtgatccgcctgcctctgcctccccaagtgctgggattacaggtgtgagccaccgtgcccggccgaaaattgataatttttaaaaatacttagtatgttcactcaacgctgaatatatatttttattttatttttttgaggtggagttttgttcttgttgcccaggttggagtgcaatggcgtgatctcggctcacagcaacctctgactcccgggttcaacctcgtacctcagcctcccaagtagctggtattacaggcactcaccaccaagcctagctttttttttttttttttttttgtatttttagtagagacggggtttctccacgttggttaggttggtcttgaactcctgacctcaggtgatctgctcacttcggcatcacaaagtgctggtattacaggcgtgagacaccacatctggcatgaacacatatgtttaagtgaacactcatgtactctcatccaagtaagggaaaagcacattgtgagcattccagaagctccctatgttcttctccctgaatgttgcctcattgctcccccatagaatcaatcacaattctaaattttatcataatcacgtccctgctctttttttatctttttttgtttgtttctttgtttttgagacaggatctcactctgttggccaggctgggatgcagtggtgcaattcctgctcactacagcttcaacctcctgggtacaagcgatcctcctgcctcagcccctcaagtagcttgaaccacaggcacacaccaccacaaccagctaatttttgaattttgttttttagagaccaggtctcgctgtgttgtgcaggctggtcttgaactcttgcgctcacgcaatcttctcgccttggcctccctcgctgctgggattacagatgtgagccactgtgcccagctgttctttatctttttattattcatgcatcactaaaaaatgcaattcttttccttttgcattttgcttatttactcagaattgttttgcaagaatcatctatgttttgtgtactagtttacttattttcattcttgtataactcaattgcacaaatgtaccatattttattcttcattcttttctccttttttttttttctttttttttttgagacagggtctcactctgtcacccaggctggagtgcagtggcgtgatcactactcactgcagcctcaacctcctgctgggctcgtgatcctcccagctcctcctcccacgtagctaggaccacaagtaggtgccttcatgcctggctaatatttgtattttttgtagagatagcatttttccatgttccccacactggtcttgaactcctgagctcaagcattccacccatctcagcctcctgaagtgctgggattaaaggtgtgagccaccacacctggcctcttcattctatttttagtggacatttggatttcttccaatttggatctatttcaaacaaaactgctatgagcattcatgtacatgtatcttttgtatgtgtataagagtttctctatggtatatattatatatctaagaattgggcatgtgtgtctttaatgctactagattatgctgaggtgttctccatcttctcataccacacatgtcaaatggaatgcaagagcaaatacttctaatgatatgtggtacagacacaggtaagggtttactagaggaaacttccaggcaaagagttggaaaaaaatgtatatgatgccccaaattccctttatccaaaaggaagcttgcttaggtcaggcagggctaaactcactgttgaaagagttccaggagagtggacaccttctcatgacactctacatatttacaaaggcaagcgagggctgggggcccctggaaaactagcaacaacagatgaagatttctggccatggaaatgtcttagctgtaaatgaagagaatccagagcttggacatcacttggggagctcacatgccagttcagtcatgctgaactgttccttttgtgaaacgcatgttcacatcttttgcccattattatattgggttatttattcttcttggggtttgtcaggattcgtgtacctgtgaattggtgtctttcatcagttctgaaaaattctgttagcatctcttcaaaagttgctgttggactgggcacagtggctcacacctgtaatcccagcactttgggaggccgaggtgggaggatcccttgaactcaggatttcaagactagcctgggaaacatggcaaaaccctgtctctacaaaaaatgcaaaaattagctgggcatggtgctacatgcctgcagtcccaactacctgggaggctgaggtggaaggatcgcttgagtccaggaggttgaggctgcatgcaatgggcagtgatcacgccactgcactccatcctatgtggtagagtgagaccctgtctcgaaaataaaaaataaaaaattgctcttgactttggtggtggctaatgcccataatctcaacacttggagaggctgaggcagaaggaccacttgaacccaggagtttgagaccagcctgtgcaacataggaagaccccgtctctacaaaaaatacaaaacttagctgggcatggtggtgcatgcctgcagacccagctactcaggagggtgaggtgggaggatcgcttgagttcaggaggtcgaggctgcagtgagctttgatgactgcactctgggtgagagtgaggccctgtctcaaaaaaaaaaaaaaaaaaaaaaagctgtctctcaccactcttcctctcttcacttgtcagcttttcttccatgtcttttaacatctcttcaatattttctatctctttccacattttcctctatctctctctgtcctttccccagaaaggatattctcttctgtcctaacttctagctcattaattctctctttaactgtctaacccactactatacatacccattcagtttttagtttaggttattgtatttttatttgtagaaattgttaggttatatagatatagatatatagatataaatatatattttttgagacgggagtctcgctctgtcgcccaggctgactgcaaactccacctccgggattcaagcaattctcctgcctcagcctcctgagtagcttggattacaggcacccaccaccatacctggctaatttttgtatttttagtagagacagggtttcaccatgttagccaggctggtcttgaactcgtgacctcaggtgatctgcctgccttgacctcccaaagtgctgagattacaggcgcaagccacagcacctgacccaaatagctcattttaacgtttttttttttctctaatctgaggaggcatcttgtatgacttttattttacacaatgtgaacatggttgttttataatctgtaactggtgattcaaatgtattaaatctttgtaggtctagatctcctatttgttactgctgcctcatttccttgatttttaatgtgatgcttattgtacttaaaaaattatttgtatgacaattgagtaacaagtttactgatgtaaaattttcggttcattttaaaaattatgtgtcacatgtaacagactgaccgatataaaattctctgttcattttacaaacagtgttccctaaagttgtacaatactgtgatcctacttatggatattctacaatatttcagataatataggctgaccagccaggcacggtggctcacgcctgtaatcccagcactttgggtagccgatcacctgaggtcaggagtttagcctggccaacatggtgaaactctatatccactaaaaatacaaaaactagctgggcgtgatggcacacgcctgtaatcccagctactctggaggctgagacaggagaattgcttgaacctgggaggcggaggttgcggtgagctgagattgcgccagtgcgctccagcctggacgacagagctagactctctcataaaaagaaaaaggaaggaaggaaggaaggtatatagacagagactggtccatttaacttcattttaacatctctttggcttgacttcctataatgtaaaggctggaaagctaaaagctaaatatcccagcttcttttctacctggcattcctcgtgtaacctaggtcctgtcaaacagatgcacaggccctgaacttggagctaagaatggcaaaaggaagtgtcaaacacattcagggagatcagattttctgacagtcatggtagtggagctgtatggtttctttggtacgaatatgaaatgttctggcatctagtccccagtatcttagttgccaaatataaagcaatggtgaaagtgattatttctctaggaatattcccatgacatacatggttggggattccctcttgcctttgttgacactgactgtaacgtttctggttatggagcatccaagtccagtttccagccctcctggagagtgtgtgagcttcctaagaccctttaatcaatccctttctgcttatttagagtgctatttagagtggattctatcatctacacctaagaacacttatatccaatgaaaccaaaatagaatccaagaaactgtagaacaaactcaagagtacaataacaagaaatcctagacaaaaaagcaggcaaagttaaactatgatgttagatgtgaggatagtggttacccttgacagacaggggtattgactggaagggtacacaaagggagaattttggagtgctggtagtattggggttttttaaacctgggttatgggtccctgagtgtgctctgtctgtgtacatttatatggctgtgaacttacatgcacttttcattatatacgataaacttcaatgaattaaaaatctgtttttgaaaaatgacactataagtggaggtgaggagaaaaggtgcagggaaatttggtactagatccttcatggcgattaatggatattgacgctgtgtgggagagacagagacatctcaagaaacagtgcaagagccaagcagtaggcagaacttacatggcaaaaggctgcatgatgtctttatgccagattttgcctattactatttgccccattcctgtccttggaagctctactctgaatgacaagggggttgggagactacattttgtaggcttccttgccagctgagttactgttagattttgccagtggacttcatagctcagggactagaaagtgggaggaaatgagaaacggtcctgtttctggctctagccatggcaggtgattgcctgtggttgcaagcagtcacaagtgattacaagcctccagcaccatcagcaaatacaggttataagcaccagaccaagggtgctatcctgatttctgggtaaaattcccttccttttgttcatccagctcttttttgtttattttgttatgaccatccaggttggagtatagtggcgccatcatggctcactgctgcctctgcagcctccacctcccaggctccagtgatcctcctgcctctgcctcccttagccatgcgccactacagctggctatgtttcttatttcttatttttgtagaggcggggtttggctatgttatccaggctggtctcaaactcctgggctcaagcaatcctcccacctcagcctcccaaagtgctgggattacaggtgtgagccaccacacccggcctcatccagctcttccaacaccttcctatccaatttccagcattaaatttccctccactttaagtgcctagaatgggttgtttacctggcaagacacagactgatacacaacttccccttcagtctgatagaaactcagcaaagcctatcagttatcaatactctgagaatggctgaagcaaattcaaatgttctcagctgacccacctttggctgaccctcctccttggagccatccctgtccatactccacaccctgcccacctcccgcctgaacttctagagccactacttctattgcatccttgactgccccagtcctgttgatgtgcagtgctgtatttcacgtgtgcagctcccctgcactctcacggcacctggcctccaccctagcatgtctcacaatgtaccgaactgtcctttcccttgactaggagccccaggagtttgagtgcaggcacggctgatcctgattccttgcacacctggcaatgagcaggcgcttacagaatgcctggcagcagtgtaatggtacctgtagcagaagctgatcagaagaaatgagttgctctgccaggcccttggttcaagaagagcccaggtgggatcctcttttcacacaatgtgtccagaagccaactgatgagagtgtgcaagtgtgcagaataggaactgagggctgggccgaggcccgcccccggggggaggacctggggcacagagacaacacgaagatgagctaaggtgcccggtagctttaatgagcaccttttcctcactttgtccctccctctctactcttccccttcccgtcttgacaggtccagcctgccctagggctcttaaaccgcaggtatcaatccttctgtccccttagccgctccaggcgcctgcgaaggtccgggggcaccttggccccagctgccagcagctcgcgcagcctctgtttgggagtcttggtgagcacgaaattgcaggggaaggggccctcttcaaaggtgacccgacagttccgtgtcactgaatggtagccctcggcactggcagtcaccatgtagtcccctggggtcagcagacgccaataatccccgccccacgctgaggagagtgaagggcacgatcaggacccaattaatgatcttctgcttcttcccgagcctccagccctccagccccttcccttgccctcccggtcaaacacacccgtggtcacgtcatggttaatcccatccacggcaatgacagcgtcagcaatcccaagctccgtgtccttgtccctcaccactcctgcaatgcccatgcgcacctgtgtgggaagaggttatcagagcccttccccttcggcaggataatgtgctgtttagctaacttgctggctctgttgccctgcaaacctgagcaaagtggtaggtctactgtgttcctaggtgacactacttctggaagaaaaaaaaaaaagaaatcctgattgacaaatcacatctggactaagaaaatgataaatacctggtaggaaggcttatctatccttgggctttcccaggttattgggcttgtctttggtagaccctttggaagctctgcttatggagctattacaagggttatgagctccatggaacatgaagcttctatgccaggacagctcctgcacctgcctcacgtgagtctctcctgaggatagctctggggcagcgccacggaccaccacctagactgcaatggaggctcctcccaccggctctaacacgatgccacgctgccagcaaactgcacttcctgtcctgtgtgcttccaagacaatctgataccaagcatggcccatggcatcttgtgagtctgaatgctcagctggaccttagaagaacccctggtaggagctgtagcctaaatggacagcaggagtgattcaggcaggctgggggccgggacgcagatccgacctgctccaggtaggtgaggagggcgtctttgttgttctcccactcctggggcaattcattctcgtgagggaacttgtcacaggacagctccacagtgacctcaaagcagttggtgtgtaggtagctgaagtcattcatgcctaaggggaccacagacactgctgcctaagcaggcgggatgcggtcccatcctcccgctaccctcccttctctgagggacacttcagagtgggaacagacgccagcactgtacgcaaccgcaggctgtcttatcagggcgggggttacggggccagggctaactccaccctcaggcacatactcccggggaccgtgtgccagtcagccccgttgatgatgttgccgtgcacggagaagtcctggctgtggcagggtcggcggctggtgtcctgcatggccagattactgccagcatagacagtgctgagccagcgaaacacagcatcatctggtgtgggcgtgagctcgcgggcagcccacggggtgcgagtcatgtcgaatgggtaggacaccacgagctcacccccgtggaggttggcacttagcacaaaggggatccgcttcatccacttgattactgcccgcgtttcaggagccacctggatggggcaggtcaggaggggcaggagacagagacaaggtccgccccccacagacctccactgccgccctcaaaatactcacggtggcattgggcagggtgtagtaagtgggcaatggcaggtgatggttggggacgatgtggggcaccttcccatcgtcctgtgcttcccacagtggtgtgttgaggtcagcaaaattatggttaagatcgatgctctggttgttccagcggccctcggcccagcccaccagctctgaaccctgccgggcaagaggcttgttcaagtcgagcaggtccagccaccagggcagaaggacagagtggccctcatgctgggtggcctacccggtggtaggcgatctcatagccatcagggttcatggagggcagcaggtgaatgcgcatctcagagagcagccgggtcacccgtgggttccctcgcaggaactcatggcacaggaactgcatcaggagcagaagcaactcccgccccagggcctcgttcccatgcatgccagccacgtagcgcacctcaggctcccctggggacacatgggggcttgcagcgggttcatgcctggggccctgccctgtgcctacctctccccactccccatgccagtacccagctcatgctccccaggcttgtccgacatttccatcacatacagcttcaggccctggtagctcttcccaatgctgtagatgcgggtgatgttggggcattgctcttgtacctgcttcatcagctggtgggcagagtgtagcgtggcatgaggcatgggaggggtacacccaggggcagatcacatgtgccatggaaagacttaaaaagtcagcgatggcccacacagagggggcatcccatcatggtacaggaggggagcggcagcagagccgggaggaaggggtaggactgggggggcgccataataagggaaagtgggatggagcttaggggtccacaggagagaaggctgagacatcaggaggcagcaggggcatacaagcgcagtcacagcaggttgtgccccggtgggaaggtgggaaggggacctgagatgggtgggccctccttcccaggtcataggggttatatctgaccttcctcatggccttgtaattgtgatgctgaaagtctagagggtcagaggatcccgacgcaggggcctcaaggaataggtcattggggtctggtggaggttgagtttatggtaaagggtgtgtccacagtgaaggatgcaccctgcatccaagccctgcccaaccaaccctggcctgactgcccacctgagactgggcaggccaggatctctgcccggaggcaaggcgcgcctccctggagccaggtctggggcagcaggcgaatgaagcgggccacctggggctccggcaggaggttcagcactggagtttctgggtctgaattggcaggaaatacctgggggcagcaagttctctgttgtggctgctcaaaccccagaagcctggcccaggacccagggaaggagctcaggcctccaagcttactgtctccccaccctagtgggctcagctagagacttgcactgtgcatcaaacacagaccccggcccacagcccctgccaatgggcagccctaggcagccttgctctctggattggacacagttcattagaccagtttggccacatgactcgggggaagccaatcctagagctggccaggactccacattgtagcctgctgtaaaaagaggtccatgagatgcggaagtcagaaccacgagaaggcaagaagtgatgtggaccagaggccccgggccagaaggggcacgccaggaggaagctgtaccgtgaagcagcacccaccctgtggtggcattatctggggaggatgtgggcatgtcccaaagcagctggctcccaatggtgcctgccgtgtgccaccctcttgacaacaagccacacccccctgggaagcctaagctggcgtctattccttgtcctcagaggagcctcagcctagcctggactgggtgcccaactcccagcatggaggccccagccacagtgggaccactcactgcgtccatcccactgctgtggttcctacttccccaccaggtccgactgtcattgctgaactggaccttgtatgatgtgacccagtcatacctggcaggagaggtggagagagatcatcggtgcccccaggactcccaccccagtccttctgtgacctcctgacctagggttagtctgcctcacctccagacagagttcctgccctgtgtgataacacccgagaagcgggtggggtgcccagcgtccacctgaaaccatggatcggcgtcctgctcctcagcacaccaggctccatcatatagatcgccgtcctccaggcctgactgcagacacaggacatggtggtcaggcccagttggacagagtggggcaggccaggacagagaggaggcaggagagaagctcccaggggctgccttccctaccctgagaccatggctccgagccaggattactgacctgaatgttgagccgtcctcggtgtggtccaagaccaaaggactggctgctggatgcctcaagccggctatctgaaactcgcagggactccagacccaaaggaggacagcctggggcggggatagaacagtgagacaggaccagagggagggtagccagggcaggtgggaagctgagcctaaggttgctcctgcgctaggcaagcaaggggcgtgccggtgcccatgaggccaagagctgtgctggtaaagtgccccaggggctgcaagtctgggctgggcccctggagaggaagtacctgtttcttgtttctcagcggggtcgagggtccctgctggagtgggggtcacaaggggcccggcagtcaccagtggggtggggcgagttagagttagcttcttccgcttcttcataatgacctttttcttcttgatgactcgaatccggacatgctgttctgaggtcccttggggtccgagaggcacagcatgggggaaaggaagaatggtgaaaccccggatggaaaggtctgccagcccaagaagacatgtgagcccacagcaggccacaccaccaggatctaacagccttcacaggacatcaaaggcctgcaatctgaccccaacctgcctctccagtcacttccttggctcctccttctcctccctgatgtaactacatgcttggccagcctcccctgtgaacctctaatccaatggagagctgcacccagcctctagaaactgttcggttgctccaaagagctgagtctggcactttacctccgggcctctgcactagctatcccctcccctgtaatgctacccctcgcctctgattttttcacctaattcccattcttcctttgcatctcagcccagatgcctttccaaggaggctttcttagctccagactcagcatcatgccccaaaacccctgtgccgcttccattgttgtgtctgctctctgggctcagatggcctgtcctggaatccatgtctgcctgggtgtcgaggctttcagggctgggcctgcccgccggcccttcagcacaaggctctgcccaggcaggtgctgggggtacccatcgaagctccacagctgcctccagaacaggctgcccatttccgcatctggtgcccctgtgcctttgcccgccgcttccttcttggcagccctctctctctctctctctccagactcccctgactcggggacatcacccttcaagaccctcctccacttgcctcctctagaagcccctgagtgccctccgcttgcgctcctcctctcctattccacatctggaaagctgggaggtcgggctgccttcctctcccgctctgccccatcctcccggcagcctcagcgaggggctctcccttctttccttttgttctttctctccagccctcgccttcaaactctctcctacgcagtcttgctctgcaccttgagagcttctgcccctctgtctcccctcctgccagttctggcctgttttgtctttggtgaaaagggaaggtttggggcttggaagaggcagcatcccactggcgcctgtcctgggactgctgactaggtctggcagggaactggggctgccgagtcagcagccattgctcccagcagggagttgagggagtgtgagtgtgtatatgtgtgtgtgcactgtgagtgtgagtgtgcgcgcgcgtgcactgtgtgtgcgcgcacgcgcgtgtgagtgtgcgtgtgtgtgcatgcgtgtgaatgcgcgcgcgtgtgagtgcaagtgtgcgcgtgtgtgaatgtgtgtgagtgcgcgcgcgtgtgtgcgcgtgagtgcgagtgtgcgtgcggggtgagtgtgcatgactgtgagtgtgcgtgggtgtgcgtgtgcccgcgtgttagggagggatcgccccacggggcaggagagccgggcagtcggcttgcgggggagcggaccgtcggtcggggaactcaccgttagctgtctccgccggcggctgtgccgggctgctatgcagggccggggtcgagcctgggaccttggtggtcccgggctgcgcgaggcccagcaccgagttcctgggcgcccccagagccgggccgacggccggcgcgaaggcggccagggcgagcaggagcccccacatggcggggattgagtgccaggggcgcgcgggctacggcgggtggcgggtcggtctcttcctgccgagtgcgccgagccccccgccccttcctgccccccgcccctccgcagcctcctgcccgcccacagcccgctgcccgcctcggacctcggagaggaggagagggccgggaggagcgagcggggctgacctccaaggggccgccccaagtctcaggaccgccgactctgcccttcctctccgccgtctggggccaacccgcctcgttggcgcgctgcgcctttatagtctgcaaagccacactgaagagaccagagatcacctggtggccatcaagtcgaccaacaggaggcaaagccccttatctgagcaattcagaatgacacttccctattgtctaaagccacatctggtaccaagcttccgtcccaagaatttataagtaactagaatttctgtacgtttccggaatgagtgcacgttaagacccattgtgcaaactttgctgacatcaaggcaccaaaatatcgacaaatgtaaccatttaccatgacctaagtgactaatgtggtccaaattaccctgcagttccccgcagggagctcagtcctctcttgctgaagcgcctactgcgctctgctgcctcgtcctttccgtctaataaaactttccttttcagacctacacggttgttgataagttcttttaccacccgggagccaaccacttcccggttccggagctctgacacctcgcctggcatcttggtggcccatacggggacttcactgggatttccctcttcctttttctctctgcttccttccacggtctggttctttactctttggggaactgccggtcccggtggaggcagctcttctgtgggatcctgaagccctagagaagggatacctggctgtccttgcccttaggggtgagggactggccagggctcttttctgttttcggactgccagtgaaccagcttgagttctcgttggcaactgacagtttctggccaagcgccatcccccggtattaccccaaggccaagacaaaagagctattgcctgtcagagtggcagggcactttcattttaacactccataagccttgtcctggaagcggtggatctcaattctacacagggatgcctcagggatcttgtagttccttgtctaaacccaacttcggttcaattaattcagttccatccaactcgcccttggattgcctccttaaaaatggtcccattggtctcattttgacccacaaactcttaaaaataagcatataaggctgagcacaatggcttatgcctgtaaccccagcactttgggaggccaaggcaggcagatcacctgaggtccggagttaaagaccgggagtctactaaaaatgcaaaacttggccgggcacagtgactcacacctgtaatcctagcactttgggaggccgaggcgagtggatcacctgaggtcaggagttcgagatcagcctggccaacatggcgaaaccctgtctctactaaaaatacaaaaaaaaaaaaaaaatcagccagggggctaattatatgtggcgggcacatataatcccagctactagggaggctgaggcaggagaatcacttgtaccccgggggcggaggttgcagtgggccaagatggcgccacagcactccagcctgggcgacacagcaagactctgtctcaaaaaatacaaataaaaaataaataagagtttaaaaagcatatccttttttctaatattgcttgggttcaatacaagctccctaatcaatcaatttggccaattaatgaaacttgggattgcaatgctactttacaacttaactgattttttgccggaaccttggaaaggattcagaagtcccatatgttcaggtcttttttgctttatccccaaatccaaacccaaaattacatacaaattgtcatgtatgcttccaaggaacgtcctcccttcccggttctgatgtcttagatgatccttccttttgcctattacatcctcctcaacctgctcactcttcacctacaccctctccatctgctccattccctagtcaatctcccacccacatacccaaatactttctccccttcacatactctcaggggagtcacatatgctactagtacagagtcctcagaaaaatccccaaaatattttgcctctccctaaggtggctaatgaagatttgggaacaagccaagttcatgtcccttttctgatcatgtctgatcttttgcaaattcaatccaagttgggttcatttagtcaggatccctctaagttcattcaagaatttcagactttaactgttgcctttgatttaacctggcaagatgtatttgtggtattaactacctgctgttcccacacacaaaaaatcacacgtgtgatcttcagcatgggcagatgaagctcatgctcccagtcctaataacagagctgggcagaagctgtccccaacatagaacctattggcaataccaggccaccaattctggcccaaacagaggtaagggcagacaggatcatatggtaacttctctgttggagggaatgaaaaatatataataaaacctgttaatttttctaaattataagaaataatagctgggcgcggtggctcacacctgtaatcccagcactttgggaggctgaggcgagcgggtcacctgaggtttgagaccagcctagccaacacggagaaaccccatctctactaaaaatacaaaatgagctgggcatggtggtgcatgcctgtaatcccagttactccagaggctgaggcaggagaatcgtttgaaccttggaggcggaagttgtggtgagctgagattgcgccactgcactccagcctgggcaacaagagcgaaattccatctcaaataaaataaaataaaaagaaataataattttgtatgtatgaaactatctgaaagccctgcccttttccaagctagactggtggaggccatgcataaatacacaaattgagaccccaggggccaggtgtggttgctcacacctgtaatcctagtactttgggagaccaaggcgaggcgggcggatcacctgaggtcaggagttggagaccagcctggccaacatggtgagaacctgtctctactaaaaacacaaaaatctgtgggcatggaggtgcatgccggtaattcctgccttttaatgcttatatcttccagcttacaatgattccacctacagatgactatgcaatcccaataccagcctgcaacagcaacttctattttcatggggcctcttgatggaatctggtcttccctccatgaacaagtttatcatgacccttcattcccttcatgacagaaagcaagaaaggaatcctttcaatgccccttttcagcaggaagtagccagatagactggacacccctcttcactgtgccattttccctttcttgggatcctaacagacaagtagacatgagcatggagaaatacaaagggtcaaagatttgcccaaaatatttatcagggggaaaatgaggagagcaaggatcacctggtggccatcaagcagaccatcaggaggcaaagcaccttatctgaagaactcagaatggtactttcctattatctaaagccacatctggtaccaggcttctttccctagaatttctatacatctccggaatgcacgcatgttggaacccattgtgcaacctttgctgtcatcaaggtgccaaaatgtctacaaatgtaatcatttactatgacctacaaaactaatgtggtcaaaattacccttcagttccctgcaagtgagctcaggcctctcttgccgaagcatcccgctgcgctctgctgtggagttctttccatctaataaaacttttcaaacctatactgttgttgataaattcttttaccacccgggagccaaccattcgtggctgcggctcccggggctctgacacccagcctggcacacaacatttcacttagcccctcgaggcccttagcctgcagcagacatctactttgtaccatgcactatgccaggagttttacacgtggccgctcaatcaaacttcattttacaaactgataaactgaggctcagagcggctaatgacttgggcgaggtagcaaagctgagaactttgggaaggaaactacaaccggagaggaaaagctatccagagccagaggccccctggcagggcgggtgggacagaagggggaaaagagtgaagggaaaatgaggcggcggggggctagggggcgacccggagcctggggagagggctggtcccggaatcctccagaaagacaacccaaggggcccaagaagaggcggcacggcggcgcttcccaccaccaccatcaccaagcccggccctgcccctcctctcctttcccttccctcccctactccttcgctcactcacccggctgccacgtcccgtcccggggttacataacccggagagagaagcctgagcgatagcctgcgggctggggctgcggtggaggagccaagggttgatgcactgcctgacctgccctccggctcctcgcccccagcccgtattctcctcggggagccggcagccctgggtctgcccagatccggagatgcccttcccgccctccctccaagaccccctttggatcctgcattcctggtcatctctccagaaggaaggaaacgcgtccagcggtgtgcctttggccggcgcttggcctttgcaaagggctctccagggagatgctcccatccccacgaggagcgatgcccagaagtggcccgcaatcctctggcgtaagcggggccctgcgcaaatgttttttgcaggggcactatctgtataaatgatttgaatcacccaaaagcagcttgtgggcaccattctggcagcccacgctcacacgaaccccagaaagaaatagcgcgccgcagtctgggactggggcccaccgccggcagggactaccccataggcactggtcctggagctcctcgaggcatctggtctgccccacgcgcgcagggtgaagagctagaggacccccgaaagggagtgaccccacagggcccacgtgcaactgggtcccgcctcgcagccccctgcctcgacggcgctgccgggtcccaggcactggatgggaggacagagagacatttcaagggaagcgctgcacagccgggactccctggacgccaggcaggggcagatgggcagcgccgatgcttcccgaaggtgggaggccgcagtctgaacaggtcccgagggctgctaagcgtcccgccaaagcccaatctggccacctccaggtctctggtccccacacccatccaggtttctcgggtgttgggaagaaaggagggggcacaagaaacaggacatctcagcctcctgaagcccacaccccctccaagccgttccccacacagtaggcaaattctgtcaagttcctccaggcttaaggccccagtgggttcacctgcaaggtcttcatgaccaagttcttcctgcccacgcctttcccattccatctgcctccctatcccctggctcccatccccccagtcactccggcattctagctgctcctcccacgcaacagcccaactagcctcctggccttttaatttgtgcatggaatttgccttctcagtcagatttcctttcaatatcacctgctcccaaaggctttccctgactaccctgactaaagcaaactttttcacttcacacactctatcctcccacccgtttaaattattgtcttcaaggcactcaacaccgagatgatcttgctttacttatgtgttggctgttcaggttcccccacccccagcaggaggtaagtaccctgccagaagaactttgtacccaaatgtccacagctgcacctcagagcctagaacagcacctggtccctcgtcagctctcataaagtgtgtgtataatatattcaaggttagagtggacaaaccagggctgaaaggacctcctcaacagtgccaggatttgcaggagaggacatggcaggccgtgaactgaaagaccagttcccaaagtgactagggtggagcagctggcactctcccaccaatcttttaggggccagggctgcaggatgctccacctcttttttcttttattctttttttttttgagacgagtctcactctgtcacccaggctggaatgcagtggcgggatctcagctgactgcaagctccacctcctgggttcacgccattctcctgcctcagcctcccaagaagctgggactacaggtgcacaccacctcgcctggctaattttttgtgtttttagtagagacggggtttcaccgtgttagccaggatggtctcgatctcctgacctcgtgatccacccacctcggcctcccaaagtgctgggataacaggtgtgagccaccgtgtgtggccgggatgctccatctcttatgtctcctgcacccagctcccatcccccttcccaccactctgcactccctgcccctgtcctctattgcaacccttaggaccccttggttccctgctgtgtctcctgagccccgcagcactttctcacactcttctccactcccagccctgctgccacccctggcccttgccactggctacctggggctgcaaaggtacaagtagcaggatctggaggtgatagctccaggggcagaggggcaggtttgcacccaagtacctgtatagccagatctcatctaccaggagccaggtagaagatctttcgtggtctcactaggtgcaattgagaaggactggatagtggcacccgcctaaaagggattttaatgtaaggggtgggctaggaatctcctgccaactccctggtgtggttaggtggttggagggggagaggataggtgactctggtgacatacaggcttcgtttcacatcccacttctgacgtgtattttgtttggctatccttgggcagtagtttcacctccctgagacttagtttcctcatctgtaaaacaggaaccatatccttctcccaggtttgctgtgatgataaagtgagataatatagggtcttagggggctcctaggttgatcagatgcattaaaggtggggaaaacagtgtaacacagccctcttactcctacatacttagatggaataaaacagtatcaaggaaaagaaaggaagctctgtgtccagctgcacaaataatgaagtagaatctactgcctgcctgtgcctctaatctcctgtgcctggatgctaaagcagaactcatttcctgctaggtgctctccctgtgatgtaggtgagcattgttggagcctcacatgggaccaggatgcacaggggagcatctccccacgcacccgttctcccctcatcactctctaccccagctttctctcctacatacatcaaggtctttgagagccttgctccacaaagtgtggttgaagaccagcagcagtagcatcccctgggaacttgttagaaatgcagaacaggccgggtgcagtggctcacgcctgtaatcccagaactttgggaggccgaggcgggcggatcacctgaggtcaggagttcaagaccaaatacaaatacaaaacttacctggccaacacggtgaaaccccatctctactacaaatacaaaacttagctgggtgtggtggtgcacgcctgtaatcccagctattcaggaggctgaggcaggagaatcgcttgaacccaagaagcggaggttgcagtgagctgggatggtgtcatgcactccagcctaggtgaaagagctagactctgtcaaaaaaaaaaaaccaaaaaaaaaaccaaaaaacaaaaaacaaacaaacaaaaaaaacacctctgccccagacctattgaatcagaatatgcatttttttttttttttttttttgacagagtctcactctgtctcccaggctggagtgcagtggcccgatctcagctcactaaactgccacctcccgggttcaagcaattctcctgcctcagtctcctgagtagctgggactacaggcgtccaccaccacacccagctaatttttgtgtttttagtagagacagggtttcaccatattggccaggctggtctcgaactcttgaccagaatctgcatttttaacaagacctccagaggattcaaccccaggagatacatatgcgtgttgaagactgagttttatccctggtatttgatgctgtcacgggtaattttatcttaagccacaagcgtatatccacatgacgttagggaattggtctttcatttaccctgggaaggaatattcctgatctccacagcatgactatctgttgatttgttctttgtttgtaactaagtcatttttatcagaatagtacaaaatatagttttggttttgtttttttagagacactgtcctgctctgttgcctatgttggggaaaacagccccataacgcctagcggttaccccgagtccggcggagacaaaggagttagaaagagacagaataagcgtttaaaaggcgggtccaggggaccggagcgtcggaggcttgctcacggcccagagttctcaggctccgcccaatttattggtttacaagctctttgttcttagggcagatgggaggaggaggaagggatgagggaaaggattaatcagtgaaggagaactggagagtcattctgtaagatgtatagcagtggcggtttctgtgaatttccttgagcaaagaggagtgtcaaactacttaagatctttaactggccgggcgcggtggctcacgcctgtaatcccagcactttgggaggctgaggtgggtggatcgcttgaggtcaggagttcgagaccactctggccaacgtggtgaaaccccgtctctactaaaaatacaaaaaattagccgggcgtggtggcgggcgcctgtcgtcccagctactcgggaggctgaggcgggagaatggcgtgaacccgggaggcggagcttgcagtgagccgagatcgagccaccgcactccagcctgggcgacagagcgagactccgtctcaaacaaaaacaaaacaaaacaaatctttaacttatcgggactgaaacgggtgggagtgggtttcaggaggagccaagatgtttgattatactccactgcttcaagggagtgttatatgcctgagcaacctgtggaatgccgctgaggggttctgctctcgggcgtaaagacatgaaggcaataaggagacttttctcctcagaggccgcgcatggcttcccatgggtgtctcacacagggaagactaactcagctggcaccccagaaactctctttcccacagcctaggctggagtgcaatagtgtaatcacagctcactgcagtctggaactcctgggttcaagcgatcctcccacctcagcctcccaagtatctgggacgtgtcaccacgctcagctaatttctacctttttttttttttttttttttttttttttgagactaaatctcactctgtcaccaggctggagtgctgtggtgcgatctcggctcactgcaacctccgcctctgggttcaagcgattctcctgcctcagcctcccaagtagctgggattacaggcgtgtgccaccacacccggctaattttttgtatttttagtagagatggagtttcaccttgttagccaggacggtctcaatctcctgaccttgtgatctgcccgccttgggcctcccaaagtgctgggattacaggtgtgagccactgcacccggccacatttttttttttttaagagacaagttttcgctatgtcatccaggctacaacatagtttctatttttatttcaattgctttaggggtaccagcggtttttggttacaggggagaactgtatagtggtgaagtttgaaatcttagagcgcccatcacccgagtagtgtacattgtatgcaacatgcagttttttttatctgtcaccccccgcttaccctcctccttctgagtctccaatgtccattataccattctgtatgcctttgcatacccacagcttagtttccatttatttatttttatttaatttattttttttgagacagagtctcgctctgttgcccaggctggaatgcagtggcgtgaactcggctcactgcaagctccgactcctgggttcatgccattctcctgcctcagcctcccgagtagctgggactacaggtgccgccaccacgcccagctaattttttgtgtttttagtagagacgggtttcaccgtgttagtcaggatggtctcgatctcctgacctcgtgatccacccgcctcagcctcccaaagtgttgggattacaggagtgagccaccgtgtcccgccagcttccatttataagtgagaacatatggtatttggctttccattccttagttacttcacttagaataatgacctccagttccatccaaaagacattatttcactcttttttatggctgagtagtattccatggtgtgtgtgtgtgtgtgtgtgtgtgtgtgtgtgtgtgtgtgcatgcacacacatagcacattccctctattcactcatcagttgatgggcacttagattggttccatatctttgcaattgtgaactgtgctgcaataaactatgtatgcaggtgtctttttgatataataacttattttcctttgggtagatatccagtagtgaggttgctgaattgaatgtagatctctgtttagttatctgataaatcttcatacagttttccatagaggtccagtctacaatatagttttaaaggtaaatcacatttaggcttgtaatggaagagtcggctctatgcctttcccaagccaagcacttttagttctttttgttatttctcctgtctttatctctatgcttagatttcttgctatttccttttttttcttttttcttttcttttctccttcttcttcttttttttaaaagacaatttcttgctctgctgtccaggctggagtgcagtgagctgaggctcactgcaacctctgcctcccaggctcaagtgatcctcgtgcctcagccactcaagtagctgggattacaggtgcctgccaccatgctcagttaatttttgtatttttagtagagatggggttttaccatgttggccaggctggtcttgaactcctggcctcaagtgatctgcccacctcagcctcccaaagttctgggattacaggtgtgagtcactgtgcatttcttgatttttctttatgtagttgttatctgtggatttctgctatgaaattaaggcgttagtttttctaccaccctcccctcaatacacacatccagatacacaaacatacactccctccttccattttcagtaaagctcaattgctatttggaatcaatattcagtgcttttgttatgactatgtaaatattatgtttaaatttgtgctacctggagttagtaattactttgtttttatcatttgcttagttttctaggcatcactcattaattcaatcgcaaagcttccagtgtaactgaacatttactcaatatagccaaacatagctaataatcagttgatttcattttcctctggagacatcgctcctagagcacatcttctgatttcaggctgggttggttactttctttacccgggggtatagttgacatcccaggcctttctcatcgtcccttttctgtgcttaatctcatttattgaatgccatattgctctctttcttagtttaattctttgttttgctgaagcacatcctccagtagctttctaagaaagggtatatgcaaggtcaaatttctgagaccttgtatgattgaaatgtcattattctaccctcccaattaataatcattcagacctatacatttctatattagacatcattttgagggcatttattgtcttctagctaccagtattggtgtttagaagtgtgataccattcttgcttcagatccgatgtatgtgatgtttttatttggtggaagctcttaggattgtctttttatccctgctaatgtgaatttcattatatgccttgatgttagctgccctgtttcatgtattgggctgtgaattggtggaaagttatggtctagagaatcatgtccttcaattctgaagagtctcttgatttttaaaaatctttcccttctggtcgggcagggtggctcacacctgtaatcccagcactttgggaggctgaggcggtcacatcacctgaggtcaggagtttgagaccagcctggccgacatggtgaaaccctgtctctactaaaaatacaaaaattagctgggtgtggtggtgggtgcctgtaatctcagttacttgggaggctgaagcaggagaatcacttaaacccgggaggcggaggttgcagtgagccaagatggcgccattgcactccagcctgggcaacaagagcgaaactctgtctcaaaaaaaaaaaaaaaaaaaaatagaaagaaaggttttcctcctcagagcactccctcaataaaccatgtgtacaagtatccccatctcaggctctacttttagaaattatgacccattgatatagtctgaatatttgtccaaatctcaagttgaaatctcaaatcccaatgttggaggtagggcctgatgggaggtgtttgggtcatgggggtggatatttcatggcttggtgctgtccttgaaatagtgagtgagttctctcaagatctggttgtttaagtgtgtggcaactcccctaaccaccactctctcccttgctcttcaccctttgccttctgccatgattggaagtttcctgaggtctccccaaaagcagatgctggtaccctacttcctgtacagcctgcaaaactgcaagccaattaagcctcttttcttataaattacccagtctcaggtatttcttcatagcaacgcaagaatggcctaatacacccaccatctggtgcagtgcctggcacataggaagcacttaaataaatgattgttgaatacaaaataaactctgagaaaatcacagacagaactctcctatacatgcatacagagcacctggtgcatagtaaatctttaaggagctttagactctccgatccccccatgccctgcaatatggagtagcctcatcttggtggactcatcaggacatgctccccaggtctgtatgtccaggaatgcaattgtgtggatgcatccaggattgatcaggctcagggaattgccaatcttaaaccttaatgttcctttacaagcacaattggaacttaatgccaaaaaaaaaaaaattctgggatcttctgttataccctatcccattacggacaaatctactcgtaaaacccagctgctggataagcaagaacagccagaccaagggcgatcagtgcatggtcattagggctggtgaccctcgtctctgggcaaggcctgctggaggtggatatgcagcctgattcttgttctgtctcctcctctcctaggggctgtatggccactgtctcccattttgccacccctaccagttttccttcaaagtatgatatgtgggcaaagattaagttctcttaattatgacacatttccgctcttgcctctcaagtcactaaactgagatgtgctggacccctatggccaccacccatttacagatgatcagtgtaatctgatatactgataatccaagtgactaagcccttcattatatgttcattttccttaactccattctcagactgtaaccttaacctctaataagggggttactaggtcatagtcctcttaagttcatgtcctctacctcattactggaaccccagtatgcataacaccccctataaactgtagtgcttagaatacctgaacagccccctcctctctcacccccatttagcaggttatgcggaagcccagccccagaagcctcaggcagtcccctggcagagcccatctctgcaatctggaacttcaggcctgaaaaatcccctagaaggacccacagggaagacagctggggacagagatattgaatgacttcgccctggacctgcagctctgcaaactcacaggaagaagaaagcagacctcgctcccttggacagatgcccaagtagtaatggggttagaatgccttcctgacaactcagatccccaagggagggccctagggcagagaatcagcaaaggcaagaggatgagtcttagttctcagaaatccctgacttcccagctaagccccacctaggccaccagctgcttatgaggtcagagcagcagcagcagcagccccctccctaccccacggccccacgtggtaacaggtcacaatgccccgggtgcccactcccagaatgctgaccaaagtgggaggaggtgaggagggtttgctgggtgggtatgggggagggggagactctgcaggagcctaattccccactctgagctcacccttctgtctgcccgggccctaccccttcccctactctcacccttataatccttttcagcactaggtcttcccgtcacctccacctctctccatgacccggctctgcttacccagacccgaagcacgtgaggatccgatcccagttcctccaaggggcctgggtgctggggaggggtcaggtagtccagtgcgtccacctgtatccacctggggccctagctgggcccagctcctggacagtgtcctatggctgggggcactaggactgacaatccaggcagtcttttccaccactggcccagccctgctgctgcttctggtcagcttcctcacctttgacctgctccataggtaagtgggcagcagcctggcaggtgggcattgtaggcgggcgggccagtggacaacttccctaagcccagtcaccaccctctctctccacaggcccgcaggtcacactctgccacagcgcaaacttctcaccaggggccagagtcagggggccggtgaaggtcctggacagcaggaggctctactcctgcaaatgggtacagtctcaggacaacttagcctccaggacgcactgctgctgctgctcatggggctgggcccgctcctgagagcctgtggcatgcccttgaccctgcttggcctggctttctgcctccatccttgggcctgagagcccctccccacaactcagtgtccttcaaatatacaatgaccacccttcttcatcaggcccccttttctccttcctggctgggcaggtgggatgatacccctttcttcccagcctgaacctcacagtcctataatataggtatcagatacctggatctgagtctttgggcagcaagagaaggtaggatactagccagggagcccaaggaagaatgtggcagccacctcagagcctgtggattgggggcagccactctggcctcctctgtggctctagagaatgaaggtccagacagaaagacttgcgagagagcagtttggaaaggggtggatatcagccagcagggaaagcaggaaagggacagggatccagggagggcttcccatgagaaagcatgagaaactacatctgcggggctccgaggctcccctgccagcctggagggtccgtgcagagggacttgggtgggcctcacaccctacagtgactcctctcttggctggaccccaccccagcccgggtcacaaaggggctcctctggggagggtgggggtagatgagagtggggacttggatctgcctgccaggccgtcctgggcgctgcaggaagcaacatgacttaggtaactgcccagaggtaagtcccagtccctaattctgtagccccaccccacgcacactggtgccctcctgacccctgcaccccctctctgccccccccccccaaggtcccaggcatcttcaagaccctggccctctccccaggtgcaccagacatgatgcagcagccgcgagtggagacagataccatcggggctggcgaggggccacagcaggcagtgccctggtcagcctgggtcacgaggcatggctgggtgcgctggtgggtgagccacatgcccccgagctggatccagtggtggagcacctcgaactggcggcaaccgctgcagcgcctgctgtggggtctggaggggatactctacctgctgctggcactgatgttgtgccatgcactcttcaccactggctcccacctgctgagctccttgtggcctgtcgtggccgcggtgtggcgccacctgctaccggctctcctgctgctggtgctcagtgctctgcctgccctcctcttcacggcctccttcctgctgctcttctccacactgctgagccttgtgggcctcctcacctccatgactcacccaggcgacactcaggatttggatcaatagaagggcaaccccatcccactgcctgtgtctgttgagccctggcctagggcctgagaccccacggggagagggagggcaatgggatcagggctccctgccttggcagggcccagacccctagtccctaacaggtagactggcctgaccccggactccttcctcaagtcaatgctgcaggttcctggtgtgaggggctgggggctttgagaagagggggcaagacagatggcttagccattggtgaaaattgcttagccaggggcagagcttgaccaagccactgatagcgcccatatggatgtgatgatacccgtggggcccccttggcaactgacagcatctttttctcatagccactcagctgtctcagcttcagactcactgagaacttctacctgggtaccactggccttgccattcctcccaccaatcccctctttccacttccaggagaaccacagactctagagagggtcccagtgacaaaaatctatcagggagaaggctggccagaagccccaggagacctcaactcactcgctctccaaaccttgcagcccacgcatcctcctccctagacttcctacttcctgcctcagtctgcatccccaagtctgagaaatgggccaactggggtcagacagcacctactcactctctaagaatcccaaggtctgttatggaaaaatgatcaagaaatcccatttcacccacttacacaatgtgtggccttggccaattaattcatttgagcctcaatgttacgtgggccacttctgtcatggggttgttgtgagtcaaagacaatatctatttgtgaagcattttgtagaagccaaaaacctgtaagatgttgttttgagctctaagaactttctgtaggcgcataagatcttttgaccccaaagactgttgaaggaacaggaagcttctctgggctttcagatcaactctctgtcctggatagaattttggccctaaaatggtaaacaagaggtcggttaagtgtgtacaagatgtaaaaggtcatgtgccatgaaatctcaaaatgtgcagatgttgaactattttgattatgaaatgcttgggcctggggctgggtgccagatgcttgcacagctgtgtgagtggggacagcacagccccagggtttccaaaactgacccagcaagccgctcaggcaccagaagggctttggaaagggcaatcctttgatgccctgaatgctggccgttcgttcacttgctggcccctccaacaaaacattgagtgatcggtaattaccaagtaaggtacatgatagacaactttatccacacctgacccccacccaagccctggccatccccaactcctgcccagttctgatccctgctttatgtataaccctaaaatccttgctcttgaagccccagacccaaggtccccctcttttgtcccataaatactcagggccttggggctagcccctagaaccctggttcatttttgccttagacttttgcaaccctccatgccacggattagatgccttcagcatcagtgccaaaacccaaggtccagtccttcctttctgtttctttgtatttctcccgcattatggcatggtagtgagagcgaggtaggacatggggctgatgtggtctcatggttggatgggttttggtgcatgagctgaggctgggcgtgagtcccagcactctcacttactaactccatgcccttagtggaaatcgctaaaccttcctcaacttcactttcctcatgggtaaaactaaggcaagaacccctgtcttagggctctggcatgtgagtgaaggacctgggaccactcctagcaccacaaattatagctatgctgtgaccatcccattttagagatgagaagtcaggcccaggatagccagttgccagtggcaaggccaggccatctgagtcctaccaggctactcaagggaaggtgaagggggcaaaggaaacacaaacaacctaactaactgaagaccccaaggcttctcaagagctcctatcagagctaaagcccaggcctagggaagtcatgagtcaagccaatctagatggcaagctgaggattcaggatcccatgtggtgagggcagagaccaggctgcctggcctagatccatcattgacttggccatgcattgctagccagggacgttgctctggagccttgggtccattccaatgaagggagagaggagtttggggccctgaccagatgctctagtggatgggatgtgggcagcagcaaggagaagaccttcttcctttccccacagactatataccttttaccctcctgcccagctggtatggggtaaggaggtgcacccagactagagagctgatgggcaatactcatcaaattagatc

SEQ ID NO: 1720 - DNA, 3459 bp, Homo Sapiens
ggccggcggcggcggcggcggctccgctccgcactgcccggcgccgcctcgccatggacgcgcgcgggggcggcgggcggcccggggagagcccgggcgcgacccccgcgccggggccgccgccgccgccgccgcccgcgcccccccaacagcagccgccgccgccgccgccgcccgcgccccccccgggccccgggcccgcgcccccccagcacccgccccgggccgaggcgttgcccccggaggcggcggatgagggcggcccgcggggccggctccgcagccgcgacagctcgtgcggccgccccggcaccccgggcgcggcgagcacggccaagggcagcccgaacggcgagtgcgggcgcggcgagccgcagtgcagccccgcggggcccgagggcccggcgcgggggcccaaggtgtcgttctcgtgccgcggggcggcctcggggcccgcgccggggccggggccggcggaggaggcgggcagcgaggaggcgggcccggcgggggagccgcgcggcagccaggccagcttcatgcagcgccagttcggcgcgctcctgcagccgggcgtcaacaagttctcgctgcggatgttcggcagccagaaggccgtggagcgcgagcaggagcgcgtcaagtcggcgggggcctggatcatccacccgtacagcgacttcaggttctactgggacttcaccatgctgctgttcatggtgggaaacctcatcatcatcccagtgggcatcaccttcttcaaggatgagaccactgccccgtggatcgtgttcaacgtggtctcggacaccttcttcctcatggacctggtgttgaacttccgcaccggcattgtgatcgaggacaacacggagatcatcctggaccccgagaagatcaagaagaagtatctgcgcacgtggttcgtggtggacttcgtgtcctccatccccgtggactacatcttccttattgtggagaagggcattgactccgaggtctacaagacggcacgcgccctgcgcatcgtgcgcttcaccaagatcctcagcctcctgcggctgctgcgcctctcacgcctgatccgctacatccatcagtgggaggagatcttccacatgacctatgacctggccagcgcggtgatgaggatctgcaatctcatcagcatgatgctgctgctctgccactgggacggctgcctgcagttcctggtgcctatgctgcaggacttcccgcgcaactgctgggtgtccatcaatggcatggtgaaccactcgtggagtgaactgtactccttcgcactcttcaaggccatgagccacatgctgtgcatcgggtacggccggcaggcgcccgagagcatgacggacatctggctgaccatgctcagcatgattgtgggtgccacctgctacgccatgttcatcggccacgccactgccctcatccagtcgctggactcctcgcggcgccagtaccaggagaagtacaagcaggtggagcagtacatgtccttccacaagctgccagctgacttccgccagaagatccacgactactatgagcaccgttaccagggcaagatgtttgacgaggacagcatcctgggcgagctcaacgggcccctgcgggaggagatcgtcaacttcaactgccggaagctggtggcctccatgccgctgttcgccaacgccgaccccaacttcgtcacggccatgctgaccaagctcaagttcgaggtcttccagccgggtgactacatcatccgcgaaggcaccatcgggaagaagatgtacttcatccagcacggcgtggtcagcgtgctcactaagggcaacaaggagatgaagctgtccgatggctcctacttcggggagatctgcctgctcacccggggccgccgcacggcgagcgtgcgggccgacacctactgccgcctctattcgctgagcgtggacaacttcaacgaggtgctggaggagtaccccatgatgcggcgcgccttcgagacggtggccatcgaccgcctggaccgcatcggcaagaagaattccatcctcctgcacaaggtgcagcatgacctcaactcgggcgtattcaacaaccaggagaacgccatcatccaggagatcgtcaagtacgaccgcgagatggtgcagcaggccgagctgggtcagcgcgtgggcctcttcccgccgccgccgccgccgccgcaggtcacctcggccatcgccacgctgcagcaggcggcggccatgagcttctgcccgcaggtggcgcggccgctcgtggggccgctggcgctcggctcgccgcgcctcgtgcgccgcccgcccccggggcccgcacctgccgccgcctcacccgggcccccgccccccgccagccccccgggcgcgcccgccagcccccgggcaccgcggacctcgccctacggcggcctgcccgccgccccccttgctgggcccgccctgcccgcgcgccgcctgagccgcgcgtcgcgcccactgtccgcctcgcagccctcgctgcctcacggcgcccccggccccgcggcctccacacgcccggccagcagctccacaccgcgcttgaggcccacgcccgctgcccgggccgccgcgcccagcccggaccgcagggactcggcctcacccggcgccgccggcggcctggacccccaggactccgcgcgctcgcgcctctcgtccaacttgtgaccctcgccgaccgccccgcgggcccaggcgggccaggggcggggccgtcatccagaccaaagccatgccattgcgctgccccggccgccagtccgcccagaagccatagacgagacgtaggtagccgtagttggacggacgggcagggccggcggggcagccccctccgcgcccccggccgtcccccctcatcgccccgcgcccacccccatcgcccctgcccccggcggcggcctcgcgtgcgagggggctcccttcacctcggtgcctcagttcccccagctgtaagacagggacggggcggcccagtggctgagaggagccggctgtggagccccgcccgccccccaccctctaggtggcccccgtccgaggaggatcgttttctaagtgcaatacttggcccgccggcttcccgctgcccccatcgcgctcacgcaataaccggcccggcccccgtccgcgcgcgtcccccggtgacctcggggagcagcaccccgcctccctccagcactggcaccgaggggcaggcctggctgcgcagggcgcgggggggaggctggggtcccgccgccgtgatgaatgtactgacgagccgaggcagcagtgcccccaccgtggccccccacgccccattaacccccacacccccattccgcgcaataaacgacagcattggcgccaaaaaaaaaaaaaaaaaaaaaaaaaaaaaaaaaaaaaaaaaaaaaaaaaaaaa

SEQ ID NO: 1721 - DNA, 3550 bp, Homo Sapiens
cgcctccgcccctcgctcgctcgctccttcccgccctccccgcagcgccggccgagccggcttcccctcagtctctcatgaatattgagcggcccctgttgtatttcccgagctccattgcggaagctgaggctcgccatattgtgcggcggcgccggcgtccgcggcagctgataccagagtcttgctccggccgcggccagcggagccctgggctggggcaggagccgcaatgtctcaggctgtgcagacaaacggaactcaaccattaagcaaaacatgggaactcagtttatatgagttacaacgaacacctcaggaggcaataacagatggcttagaaattgtggtttcacctcgaagtctacacagtgaattaatgtgcccaatttgtttggatatgttgaagaacaccatgactacaaaggagtgtttacatcgtttttgtgcagactgcatcatcacagcccttagaagtggcaacaaagaatgtcctacctgtcggaaaaaactagtttccaaaagatcactaaggccagacccaaactttgatgcactcatcagcaaaatttatccaagtcgtgatgagtatgaagctcatcaagagagagtattagccaggatcaacaagcacaataatcagcaagcactcagtcacagcattgaggaaggactgaagatacaggccatgaacagactgcagcgaggcaagaaacaacagattgaaaatggtagtggagcagaagataatggtgacagttcacactgcagtaatgcatccacacatagcaatcaggaagcaggccctagtaacaaacggaccaaaacatctgatgattctgggctagagcttgataataacaatgcagcaatggcaattgatccagtaatggatggtgctagtgaaattgaattagtattcaggcctcatcccacacttatggaaaaagatgacagtgcacagacgagatacataaagacttctggtaacgccactgttgatcacttatccaagtatctggctgtgaggttagctttagaagaacttcgaagcaaaggtgaatcaaaccagatgaaccttgatacagccagtgagaagcagtataccatttatatagcaacagccagtggccagttcactgtattaaatggctctttttctttggaattggtcagtgagaaatactggaaagtgaacaaacccatggaactttattacgcacctacaaaggagcacaaatgagcctttaaaaaccaattctgagactgaacttttttatagcctatttctttaatattaaagatgtactggcattacttttatggacagatcttggatatgttgttcaattttctttctgagccagactagtttacgctattcaaatcttttcccctttatttaagatttcctttttggaagggactgcaattattcagtatttttttctttcctttaaaaaaatatatctgaagtttcttgtgtttttttttttccccacaaagtgtgtttccacttggagcaccattttgacccaggaatttttcatagtttctgtattcttataagattcagttggctgtccttttcctgctcccctcaaaagatttttagtcatacagaatgttaaatattatgtattctgactttttttttcccccggagtcttgtatatttatagttttctatataaactgtagtatcttcatgaagacccaaggctcaaatttactgtccttaaaaacaattctcataggattattcttttcatggtattttcttccataatatctcattttaaaaagaagttctttatgaacttagtgtccattgtcatgcaatgtttttttttttccattctttttccctgtaattttggaatttctggtcctgggaagaatcaaacaaaatcttaagttctatgagaacttggttcattgacatattctgctgaagaaagaaaaattaaattggtagtaaaatatagtcttcaagtatacgtttgagagtgcttttttttgtattagttctgctgtcacttcatttcctgtattatatgtgatgtttttccccattaaaataccagagataatggagatattttgcactttagccttgatgaaaagtacaagatatgttcaaagcttccctaatttttttcttatttgtagccacataagtttcaagaataacatggcacacagaacaatggaaaaaagtttgtttccattggaaaattatatcattttgggttgccacatcagtttataaatttggcgctcttttaattacactctgtagaaggttaatagagcttgagccctgctttaatatgtagtgaaagataattctgtagaaaaacgtcagccagtagggtaaagtcattctactgttcttaatttttatattgaggaacaatattgggtgtttgggagccagaaagctttgttgacagatcagaaataagattgacttgggtgttatatttcatctctctccagactctaggtatatttccaactttatatatcacagtatttaaaaagacatgtttgcattgagaaattaaccctaaagggttttcaatagggtgtagacctccagtacctttgtaactaaagtctgtctagtcattgtaaatatttatctgtcagttttgacagattggggccagcttgatgttttaaatcttcagcccggtatgaaaacttaaaggtatatattcaattttttaccattttatggaaaatatttaaaatctgtttttacagggttttttttttttttttttttttgtaatctgtgccatgaaatttgaaaaccaccaaaaatcaagggaacttttatatattcaattccttttctggtgtaatgttaaagttgtatagattattaatgcatgcccactgaatataaccctggttttgtgataaaactgcttagattttgttgatgacattagattagtagttgcattaaataactaaattcccattgtgattaattgaaattttgtctttaagcagagagttatttgtgactataagctttgtgcttagagaatgtatgtgtttttatctgtcagtatgggaggatataaactgcatcattagtgaaattattggttgtgtaatcctttgtgaaatataattctaggtatttgatagggtattgagtgtattttgtgtgtgtgtggatgtgtgttttggggtacggggagaggcgatgctattggccatcactaccaaccagggtttcaaaaagtattacctaagtaatttcttttatcactatctcaactgaggaagaaaaggctcaccacaagtggtgtgaaggctttgggtacttagttctaaatttttttatggtaacatatacatagccacatttacagttttaaccattttaaggcatgtaattcagtggggttaggtacattcacaatgttgtgtaatgatcaccgctgtctacttgtaaaactttttcatcaccccaaacagaaactctgtgtgcaattaaagtaatgcatttctcttcttcttaacccct

SEQ ID NO: 1722 - DNA, 501 bp, Homo Sapiens
ggggccgggcggccgtcgccccctgctgctcccgccgccgcccggacccgcgccccgccggggcagcggtggtgagagccccgactccccggacgccgcccgccgtgccatggggttcccggccgcggcgctgctctgcgcgctgtgctgcggcctcctggccccggctgcccgcgccggctactccgaggagcgctgcagctggaggggcagcggcctcacccaggagcccggcagcgtggggcagctggccctggcctgtgcggagggcgcggttgagtggctgtacccggctggggcgctgcgcctgaccctgggcggccccgatcccagagcgcggcccggcatcgcctgtctgcggccggtgcggcccttcgcgggcgcccaggtcttcgcggagcgcgcagggggcgccctggagctgctgctggctgagggcccgggcccggcagggggccgctgcgtgcgctggggtccccgcgagcgcccggccctcttcct

SEQ ID NO: 1723 - DNA, 3429 bp, Homo Sapiens
acatgtccttaaccttggcacaacaaatctctaaatcgattgagacctgtctcagatacttcttggtttacaagatggaggctgaaattaaagagaaagatcctcactcaactcacagaggagcagaatgggaagaggacttagtgagaattccctgaacacaggagaaaaccgaagcccagagagtggatggccaagtccaaggtcacacagccaagtgcatccgagcagcgcaggatccaggtttcctgccccagtgctctttctgcagcccatgccacctgttttcatgctatctcagttcaccttccagctacacacctgcaatcagaaacagaaagtctgagagtgtgtgtggagccaaagaggggacagcagtggtgaggccagtttcatgtcttgtgatttattttctccctttctttttggactttaatcttaagtggacagcaatttggaacagtgtcagcaccttgttggattgtgctgtttgggagaggtgacacagagtattttaaaagagcaggttaagaacttttcacaaggaatcaattgagagaaaataaaatagaaacagactgtcccacatttgggctgagcaccaaacacatttttttttttttttttgagactgagtcttgctctgtcactcaggctggaatgcagtggcgcgatctcggctcactgcagccttcacctcccgggttcaagtgattcttctgcctcagcctcccaagtagctgggattacaggtgcccaccaccatgccaggctaatttttgtatttttagtagagacgaggtttcaccatgttggccaggctggtcttgaactcctgaccaagtgatccacctgcttcggcctcccaaagtgctgggattacaggcacgagccaccgcacctggcctcaaacaagctttttaattgcattcagaagtgcaccaactaggcacagacctctggcatggagacagaatgggaggttcttggtgtctggcctggtcttgcagaaatcagggagttgtggggaccaggcagccactgtgcatcagataggagtttcagcagcaggcaacagaaagcctgccaatgtagctgaaataagaagggcttatttttatccctgaacagaagcttccagcactggttcatcagatcagggcactgagctggcatccccatttatacagttttcctttccttcacctttgtaagatgcctggcacagctctgagcatcaaatatctgtgccatgtgggagcacacgaggggacaagtggggaatagggtctcctctgtcctctgtccccaggctggcttctctcgtggtagaaggacccccacagcaccaggcctcataactaccctgctggtaaactgcaggtgctgtcacggcttcctgccttcgtatatgaaatgttccttggcagctggactgctgtttgtttaccgcacgcacagctctgctgcctcttggttacaccagtgagctattgctccatgacaagccacaccgaaatgtagcaagcacttattgttgcccacatgtgtcaagtcagttgagtgtttctgccaaccggggcctggcttggcccaccttggctgagcttgctctggtgctagggtcagctagacaggtcggcaggagaccagctgctctagaagagcctggacaggatgaattggttctccttccacgtgcatcttgcatccctccagccaaggatttgaacccaggtctcgtctgactccaaatgcaccaagaggatggagcccagagtgacacagaggaagaggcccctggatggatgcatggggaagatcacgggaattacaagtgacatcctgaagtatgatcacaaatgtttcaaattaagccttcctgctaagtttccagaggtgtgtggctcggacgaagtgtttccagaccctgatctactgcatgtcctgcctgttgctggttctttgcagcagtccattgaccaatgctgtctacagcttgagagcctctgcaggccagggctgctctgtgcacatcctacgttactattcaaactgcacagcagcatgaaaaacaggcccttcttttctctcatttacacatatgtgaagaagacacagcaagtgagaaaacgtgaccgaaagccacgcggacaggtggccgcagggccaaacccaacttccgtgatgtgatctggctacagtttggagcccacatatttcaatagttatccccaggcctggcacgtcaaagaggctccagaaatgtttgctgagttagaagcaaggcacaagtcatacctacattcaaggagaggggaccatgcaaaggataaactgcagagagacaacagatttgcatcccagacacattcacactgggccaagagcagctgccattgcagattcgagtcacgtccttttttccttccttctccttcttggagttacaacagaagctggggaggtgagagtgcagaaaggacgtggatgaagcagagaggcacgtgcctgtctcattcgcctctggatctgctgcatccaggactgtgccagcacaaagtgggagcccgataaatatttattgaagaaatgaaaggtgacaaaaggcagaaggagggagaccccaaaaagagttacactggaagaagagcccctccttccttcaagccaagtcatccccttgggctctcaccacttcagtttataccttgcctgtagtccagtctctccatcatcaattccatcagcacaaagacataatttaattccttctaccttaaaaaaacaaaacaaaacaaaacagctctccctctcttagggtgagatgaagtggttggcaacaggccaatgctactttcagaggcgtttgaatcagagtgactccattttgaataggggttgagtaaaataaggctgagacctactgggctgcattcccatgagcttaggcattctaagtcacaggatgagacaggaggtcagcacaagatacacgtcacaaagaccttgctgataaaacagattgtgataagaaaagccagtcaaaacccaccaaaaccaagatggcgacaaaagtgatctctggttgtcctcactgctgattattcactaattataaaattaacatgataaaagacactcccaccagcaccgtgacagtttacaaatgacatggacacatcaggaagttaccctatatgtctaaaaggggaggagccctcctttccaattgtccacccctttcctggaaaactcatgaataatccaccccttgtttagcatataatcaagaaataaccatgaaaatagccaaacccaagccctcagggctgctttgcctatggagtagccattctatattcctttactttcttaataaacttgctttcactttaaaaaaaaggaaaaaaaaaaaaaaaaaaaaaa

SEQ ID NO: 1724 - DNA, 599 bp, Homo Sapiens
  misc_feature (2)..(5): n is a, c, g, or t
  misc_feature (8)..(8): n is a, c, g, or t
  misc_feature (12)..(12): n is a, c, g, or t
  misc_feature (15)..(15): n is a, c, g, or t
  misc_feature (25)..(25): n is a, c, g, or t
  misc_feature (29)..(29): n is a, c, g, or t
  misc_feature (454)..(454): n is a, c, g, or t
  misc_feature (462)..(462): n is a, c, g, or t
  misc_feature (480)..(480): n is a, c, g, or t
  misc_feature (485)..(485): n is a, c, g, or t
  misc_feature (506)..(506): n is a, c, g, or t
  misc_feature (520)..(522): n is a, c, g, or t
  misc_feature (528)..(528): n is a, c, g, or t
  misc_feature (542)..(542): n is a, c, g, or t
  misc_feature (547)..(547): n is a, c, g, or t
  misc_feature (549)..(560): n is a, c, g, or t
  misc_feature (562)..(597): n is a, c, g, or t
  misc_feature (599)..(599): n is a, c, g, or t
cnnnnttnttanttnctgggcaggngganggggacatgttaatactggctgacagggaggtggctacaaagctcctccatttctcctggggcttgcatggtaatctgcccactagccacacagattgctttctctgtaatgccattggcgccagcctgttgtgctgaggttgacaataagagaacagacttgggaggaggaatagggcaggcaagattctggtggcttctgcgtggtcacctgtgccatctcatgccagatttcagagcagggaacatttcagaggtggagaagtggctctgtcatagagatcacagaagcacagatggttacggtgctccatgccactacccctggtcgggtggaaacatccataacataggttgtccctgtttgctctgaaggctacccagaggggatggcaatgtccacaggagcttctgacaggcctganacttaagntgagggagatgacaaganttggnaggaggagaaagaagctcaanttggccccagtggnnnttcaanttggttacccggtntttcnannnnnnnnnnnntnnnnnnnnnnnnnnnnnnnnnnnnnnnnnnnnnnnncn

SEQ ID NO: 1725 - DNA, 271 bp, Homo Sapiens
  misc_feature (239)..(239): n is a, c, g, or t
gcaacagtgagaccagcaagaatgacttctccctctccctcaagagcagccagggattcatgcacatgaagctgtcccgaaccaaggaacacaaatatgtgctgggccagaacagcccgcccttcagcagcgtccctgaaattgtgcaccactatgccagccgcaagctacccattaagggagccgaacacatgtccctgctctaccctgtggccatccggactctttagatgtgaagncagggcactgtgatagacctgtacccagccct

SEQ ID NO: 1726 - DNA, 2028 bp, Homo Sapiens
aacacaccaagatgagactggtcctaatttttcctctgcgaatatggttttctgattaactactagttatgtctatgccaaaaaaagaaacatgctcagaccacggtttttgcctccagatgaccgaactgtacgtgaaggtgagagaaaagctgccaagctgcattttagtcagttgggcaacagtgaaaattttcttttagaggtggaaaaaagctctagggagaagacaatgaaaaactgtgtaacaggtgagagctctgcatcaaaagtcagtgctaatgttgacagcaggattgaaatggaaagagtcttgctctgtcgcccagactggagtgctgtggcgcgatctcggctcactgcaacctctacctcctgggttcaagcagttctcctgcctcagcctagcgagcagctgggattacagactcaaacaaaggactttttattcccttccccaaccgggaaataaaggattccctaagtacttctgcaactcagggcaatggtacacgtgatcagaaattagacaccttcccactggggacacagagttcagacactactcgcctcgtcagtccacagtccgatccccagagaagatgactagagaagggtaccaagtatcttttttggacaataagtcttcaggttcttctccagaaaaggaattgataccaaaacctgatacttttcatcttacccatgatgcctcattgagtaaatgcctggatgtgggtgattctagccagatccatccctatcagttaccttcagatgttggtctggaaaattatgacagttgttattctcaaactctatccctgcatggaagtcttggtaaaaggcctcagagaagcaagaactatcaagagtatagcataaagccttcaaatgacataaagaccaccgcttcacattcctgtggagacttattaacttctctgtcaaaccctgactccagcactggaaggcttttgaagcttagttcagatctgtatgccacaacccatttcaacagtgaccctgctgtacttgtcaatgtagagcaacaattatctaccagcctggatgatttaacaccagcacatggttctgtcccaaacaacgctgtcctgggaaacaggacaactcctctgcggacactgctgttgtctcctgggacttcagaacacagaaagatttttaccaagaggtcactaagcccatcgaagagaggattcaaatggaaggacaatatccttgccaacctgaatctaaagcatggtttccaagatgctacaggcagcgagcctctctctagtgacctgggtagtttgcacggtttggctggaaaccacagtccccccatctctgccagaaccccccatgtggccactgtcctcagacagctcctggagcttgtggataagcactggaatggctccggctccctcctcctcaacaagaagtttctcggaaagtttgaagcaaaaactggtcagagtgctggaggaaaacctcattttgtcagaaaaaattcaacagttggaggaaggtgctgccatctcaattgtgagtgggcaacagtcacatacttatgatgatcttctgcacaaaaaccaacagctgaccatgcaggtggcttgcctgaaccaggagcttgcccagctgaaaaagctggagaagacagttgccattctccatgaaagtcagagatccctggtggtaactaatgagtatctgctgcagcagctgaataaggagccaaaaggttattccgggaaagcgctcctgcctcctgagaagggtcatcatctggggagatcatcgccctttgggaaaagcacgttgtcttcctcctcaccagtggcacatgagactggtcagtatctaatacagagcgtcttggatgctgccccagagcctggcttatagagctagcatggaactcacaccacagcttccctggtccacagaggctctcaccgccattgccaccagtatggtggtatgtactcacaaagattaagaaagaaatgtattctg

SEQ ID NO: 1727 - DNA, 2419 bp, Homo Sapiens
cgaaaggccggccttggctgcgacagcctgggtaagaggtgtaggtcggcttggttttctgctacccggagctgggcaagcgggttgggagaacagcgaagacagcgtgagcctgggccgttgcctcgaggctctcgcccggcttctcttgccgacccgccacgtttgtttggatttaatcttacagctggttgccggcgcccgcccgcccgctggcctcgcggtgtgagagggaagcacccgtgcctgtggctggtggctggcgcctggagggtccgcacacccgcccggccgcgccgctttgcccgcggcagccgcgtccctgaaccgcggagtcgtgtttgtgtttgacccgcgggcgccggtggcgcgcggccgaggccggtgtcggcggggcggggcggtcgcggcggaggcagaggaagagggagcgggagctctgcgaggccgggcgccgccatggaactgggcccgagccccgcaccgcgccgcctgctcttcgcctgcagcccccctcccgcgtcgcagcccgtcgtgaaggcgctatttggcgcttcagccgccgggggactgtcgcctgtcaccaacctgaccgtcactatggaccagctgcagggtctgggcagtgattatgagcaaccactggaggtgaagaacaacagtaatctgcagagaatgggctcctccgagtcaacagattcaggtttctgtctagattctcctgggccattggacagtaaagaaaaccttgaaaatcctatgagaagaatacattccctacctcaaaagctgttgggatgtagtccagctctgaagaggagccattctgattctcttgaccatgacatctttcagctcatcgacccagatgagaacaaggaaaatgaagcctttgagtttaagaagccagtaagacctgtatctcgtggctgcctgcactctcatggactccaggagggtaaagatctcttcacacagaggcagaactctgcccagctcggaatgctttcctcaaatgaaagagatagcagtgaaccagggaatttcattcctctttttacaccccagtcacctgtgacagccactttgtctgatgaggatgatggcttcgtggaccttctcgatggagagaatctgaagaatgaggaggagaccccctcgtgcatggcaagcctctggacagctcctctcgtcatgagaactacaaaccttgacaaccgatgcaagctgtttgactccccttccctgtgtagctccagcactcggtcagtgttgaagagaccagaacgttctcaagaggagtctccacctggaagtacaaagaggaggaagagcatgtctggggccagccccaaagagtcaactaatccagagaaggcccatgagactcttcatcagtctttatccctggcatcttcccccaaaggaaccattgagaacattttggacaatgacccaagggaccttataggagacttctccaagggttatctctttcatacagttgctgggaaacatcaggatttaaaatacatctctccagaaattatggcatctgttttgaatggcaagtttgccaacctcattaaagagtttgttatcatcgactgtcgatacccatatgaatacgagggaggccacatcaagggtgcagtgaacttgcacatggaagaagaggttgaagacttcttattgaagaagcccattgtacctactgatggcaagcgtgtcattgttgtgtttcactgcgagttttcttctgagagaggtccccgcatgtgccggtatgtgagagagagagatcgcctgggtaatgaataccccaaactccactaccctgagctgtatgtcctgaaggggggatacaaggagttctttatgaaatgccagtcttactgtgagccccctagctaccggcccatgcaccacgaggactttaaagaagacctgaagaagttccgcaccaagagccggacctgggcaggggagaagagcaagagggagatgtacagtcgtctgaagaagctctgagggcggcaggaccagccagcagcagcccaagcttccctccatccccctttaccctctttcctgcagagaaacttaagcaaaggggacagctgtgtgacatttggagagggggcctgggacttccatgccttaaacctacctcccacactcccaaggttggagcccagggcatcttgctggctacgcctcttctgtccctgttagacgtcctccgtccatatcagaactgtgccacaatgcagttctgagcaccgtgtcaagctgctctgagccacagtgggatgaaccagccggggccttatcgggctccagcatctcatgaggggagaggagacggaggggagtagagaagtttacacagaaatgctgctggccaaatagcaaagag

SEQ ID NO: 1728 - DNA, 4414 bp, Homo Sapiens
ccgcgctctctgatcagaggcgaagctcggaggtcctacaggtatggatctctggcagctgctgttgaccttggcactggcaggatcaagtgatgctttttctggaagtgaggccacagcagctatccttagcagagcaccctggagtctgcaaagtgttaatccaggcctaaagacaaattcttctaaggagcctaaattcaccaagtgccgttcacctgagcgagagactttttcatgccactggacagatgaggttcatcatggtacaaagaacctaggacccatacagctgttctataccagaaggaacactcaagaatggactcaagaatggaaagaatgccctgattatgtttctgctggggaaaacagctgttactttaattcatcgtttacctccatctggataccttattgtatcaagctaactagcaatggtggtacagtggatgaaaagtgtttctctgttgatgaaatagtgcaaccagatccacccattgccctcaactggactttactgaacgtcagtttaactgggattcatgcagatatccaagtgagatgggaagcaccacgcaatgcagatattcagaaaggatggatggttctggagtatgaacttcaatacaaagaagtaaatgaaactaaatggaaaatgatggaccctatattgacaacatcagttccagtgtactcattgaaagtggataaggaatatgaagtgcgtgtgagatccaaacaacgaaactctggaaattatggcgagttcagtgaggtgctctatgtaacacttcctcagatgagccaatttacatgtgaagaagatttctactttccatggctcttaattattatctttggaatatttgggctaacagtgatgctatttgtattcttattttctaaacagcaaaggattaaaatgctgattctgcccccagttccagttccaaagattaaaggaatcgatccagatctcctcaaggaaggaaaattagaggaggtgaacacaatcttagccattcatgatagctataaacccgaattccacagtgatgactcttgggttgaatttattgagctagatattgatgagccagatgaaaagactgaggaatcagacacagacagacttctaagcagtgaccatgagaaatcacatagtaacctaggggtgaaggatggcgactctggacgtaccagctgttgtgaacctgacattctggagactgatttcaatgccaatgacatacatgagggtacctcagaggttgctcagccacagaggttaaaaggggaagcagatctcttatgccttgaccagaagaatcaaaataactcaccttatcatgatgcttgccctgctactcagcagcccagtgttatccaagcagagaaaaacaaaccacaaccacttcctactgaaggagctgagtcaactcaccaagctgcccatattcagctaagcaatccaagttcactgtcaaacatcgacttttatgcccaggtgagcgacattacaccagcaggtagtgtggtcctttccccgggccaaaagaataaggcagggatgtcccaatgtgacatgcacccggaaatggtctcactctgccaagaaaacttccttatggacaatgcctacttctgtgaggcagatgccaaaaagtgcatccctgtggctcctcacatcaaggttgaatcacacatacagccaagcttaaaccaagaggacatttacatcaccacagaaagccttaccactgctgctgggaggcctgggacaggagaacatgttccaggttctgagatgcctgtcccagactatacctccattcatatagtacagtccccacagggcctcatactcaatgcgactgccttgcccttgcctgacaaagagtttctctcatcatgtggctatgtgagcacagaccaactgaacaaaatcatgccttagcctttctttggtttcccaagagctacgtatttaatagcaaagaattgactggggcaataacgtttaagccaaaacaatgtttaaaccttttttgggggagtgacaggatggggtatggattctaaaatgccttttcccaaaatgttgaaatatgatgttaaaaaaataagaagaatgcttaatcagatagatattcctattgtgcaatgtaaatattttaaagaattgtgtcagactgtttagtagcagtgattgtcttaatattgtgggtgttaatttttgatactaagcattgaatggctatgtttttaatgtatagtaaatcacgctttttgaaaaagcgaaaaaatcaggtggcttttgcggttcaggaaaattgaatgcaaaccatagcacaggctaattttttgttgtttcttaaataagaaacttttttatttaaaaaactaaaaactagaggtgagaaatttaaactataagcaagaaggcaaaaatagtttggatatgtaaaacatttactttgacataaagttgataaagattttttaataatttagacttcaagcatggctattttatattacactacacactgtgtactgcagttggtatgacccctctaaggagtgtagcaactacagtctaaagctggtttaatgttttggccaatgcacctaaagaaaaacaaactcgttttttacaaagcccttttatacctccccagactccttcaacaattctaaaatgattgtagtaatctgcattattggaatataattgttttatctgaatttttaaacaagtatttgttaatttagaaaactttaaagcgtttgcacagatcaacttaccaggcaccaaaagaagtaaaagcaaaaaagaaaacctttcttcaccaaatcttggttgatgccaaaaaaaaatacatgctaagagaagtagaaatcatagctggttcacactgaccaagatacttaagtgctgcaattgcacgcggagtgagttttttagtgcgtgcagatggtgagagataagatctatagcctctgcagcggaatctgttcacacccaacttggttttgctacataattatccaggaagggaataaggtacaagaagcattttgtaagttgaagcaaatcgaatgaaattaactgggtaatgaaacaaagagttcaagaaataagtttttgtttcacagcctataaccagacacatactcatttttcatgataatgaacagaacatagacagaagaaacaaggttttcagtccccacagataactgaaaattatttaaaccgctaaaagaaactttctttctcactaaatcttttataggatttatttaaaatagcaaaagaagaagtttcatcattttttacttcctctctgagtggactggcctcaaagcaagcattcagaagaaaaagaagcaacctcagtaatttagaaatcattttgcaatcccttaatatcctaaacatcattcatttttgttgttgttgttgttgttgagacagagtctcgctctgtcgccaggctagagtgcggtggcgcgatcttgactcactgcaatctccacctcccacaggttcaggcgattcccgtgcctcagcctcctgagtagctgggactacaggcacgcaccaccatgccaggctaatttttttgtattttagcagagacggggtttcaccatgttggccaggatggtctcgagtctcctgacctcgtgatccacccgactcggcctcccaaagtgctgggattacaggtgtaagccaccgtgcccagccctaaacatcattcttgagagcattgggatatctcctgaaaaggtttatgaaaaagaagaatctcatctcagtgaagaatacttctcattttttaaaaaagcttaaaactttgaagttagctttaacttaaatagtatttcccatttatcgcagaccttttttaggaagcaagcttaatggctgataattttaaattctctctcttgcaggaaggactatgaaaagctagaattgagtgtttaaagttcaacatgttatttgtaatagatgtttgatagattttctgctactttgctgctatggttttctccaagagctacataatttagtttcatataaagtatcatcagtgtagaacctaattcaattcaaagctgtgtgtttggaagactatcttactatttcacaacagcctgacaacatttctatagccaaaaatagctaaatacctcaatcagtctcagaatgtcattttggtactttggtggccacataagccattattcactagtatgactagttgtgtctggcagtttatatttaactctctttatgtctgtggattttttccttcaaagtttaataaatttattttcttggattcctgataatgtgcttctgttatcaaacaccaacataaaaatgatctaaacc

SEQ ID NO: 1729 - DNA, 400 bp, Homo Sapiens
  misc_feature (177)..(177): n is a, c, g, or t
  misc_feature (208)..(208): n is a, c, g, or t
  misc_feature (210)..(210): n is a, c, g, or t
  misc_feature (299)..(299): n is a, c, g, or t
  misc_feature (349)..(349): n is a, c, g, or t
  misc_feature (355)..(355): n is a, c, g, or t
ctctatctctgttctcaggaatccagttctcaaggttaatagaattggactatcccataattaccatttgtttgatctcgttacacaggcagcactaacaccagaataacactgatgttgccatcagcagtcacacgactgaaacatgaggactgccctgcacgtgctgctccgcancttgctgatctaacggccgcgcccgcgtctntngcttgagtcaccacggctgttacatcccgtgctctcccttctctgccttcttggtgttggttctgcgggcgactgcccatgtggccctnagccccatcctctgttcatggctcttttgccaatctttgttgtccaaagntctttnttctgtaggttccatgggaagagttcatggggaacaatgattctt

SEQ ID NO: 1730 - DNA, 562 bp, Homo Sapiens
  misc_feature (473)..(473): n is a, c, g, or t
  misc_feature (483)..(483): n is a, c, g, or t
  misc_feature (512)..(512): n is a, c, g, or t
  misc_feature (535)..(535): n is a, c, g, or t
  misc_feature (550)..(550): n is a, c, g, or t
cttggagaaggaggagggaaaaaggggctgtgggatttagtggctgggctgcaccccctgggggggcagcagagcccaatgggccagaagggccacaaagactccctttacccttgtggagggactcctgagagcagcctccatgaggccctggaccagtgcatgaccgccctggacctcttcctcaccaaccaagttctcagaagcactcagctacctcaagcccagaaccaaggaaagcatgtaccactcactgacatatgccaccatcctggagatgcaggccatgatgacctttgaccctcaggacatcctgcttgccggcaacatgatgaaggaggcacagatgctgtgtcagaggcaccggaggaagtcttctgtaacagattccttcagcagcctggtgaaccgccccacgctggggccaattcactgaagaggaaatccacgctgagggtctgctatgcaaagtncctgctgcancgagcaagcctgaccttctgcaggacgangaacatggtggagcttcatcaanagggggcaatcaaanttcggaaacagg

SEQ ID NO: 1731 - DNA, 290 bp, Homo Sapiens
  misc_feature (4)..(4): n is a, c, g, or t
  misc_feature (138)..(138): n is a, c, g, or t
  misc_feature (168)..(168): n is a, c, g, or t
  misc_feature (259)..(259): n is a, c, g, or t
gggnactcgtgggtaacttgcttttgggagccagcggtatggcgtcgggctgcaagattggcccgtccatcctcaacagcgacctggccaatttaggggccgagtgcctccggatgctagactctggggccgattatntgcacctggacgtaatggacgggcattttnttcccaacatcacctttggtcaccctgtggtagaaagccttcgaaagcagctaggccaggaccctttctttgacatgcacatgatggtgtnccaagccagaacagtgggtaaagccaattgg

SEQ ID NO: 1732 - DNA, 505 bp, Homo Sapiens
atgttagtcccggagaggcctcaagttagacctgagcaaagtgtgctattcagagaagctgagctatccctgctcccggttctactgtggtgaattggtgttttctgaggtctaggcaacaagagctcagagtagaaggagtagacattttcgggaagtgggatgctgggcatgtcatgttgctctaacaagtgattaatagcacggaaatgggaggaagatgaatgtattttaaatggatactccctatgccagtcttgggaaatgaccttcttttcttgagacggagccttgctctattgcccaagctagagtgggatggcatgatcttggctcactgcaacctctgcctcccgagttcaagcaattctcctgcctcagcctcccaagtagctgggattacaggtgcctgacaccatgcccggctaatatttctatttttcgtagagatggggtttcgcatgttggccaggatggtctcgaactcctaacctcaggtgatccg

SEQ ID NO: 1733 - DNA, 437 bp, Homo Sapiens
tctccagcccctcctccccacaacccctagtggggaggggcagctgtccatttgcccaaagtattaatgcaactgaagctgtgatatttccaacgactgtaggaggaaaaattaaggggagagaggaaaacaaaaccaaccaacccctaaaatcattttcttattgtacataacgacctcattctcctgtatatgcggaagatataaccttatatttggtaagtgtttcttgtgctattttatcacgtgacctgtttataaaaatatatattaaaaaagttgtaaaaaaaaaaaaaaaaaaaaactcgagggggggcccggtacccaattcgccctatagtgagtcgtattacaattcactggccgtcgttttacaacgtcgtgactgggaaaaccctggcgttacccaacttaatcgccttgcagcacatccccct

SEQ ID NO: 1734 - DNA, 292 bp, Homo Sapiens
  misc_feature (64)..(64): n is a, c, g, or t
tgccaatcttgtaaatagtggttttttgtttcgtttttgccctcttgatctaaaattgcttttnttttcagatggtggccagcagagatctgcaaccccaggtctgtgccactgaacatccagggccttaaacatgacttgggggacttccctgtattcttctttggttctcatgactactactgggtacaccagggcagagtgttcccttatgttgaaggagacaaaagctttgctgaagggcagactagtattaacaagaccttcaaaaaggcactggaaaaaactcaag

SEQ ID NO: 1735 - DNA, 404 bp, Homo Sapiens
ctcactaacttacccatcgagagcggcccagctaggggtcaggctggcccttaacagagaccaaggagacttggttagacgacacaaacggggctgcgggtgggggtggatgggaaagggatttcatcacgaggtttctgccctaccctttagaagagtggtagagtggtcttagtttttccagaaataagcacctacacttgaaaatactctattccctttttctctctcacttttctcccccgccccccatagtctttcgtcattcacccactgagtgtttggggtagagacttgtcccaaagatgtcttctgggtctttgggcagagccctaaggcttggagccctggttggagaggaaacagtaagactctgctggagctccctgcggtggctggaaaaa

SEQ ID NO: 1736 - DNA, 474 bp, Homo Sapiens
ctagaggatcccggtcgacggggattatggagacaagaaaagatgtatatggcctgaagtaccaggcaaaggaaagtgactttcagaagtcagccatcaattaacttctaaaagtgagggggagcagaaatatgggatctgttttatggtattttgtgccctttttctctctcctcctctttctccttcctctctgctcctctcatcaattggaaaaaaccttctactttaacattcctagaacgagtggctcctggtctgtcccggcctccgggattctgttaacactgcccagatgttacgacgtccacatctgccaaaagtttccttaaagctatattatccctgaagctatagttattcctctctcagagaagggttttagaaagatgggggagaaggaacacagggattagaggaactcagtccgtctgctgcagaagagggggaagtgtgaatggaatccccggtcga

SEQ ID NO: 1737 - DNA, 1531 bp, Homo Sapiens
agagggagacccgcggcaaccccggcaacccagggctcggcgtcgctgccaccatgacgggaagcaatatgtcggacgccttggccaacgccgtgtgccagcgctgccaggcccgcttctcccccgccgagcgcattgtcaacagcaatggggagctgtaccatgagcactgcttcgtgtgtgcccagtgcttccggcccttccccgaggggctcttctatgagtttgaaggccggaagtactgcgaacacgacttccaaatgctgtttgctccgtgctgtggatcctgcggtgagttcatcattggccgcgtcatcaaggccaagtgtgagaagccattcctggggcaccggcactatgagaagaagggcctggcctactgcgagactcactacaaccagctcttcggggacgtctgctacaactgcagccatgtgattgaaggcgatgtggtgtcggccctcaacaaggcctggtgtgtgagctgcttctcctgctccacctgcaacagcaagctcaccctgaagaacaagtttgtggagttcgacatgaagcccgtgtgtaagaggtgctacgagaagttcccgctggagctgaagaagcggctgaagaagctgtcggagctgacctcccgcaaggcccagcccaaggccacagacctcaactctgcctgaaggccctcttgcgcagctgcctctcggcccctccgccttctcccctcccgctgtccatgcttggccccctcgtccccatccacctgtgccctccgcatcttaccctccctttctctttcctcattgccttctcccttcctgttccctcatccctgccttccccatgtctctcctctccttggccgtggcttctgtctgtgaggaggcaggagctggggagtgggagcctatgaccccacgtctgacagccatgtccacctgtgcccacagcttccgcccacagacctccagggacaggagcaaattgcaccacagctccccgcctggcctggccctccccaggcggctcagtggctcatgctgtcctgtgagagcccctgccccagagcggccccactaagcgcatgtggctcctgggctacccacagccagggcagcctgctggagccacagggccagggccatgcagatggaggcctctgggagccacctccaatccctcaccactcactcaaccagtggcacagtgtccttgtgcccacactgagccagcaagtcctgctgtccacacccacaagctacctggagggacaggacccacctccatccttcggaaggccttcctggaatcccaccttggcctccgccctcggttccgccccgcccctctccccccgaccttggggcttgtgtcgagcccttgggtggggccaggaggaggtgatggcgtcagaggaggtgtggtcagaggtgacttgttcccacctccagggaggacgcttcgtcttcggccagcgcagacctggtgtttgtttgtttgttgggctcacgcctgcacaatgaaggcttgttcacac

SEQ ID NO: 1738 - DNA, 434 bp, Homo Sapiens
gcggccgcgggttcgcgagcaccgcgctccagatcgagagcggcgcgcgcccttccgtggaggacagaggggcgcggagggggcgcctgtgtcccacccgctcgcgggcgctttacggggcgtcctctgcgccattcacttgtcagcttgtcgggaagttgaaatcgcgtttgggaggtaataggagaaagagatcggggacggcaggcggagaaagtgcggtttccatagcgccggggagagggcggacccgcgagccagcggtccctgagccgggagaccgcgcgggcgtctctccagcccccgcaggagcgccgccttccttccgcaggggcgtcctctccccccaccgctgcaggagcacccccttccttcctcggaagcgtcctctcaccacaccgcttcaagagcccccccttccttccacaggggcg

SEQ ID NO: 1739 - DNA, 6372 bp, Homo Sapiens
ctgcagtgttcgcttttgctagaaagaggatgtggaggaaggaggaggtgggcaatctggcttgagttgtgctgtatcctcttccttgttagcttgccttagtctcactggagaccatttgcggatagtgcttggtccatgcccagcaggacagggctttgctgcttctgaaagtctggtgttctgtatctggggctgtgggttcctgtgtctagctgctcaggaaatcttgagaagcattccactctggggtgtaaaccagtatgagtttgaaattcaagcgtttgtacctgagttggggagagaattgcaaggcatactttctctgaaagtaacagaaccattcaggctgccatgttattaaggaatctgaactgttgatagcagttaccttgtgggtgatacaatgggaggcggcaaaaaaactacctgcataggagaccctgccctttgtcaagagctgggagcacatttcatcagagtagcaggcccacctggtgccagagggcctgcccctcctgcttctgttcctttgccttgcagtctcctggagagagcctctcttttcctgtacagcctttgggccaaaatgcccttctagcttctccaaagaagatccgagtttatttcattctatgttttaagaggtaaaaggacataacaagtgaaagaagttttgggctaaagtaggctatgtctccttatgtattactcaatactgttttgcagagaaaacatttttcaagcatgtgcttcctgaagacacctcagtctttgggccatttgatttccaatacatagggtggaagaatgtgattttggggctgaccataaactggaaatttgtgaaatggcagtgattgggcaatcttcagtttattttttcagttgaagtggaactcatttctggaatggatttaataggctgtgtctaatgtacaaactgggtgagtcctgccttagtgtgtcctgccccaccggtacgcttccaggatactcttttcccctctgtaaagtcactttcttctgatggccagtgtcactatgatgtcagtgaggtctggggatgaggacagtgtgtcctgaaattcacaggactgacgcctcaccccagtgcacgaggattcctgtggcatcaggtgctgctgtacctggtgtaggagcctaatcattgaaccattgtgttactcacattccatgtcacagaacatatcagcctcaagaaggatttggtggaggtggatttaccactggttttacaaaggaccgtgtaaagtcattgaagttgtgaaagtctattttttttcctgtaaatctattttttacagaatataagaaacatcaatgacctgatctgtccttcctcctccttcccgcttcccccaaaatcacattccagtttttattgtctttgtgtccaaagtaaactaggtgacttatttgtataaaatgttattttgccacatgagacagtaataaaagaaagattttcacagtacgtctccctcgtcctgtctcctgattgttgggcccgttgtgttgctgaggggagcaggggcgaatgggggctccaggtttctcttactttggctattatgtggcccttctgtaagtagttgaactagagtatagctggcttctagagtgattgaggaattgtactggactttaggcttaatatttttgctttatattttcccagggtgagtggctttgtaaattgaaagtttacatgcatgttttaaaggtagggtttttttttttgagatggagtttcgctcttttttcccaggctgggatgtgatggcatgatggtggctcactgcacccttcgcctcccgggttcaagtgattgtcctgcctcagcctcccaagtagctgggattacaagtgcatgccaccacgcccggctaattctgtatttttggtagagacagggtttccccatgttggccaggctggtcttgaactcctgacctcaggtgatcaacccgccttggcctcccaaagttctgggattacaggtgtgagccactgtggctggccataaaggtaggcttattaagaaatactttaactacagtaaaatttacctcaattaagagtattgatgcattttgacaaatgaatacttttattacccatcacaatcatgatataggacatttccatcgtacccactcagaaagttcctgagttccttgtgtttgcagccaggtgacttcccccacttcgcctcttgcaaccactatctgattctgtctctattggaaaacttggatacttttaaaatgaaatttgaacgttcatatttacagtcacaaattctcaagagtctggtttagatgctctgtggcacctgaagcaattattggcctttgctcacaaacacaactcacttatttctcccttttctcctgcttcttcatcgtttcttccacccagggctggttcccaggtgggatgactgaaaggtgaggaagcccttagagcatttgccaatgggagccattcatttgactttaaagtactgagaatttagaggcgttcttttaaatgcattatttaaaaagaaaggtaacacattaaggactttgctgcatcttttgattggctttcttctaggaagtagtgaccgaggtttccactttcctccaagaggaagagacagaagttttggcaaataggtcaatgctgggaacagatgcctgcctggctgagtgctgggaaagaaaggcagttggagggatgtgtgggtgcctgggagggcgtgggtggtgcccaggaggctatgggaatcagaatcacacttgcacaagagaagacccttatgggacaagtaaaatcagcatagtttcttgggcggggcaaaggtgtcctgatgaggatgctaggggtcaaatatgtggctgggttctgccccaatcgggaatgagacacagtactgaagtggaacgggggtagcatctccacccaccttcacagcctctggggaaaagaaagctttccttgcagcccaactccaggggcctaaatattgagcgccaacacaagacaggtccttgagcttctcggagcgagtcggggaagcagataatttcagatgcaaagtgccttgaataaacagaacgaaagatagagagccagagggggagaaacggcttggtgtggtcagggcaggcatccatgagacctaaacgaagagggggcattccagacaaaaggaacagtgatcacagaggccccgagtcaggaaccagctaagggtcttagagaagagctgcctcgtaaagctaagcaacaataaccagggaatggtgggcatgggccctgatagacaaggcaggtcttggctttttaagccatagaattggattttaggagggatgggcccgccgacaaagccaacaaagttttaacccgaagatcgctatcttatttatgctttaaaaagacctctctggcctttctgcgaagctctatccttagctttctcttgttagcattttgattaacgaatgtgggcacgaacagccagctgaccgaccgcgcgcgcagtcgagcgtcggttcatcgccttgggagggaccactggaggccccgccccctggccgcgagcgcacctcggccccgctcccgaggccctacgggcgtggcctctgtcccgggtcccgccccccagcactccggaacagcgcgctcgcagcgggaggtcgcgaagcctgggactgtgtctgtcgcccatggccgccgcgctgctcgcccgggcctcgggccctgcccgcagaggtgagtgcgctggggatccgtacggcggggcttcagcccgcgtctggcccagcgggcggaggtcctggcggccggctctgtcagagccgctggcaggcggagccccactccgggagcgctcacggcctttgccccagttctgctgctccttgcgccgacccagcccggcccttcaggcgtccctggttcctgcacagacccctaccccccgattgaccccagccaccagcccagttcccagttcccatatctccctcccttcatttcacccccactagaggttcagggtgcgtccttcttccggagccaggcctgggattgaaccagacccgcatctgtgaccttgggcaagacagcccctcctcagcctcggttggcccatgtgtaaaatgtccacagagaaaatcagagttgttgggaggattaaatcatagggtatgtaaagcacttcgtgcctggcgtgtaacaggtgttccacaaatgctcgttcttgctggttaatacagtacctttcccatcttacgtgtctccagttgtagcagccgtgacacatatagccacggcttcctttgcctggcctgaattacaaggggaacgctactgagaactgtgttaagcgctagttagtctttctttcgcactccgaggagcggaatactattcgcctccacttgttatagaaacggaggctcactgacgtttaaaacccttgcctaaggtcacagagctgaggtcttattactgttggtattatactgaggactgaaggatgtagtgtatggaaatgtctagtgagtgtactaagcattcagttagtatggggttttcagtggccgccatggacattttgggctgacagttctttgttgtgggggctgtcctctgccttgttggatgttcagcagggatcccggacccctatccactgggtaccaatagtattcccctgctctagttgtgacaactagaactggctccagacattgccagatgtcccttggagggcaaaatcctccctggtgagttagtgggtcactaggattcttggagacctcctgcctcctccttccactcacttctgcccttgccggcagctctctgtcctagggcctggcggcagttacacaccatctaccagtctgtggaactgcccgagacacaccagatgttgctccagacatgccgggactttgccgagaaggagttgtttcccattgcagcccaggtggataaggaacatctcttcccagcggctcaggtgagagtgcaacctcagcagcccacgatagtggtctgccctctgctactggatgaatggtggcagtgacagtcagcggcactcggactttggtagaggaaccccaaagcagggcctggaacccagaaaatgctctggaagtttcccttgtccagcctgtggccagtagccaggacttaacttctgggacaacagtaatatgtggtggatggtcagttgcttactgtgccagccactgtgctcattctaaatagtgcctttagggtgtttggcatgcactaggcactgttcttgagatgggttatctcatctgttcctcacaacggtcctgtgaggtgaaggtactattcttatttatttttttgagacggagtttcactcttgtggctcaggctggagtgcaatggtgcgacctcgcctcactgcagcctctgcctcctgagttcaagtgattctcctgcctcagcctcccaagtagctgggattataggcgtgcactgctctgccccgctacttttgtatttttagtaaagacggcgtttcaccatgttggccaggctggtctcaaactcctgaattcaggtgatctgcccacctcggcctcccaaagtgctgggattacaggtgtgagacaccacgcccggccaaaggtagtattattatataccccatggactcagacttgtgaacaagttaaataacatacccaaggtcatggagctcatcagcggcagcctgctcgacctattttcttttttatttacttatttttttttgaaatggactctcgctctgttgcccaggctggagggcagtggcgcaatctcaacgcactgcacccctctgcctcctgggttcaagcaattctcctgcctcggcccccagtagctgggattacaggcgggcaccaccacgcccagctagtttttgtactttcagtagagatggggtttctccatgttgggcaggctggtctcaaactcctgaccttaggcgatctgcccgccttggcgtcccaaagtgctgggattacaggcgtgagccaccgtgcccggcctgcttgaactgttttctcccctgagtttcccatcagcgcgctccctcccgtgccactgtgttcttccatttgcattcagtctgtctgcagctacgcgttgaagatgttactgccgtacacgctgacctaaagatgtccagcacctggtgtaaacactcagtagtagatagttgtttaattaatgatttgtgaaaagtcaaacctctccggcctcttctccttgcctgtttttttttttaattttaattttaatttattttttattttt

SEQ ID NO: 1740 - DNA, 1577 bp, Homo Sapiens
gccgttactagtggatccccgggtaccgagctcctgcgcgcctgctgttcagccaaagcctagcgcgggacctccttcaggtagccgcacattctggtcagggctctgggacccgctgccctctccgcctctccactgaactccgcctctccttctgtcacacggctccgccagccactctatcctgccgccgcgaccacatctccagcctcgattgtgcaggctcgagcccgtagaaagagggctagcagccacctgcgcttggtccacaagaagacgcgctcccagggcgcagagctggtgaccccgctccccatgccagggacgaataaacgagaaaaggggctgacccggtgtcacccagcggccgagcagccgccccttggaagctcagcaccaaaggcaggcggccagggtcctggcccctctctggaccccagtatccccagctgtaaaatagggaatgcaggaggaggacgacgtctgtggttcgttttaggtcagctgcggagtcggcctgcgggctgggagcagacctcgctccccacgcgagggcgctggcacttcagcccagcctccctggggaggtgccctggacgagacccgcgagggtgcggacacctcatcctccctggagcaggtctcccgaggcttgaagggccagggcacccaacaggtgctgagcgcgccccaccaggtcacccgggagcagggaacaccaaggaacccagagtcgggcctctttcgagccctcgcttcctctcgcctggcttcttcggcgcgaaggatgaattggggttgttgaaaattgatcaaacaacccgatctctgtcagcgcctggacacttgctgggccccagctcgcagcctgggaagataagtggcacttcctgtctcgtaatcggatttgcgcgcacgaacctcggagacgcacaggtgggaaatggggaggctggcggggaggcctcctggaggaggtggctccgagggtagacatgaggagcgccctgggatggggctgagggtggatacagaggtgggagcttgcgaaggtcgtgagctaagcatggaaggatggaatgtgttcgggtctcgagattcccgggtgatgagcccggaggggcgaaggcctataaatgtctcacgacggaagaccaaggtgtgggattggcaaagagagagcagagcttcctcactggcaggggctccccagccccgccccatacctgcgcggcggccccgcctccacccatccattggctagatccgccgcccgtcagacgagcccccggggcccgcccccagccctgagctgcgcctcttagctctggggccacagcgccagcgccactctgccaggctcccggccatcgcccgcctggtgcgccgcccgccagctctttgcccgcgcggggccgcccgcccccagccctgagctgcgcctcttagctctgggccacagcgccagcgccactctgccaggctcccggccatcgcccgcctggtgcgccgcccgccagctctttgcccgcgcggggccgcccgccgcgggctcagggcagaccatgcgcccgcca

SEQ ID NO: 1741 - DNA, 326 bp, Homo Sapiens
  misc_feature (11)..(11): n is a, c, g, or t
  misc_feature (13)..(13): n is a, c, g, or t
  misc_feature (28)..(28): n is a, c, g, or t
  misc_feature (148)..(148): n is a, c, g, or t
  misc_feature (170)..(170): n is a, c, g, or t
  misc_feature (226)..(226): n is a, c, g, or t
  misc_feature (231)..(231): n is a, c, g, or t
  misc_feature (269)..(269): n is a, c, g, or t
  misc_feature (275)..(275): n is a, c, g, or t
  misc_feature (299)..(299): n is a, c, g, or t
  misc_feature (313)..(313): n is a, c, g, or t
  misc_feature (323)..(323): n is a, c, g, or t
tttttttttancngctttgaacactcantttaatttaaaacaaggcacaagttcaaacaattcacaaaaatttctaagggaaagatgcttttgttttgaaaactctgacccttaaaaaaaagtccttgcaatttctttgcccccaggnaggtcactagggagcagaagantctaaaaatattatctagatagaaagggtccagacacctgaagttctttcctgggnttccntctcacagcagccctgaagtggggcagggcgaggaggncaaggngacagcagtctttggaggcagctngggcagatggtttncacacatggntgc

SEQ ID NO: 1742 - DNA, 350 bp, Homo Sapiens
  misc_feature (57)..(57): n is a, c, g, or t
  misc_feature (76)..(76): n is a, c, g, or t
  misc_feature (94)..(94): n is a, c, g, or t
  misc_feature (109)..(109): n is a, c, g, or t
  misc_feature (131)..(131): n is a, c, g, or t
  misc_feature (151)..(151): n is a, c, g, or t
  misc_feature (156)..(156): n is a, c, g, or t
  misc_feature (169)..(169): n is a, c, g, or t
  misc_feature (181)..(181): n is a, c, g, or t
  misc_feature (192)..(192): n is a, c, g, or t
  misc_feature (215)..(215): n is a, c, g, or t
  misc_feature (220)..(220): n is a, c, g, or t
  misc_feature (249)..(249): n is a, c, g, or t
  misc_feature (258)..(258): n is a, c, g, or t
  misc_feature (268)..(268): n is a, c, g, or t
  misc_feature (286)..(286): n is a, c, g, or t
  misc_feature (288)..(288): n is a, c, g, or t
  misc_feature (318)..(318): n is a, c, g, or t
  misc_feature (320)..(320): n is a, c, g, or t
ttttttttttctttttttttttttttttttttttttggaccaatcagatttattcgnaaagcaaatccaaaaaaancccatcataattttggancttaaaaaaaaagtntttcgtacaagatggcaaagcntttcacgtacagtgcgtttntcganaaatcccaggggnttcacttcccantttactctganccaaaaaggccagttgccaaggnaactntgacaccatgtgactggggccggggcgtntctggggtnttggggcatntctgcaggcacacacgtntnttcgcagacacgttgggtcctgcctcccantntgggctggcccagttttccatccaagggtt

SEQ ID NO: 1743 - DNA, 496 bp, Homo Sapiens
cccttaacgccctccttccctgtttctggcaaacccagtggtgtgaaggcaatgagtcaccagcaagaaacacatgcctttccccgtagcagggggctcccgaagcaccctgccggccctgaggctcccaatagagccaagaggaggaggaggaggcagggggagggagcgtggtcttcaggaaggtggtgaacactgggagtcacagatcagcacgctacacacacccacactcacgtatgtgcacaccatacacacagcacgcacacacacaccccgagctctaggccctacgtctaacacacagcgaagacacagcaaaaggctacaacgagcactagcgcgcccacacctagcaagcacacagccccagctcagcccctcccgctggggcctggcccagccacacgctacaaaattaaaaatatatcaaatatacaatgaaaatagatctgtacagcactgaggatgaaaatagtccaccagccacagtata

SEQ ID NO: 1744 - DNA, 3021 bp, Homo Sapiens
ggggatagctggttaccagaaggacttctttgcagggccagtggtttctgtcagattttcgccggtcacgactgctgaatatgagacgatctgcagcaccaagtcagttgcaggggaattccttcaaaaaaccaaaatttatacctccaggaagaagtaatccaggtctgaatgaagagattacaaaactgaatccagatataaaattatttgagggtgttgcaattaataacacctttctcccgtcacaaaatgatcttagaatatgcagtttaaatctgcctagtgaagaaagtactagagaaatcaataacagagataattgcagtggaaaatattgttttgaagcacctacactggcaacattagatccacctcatacagttcattcggctcctaaagaagtagcagtgtccaaggaacaagaagagaaatctgatagcctagttaaatatttcagtgttgtttggtgtaagccttcaaagaaaaaacataaaaagtgggaaggtgatgctgttcttattgtaaaaggaaagtcatttatattaaagaatttggaaggcaaagacattggaagaggcattggttataaattcaaagagcttgaaaagattgaagagggccaaacactgatgatttgtggaaaagaaatagaagtcatgggtgtaatctctccagatgacttcagcagtggcaggtgttttcagcttggaggaggaagtactgctatctcgcattcttctcaggttgccaggaaatgtttctctaaccctttcaaaagtgtttgtaaaccaagttcaaaggaaaatagacagaatgatttccaaaattgcaaaccacgccatgacccatatacgccaaattccctcgttatgccacgaccagataagaatcaccagtgggtattcaataagaactgtttccctcttgtggatgtagtgattgatccttaccttgtatatcatcttcgaccacatcagaaagaaggaatcatattcctttatgaatgtgtaatgggaatgagaatgaatggcagatgtggagctattcttgctgatgaaatgggtttagggaagacattgcaatgtatttcgctcatctggaccctgcagtgtcagggaccctatggaggcaagccagtaataaagaagacactaattgtcacacctggaagcttggtgaataattggaagaaagaatttcaaaaatggctaggaagtgaaaggatcaagatatttactgttgatcaggaccacaaagttgaagaattcatcaagtctatattttattctgttcttattatcagttatgaaatgttacttcgttccctggatcaaattaagaatataaaatttgatcttctaatctgtgacgaggggcatcgtttgaagaacagtgccattaagacaactacagccctcattagcctttcttgtgagaaaagaataattctaactggtactccaattcagaatgatctgcaagaattttttgcattaattgattttgtaaatccaggaatattaggctctttgtcatcttataggaaaatatatgaagaacccatcattttatcgagagaaccttctgcttctgaggaagaaaaggagttaggagaaagaagagcagctgaacttacttgcctcactggactctttatccttagaagaacccaagaaattataaataaatatctcccacctaaaatagagaatgttgtcttttgccgaccaggagcactacagattgagctttatcgaaagctgttaaattctcaggttgtcaggttctgccttcaagggttgttggaaaatagtccccatctaatatgtataggagctcttaaaaaactgtgcaatcacccctgccttttgttcaactctataaaggaaaaggaatgtagctcaacttgtgataaaaatgaagaaaagagtctatacaaaggcttgctaagtgtgtttcctgctgactacaaccctctcctgtttactgaaaaggagtcaggaaaactacaggtgttgtccaagctcttagcggttatccacgaacttcgacctactgaaaaggtggtgttggtatccaactatacacaaaccttgaacattttacaagaagtatgtaagcgtcatggatatgcttatacaagacttgatggacaaacaccaatctctcaaaggcagcagattgttgatggctttaacagtcaacactcttctttttttatttttttgttaagttcaaaagctggtggtgtaggacttaacctcattggaggatctcacttaattctctatgacattgattggaatccagccactgacattcaggcaatgtctagagtatggagagatggtcagaaatatcctgtacatatttacagactcctaactacaggtacaatagaagaaaagatctatcaaaggcagatcagtaagcaaggtctttgtggggcagttgtcgacctcaccaagacatctgaacatattcagttttcagtagaagaacttaaaaatttgttcacattacatgaaagttcagattgtgttactcatgatctgcttgactgtgagtgtacaggagaagaagttcatacaggtgattcgttggaaaaattcattgtctctagagattgtcagcttggtccacatcaccagaaatctaactccctgaaacctctttctatgtcccagctgaagcaatggaaacatttttctggagatcatttaaatcttacagatccttttcttgaaagaataacagaaaatgtgtcattcatttttcagaatataaccactcaagctactggcacatagtgaaagattacttctgacattccattgctcttcttttgaaaattagtatggtaattaaatgtactttttgaaaattaatagaattatttaaattacagtatatgttgcaaaatatatcacttttgatacaatagtcaaaattgagtggtttaatgttttgtaaatattaagtgtttaaatgaaaaataaagatgtgcttatatcattg

SEQ ID NO: 1745 - DNA, 266 bp, Homo Sapiens
  misc_feature (183)..(183): n is a, c, g, or t
  misc_feature (192)..(192): n is a, c, g, or t
  misc_feature (209)..(209): n is a, c, g, or t
  misc_feature (222)..(222): n is a, c, g, or t
agaaaatagcttatgttaaacaaaaaccctataaaaacattcatcccagcaaaagcctccagggctggagggtgaggggaaaagtttcaaagcacgtggatagtccagatctgggatgccctgtcctcatccggctcccatagcaccacgtgggtcccggtcgtagccccggcctcccttcangtccagggntctggccttcgaacatntgggctgcagatntgggcccgattcactgatgatccacgtttgggcgcggcaggcgg

SEQ ID NO: 1746 - DNA, 2068 bp, Homo Sapiens
  misc_feature (143)..(143): n is a, c, g, or t
ggcgccgggattgggagggcttcttgcaggctgctgggctggggctaagggctgctcagtttccttcagcggggcactgggaagcgccatggcactgcagggcatctcggtcgtggagctgtccggcctggccccgggccgtntctgtgctatggtcctggctgacttcggggcgcgtgtggtacgcgtggaccggcccggctcccgctacgacgtgagccgcttgggccggggcaagcgctcgctagtgctggacctgaagcagccgcgggagccgcgtgctgcggcgtctgtgcaagcggtcggatgtgctgctggagcccttccgccgcggtgtcatggagaaactccagctgggcccagagattctgcagcgggaaaatccaaggcttatttatgccaggctgagtggatttggccagttcaggaaagcttctgccggttagctggccacgatatcaactatttggctttgtcaggtgttctctcaaaaattggcagaagtggtgagaatccgtatgccccgctgaatctcgtggctgactttgctggtggtggccttatgtgtgcactgggcattataatggctctttttgaccgcacacgcactgacaagggtcaggtcattgatgcaaatatggtggaaggaacagcatatttaagttcttttctgtggaaaactcagaaatcgagtctgtgggaagcacctcgaggacagaacatgttggatggtggagcacctttctatacgacttacaggacagcagatggggaattcatggctgttggagcaatagaaccccagttctacgagctgctgatcaaaggacttggactaaagtctgatgaacttcccaatcagatgagcacggatgattggccagaaatgaagaagaagtttgcagatgtatttgcaaagaagacgaaggcagagtggtgtcaaatctttgacggcacagatgcctgtgtgactccggttctgacttttgaggaggttgttcatcatgatcacaacaaggaacggggctcgtttatcaccagtgaggagcaggacgtgagcccccgccttgcacctctgctgttaaacaccccagccatcccttcttccaaaggggatcctttcataggagaacacactgaggagatacttgaagaatttggattcagccgagaagagatttatcagcttaactcagataaaatcattgaaagtaataaggtaaaagctagtctctaacttccaggcccacggctcaagtgaatttgaatactgcatttacagtgtagagtaacacataacattgtatgcatggaaacatggaggaacagtattacagtgtcctaccactctaatcaagaaaagaattacagactctgattctacagtgatgattgaattctaaaaatggttatcattagggcttttgatttataaaactttgggtacttatactaaattatggtagttattctgccttccagtttgcttgatatatttgttgatattaagattcttgacttatattttgaatgggttctagtgaaaaaggaatgatatattcttgaagacatcgatatacatttatttacactcttgattctacaatgtagaaaatgaggaaatgccacaaattgtatggtgataaaagtcacgtgaaacagagtgattggttgcatccaggccttttgtcttggtgttcatgatctccctctaagcacattccaaactttagcaacagttatcacactttgtaatttgcaaagaaaagtttcacctgtattgaatcagaatgccttcaactgaaaaaaacatatccaaaataatgaggaaatgtgttggctcactacgtagagtccagagggacagtcagttttagggttgcctgtatccagtaactcggggcctgtttccccgtgggtctctgggctgtcagctttcctttctccatgtgtttgatttctcctcaggctggtagcaagttctggatcttatacccaacacacagcaacatccagaaataaagatctcaggaccccccaaaaaaaaaaaaaaaaaaaaaaaaaaaaa

SEQ ID NO: 1747 - DNA, 6862 bp, Homo Sapiens
gccgagcggctggcggtgcctgggccagatgggggcggtggcacgggcccatggtgggctgcgggtggcccgggcccgcgaaagtgtcgccgggggcaggcaccgaggtgcaggacgccctggagcgcgcgctgccggagctgcagcaggccttgtccgcgctgaagcaggcgggcggcgcgcgggccgtgggcgccggcctggccgaggtcttccaactggtggaggaggcctggctgctgcggccgtgggccgcgaggtagcccagggtctgtgcgacgccatccgcctcgatggcggcctcgacctgctgttgcggctgctgcaggcgccggagttggagacgcgtgtgcaggccgcgcgcctgctggagcagatcctggtggctgagaaccgagaccgcgtggcgcgcattgggctgggcgtgatcctgaacctggcgaaggaacgcgaacccgtagagctggcgcggagcgtggcaggcatcttggagcacatgttcaagcattcggaggagacatgccagaggctggtggcggccggcggcctggacgcggtgctgtattggtgccgccgcacggaccccgcgctgctgcgccactgcgcgctggcgctgggcaactgcgcgctgcacgggggccaggcggtgcagcgacgcatggtagagaagcgcgcagccgagtggctcttcccgctcgccttctccaaggaggacgagctgcttcggctgcacgcctgcctcgcagtagcggtgttggcgactaacaaggaggtggagcgcgaggtggagcgctcgggcacgctggcgctcgtggagccgcttgtggcctcgctggaccctggccgcttcgcccgctgtctggtggacgccagcgacacaagccagggccgcgggcccgacgacctgcagcgcctcgtgccgttgctcgactctaaccgcttggaggcgcagtgcatcggggctttctacctctgcgccgaggctgccatcaagagcctgcaaggcaagaccaaggtgttcagcgacatcggcgccatccagagcctgaaacgcctggtttcctactctaccaatggcactaagtcggcgctggccaagcgcgcgctgcgcctgctgggcgaggaggtgccacggcccatcctgccctccgtgcccagctggaaggaggccgaggttcagacgtggctgcagcagatcggtttctccaagtactgcgagagcttccgggagcagcaggtggatggcgacctgcttctgcggctcacggaggaggaactccagaccgacctgggcatgaaatcgggcatcacccgcaagaggttctttagggagctcacggagctcaagaccttcgccaactattctacgtgcgaccgcagcaacctggcggactggctgggcagcctggacccgcgcttccgtcagtacacctacggcctggtcagctgcggcctggaccgctccctgctgcaccgcgtgtctgagcagcagctgctggaagactgcggcatccacctgggcgtgcaccgcgcccgcatcctcacggcggccagagaaatgctacactccccgctgccctgtactggtggcaaacccagtggggacactccagatgtcttcatcagctaccgccggaactcaggttcccagctggccagtctcctgaaggtgcacctgcagctgcatggcttcagtgtcttcattgatgtggagaagctggaagcaggcaagttcgaggacaaactcatccagagtgtcatgggtgcccgcaactttgtgttggtgctatcacctggagcactggacaagtgcatgcaagaccatgactgcaaggattgggtgcataaggagattgtgactgctttaagctgcggcaagaacattgtgcccatcattgatggcttcgagtggcctgagccccaggtcctgcctgaggacatgcaggctgtgcttactttcaacggtatcaagtggtcccacgaataccaggaggccaccattgagaagatcatccgcttcctgcagggccgctcctcccgggactcatctgcaggctctgacaccagtttggagggtgctgcacccatgggtccaacctaaccagtccccagttccccagccctgctgtgacttccatttccatcgtcctttctgaaggaacagctcctgaaaccagtctccctgggctgagacaacctgggctcttcttaggaaatggctctccctccccctgtcccccaccctcatggcccacctccaacccactttcctcagtatctggagagggaagggaagtcaggcttgggcacgggaggttagaactcccccaggccctgccattgggttgtctgtctccgtcatggggagggtccctgctcagttctggagacactggagttggggtgggggtggttctgcattcccttctcctgctgatagcagtcagcttgaggaggatgaaggaaggcagcctcagacaggaattaaggcaatgcccaggcgggcctgggcactgtattctgagcaagggcctgggcccaggagccagccagggatgagtgccatcatggctctccactcagactgtgcctggcccctgcacttacaacttcctgccgctctgtggccttgccctgtaatcactcagtgcccttagctagcctgactaagtcccagatcccctacagcttccttcggtgtggtatcttttgccacatccagggcgagggttgaggcaaaccagccctccctctgacttccttgtcactgcagccagctttgctgcacttgctggtgcacaggagcctcctgtttgggcctgggtctgggcatggggaggccgtgcctcaaagcccaccctaccccatgccttggtgctgtgcctcaggctccttcctggtctggcccagctggcttccccagcccctcagccatccagggctacccactgcttactcagggaccaggcagcccccatggcagtaaaagcagcctagacagaacctgcagctctgtggaaagaggcaaagtcctgaaaaggcaaagggttgtcacttagggcagcttctccaactttaacatgcatccaagtcacctgggaatgttgttaaaatcaggagatctggggtggggcctaggactctgcatttcttacagattcccaggtgagctgatgctggtggttaagggtagcaaatctctaaagcacgaagccctcacaaatctttgccatttcccaaacactccgctccatggtctccagtcatcagagcaactctacctggtattatcatccccattttacagataatgacactgaggctcagaaaggttgaggataagcccactttcctgtcattagtggcagccccagatccagacctaggcctcctggcacccagtccactggcagtggaattgctttcctgagaatcattctgaggctgggctattgcttctcccttgcttcaaagaatctagcagcgggggataggattttgcaacaaaaagctgacccagaggccatacagagcaggaatatcccattgccccctcctccactgggttcagagggtaagaaagcaccctccaataaacccaggctccaggccgtgggggctgctgaaggctctttccccgcaagggccaggtgttgacaccttaaagctggctgcgcccccagccccactcttggctgtgctggccaggtgactcctagttcttggccacatcatcagaaagtcaaaggtctcactccaggtttggggctccttccttccactcccctccctgccagagtctgtcttggccagtgccagcctcgatgctttggttttgaccccacctgatcctcctttcctcatgcagcacaagtgctcaccggggccagagccagggcatggatatgacaagcagggcagcctggacactgccctcacaggacagcgccaataacaatacagtgtctgagtatctccaggggatgatttctggctctttgtctccaatcagtcccactccctcctgaggtccccaagggcagtattcagagaggtttcctgcgttttatttctatttggtataccctccactgttgtccactgccctgtgtggccttctggttgacctctgcccgatcttctgtctctctgagggaatcagagtccagcatccagccccagctggaacagctgaagtcacaagcctcctctaagccaaggccagtgtgttcagaggtgactgccacccatactaggacaaacacagctcagatcaccaggtcaagcacctaggcctggcttctcctgagacagaggactcagaagtggcctttcctccaaagcctgctcagacacaggtctgtagggccagggtgttctgcttggctgggctgcagctgctacccctcggttggggctgagtcagccagatcctccccctacttctccccaagggccaagaactgctcagggacattaaaggtcaaaagtccagccacactcattcatcctttccccaggcccatgaagagaggcatctcattgtagaatgtatgaggaagtgggaagtatctcagagaatcagctaagtttcctaacttgtccatccaaatgtgatcaccacgattcaacaatttggggcattgctgatctagccgttcctagtggggcttgctcaaggttgcacagcgagtcagtagaagccctggctggccccacttggtaccaatccaccaggcagctcagggctcctgcccagcccagcagcttctgttgtctaacgtatggcaggcagactgggagcaggaaaacagagggccccaaagcccaaggcaccagaaggtttgtttcagtttgctgaagctgatttgtaatgattggcactcttcagccaggggagtgggtaggccatagccaaggatcgattccccaaccacagcaaaggcaacactcttcctccagagatcaccaagcccctcttacctccctccctccttcccaaggctggcactaaccaggtaccacattcattgttaaggaatggctgatgactgctacacgtgttgggaacctggttggggctgtgcagtttgggctggaaggagagatgccagccctcgtgctgcctctggtccctgaagtgtcacctctctcaggacctctcctctggcctgtggggttataagtgatggatagcagaaagggagaactgactcctgtcccaaatagctcctctgccacctgtcctgcagtgggcctgtgtgggttatgattctagatcctagacagaggctgggtcagctgtggatggggtggtgccttggtctctcttgactacctcgtccaaagagagcactgcccttagacaagagttgcttgtcctgctgtgggctgggcttccagctgcagacctccagttgcttggtgttcactttgctcctcttgccctctgtcttctggtccaggcagatcaggggctctggggaaactgctggaactcgaggtgaggatcagccttttccagcatcctgtgagagaccagagagagagtttggatttcatgtggggaaccctcaaggcctgtctggagaagtgacacaggatttactggggtgggctggtccaggtagctctcctgaacctcctccttccccaagctgagaagctgagagctggaggacaatatccagggacatggctctggaaaataactttttttttttaagagacagggtcttgctctgttgtccaggctggagggcagtgacataatcatagctcactgtacccttgaactcctgggctcaagtgatcctcctgcctcagcctccttagtagctgggactaccagtgcataccaccatgcctgggtgattttttaaattttttatacagacaaggtcttgctatgttgcccaggctgatcttgaattcccgggctcaagtggtcctcctgcctcagcctcccacaggatcgggattacaggcaagagcctccacgcccggccatgaaatataattcttaatatcatacaggaaaaagtcagcgggtcaagctagcctgtggcccagccacaactagctgacaaagcttcctggccttccctttaacacagttctgctgccatagttccatctataaaatgggaatggagggaaataggggaactgggagagagaacacagccttgccaagcagcaatgttagcctgatccttcctccacctagctcgccatctcgcccttggaaaatggctcctggaggattaggcagccatctgcaaggagaggggcaacctgggacaagacacccagagggtaaggattccaggaatgaagctgccatttctggttgggaggagaagaggaaacttttaagagaaagggctccattatgagcatgggttcagggccctgcattacccaatcagaacagccgggatgagcaggaggccagctcccaggaggaaggggaaccccttcataaagttcagagtggctgggtagagtgagttgaagatgccggaggccgtcagcatggccaggctattcacacaggccacagcagaaaagagagcacctgtgaagaaataaataccatactctggagtccgaaagggccatattccaactctggcaccaccacctcacagctgtgtgaccgggagtagtcacttaacctatgtctccccttcctcaccagtaaatcctgctacatcatgtactgtgacaaggattcagtaaggtcatatgtggacagtagctggcacagaggggctactaaacaaatggctgctattaaatccacattaaaagtacatgtgatctgacagaacccagcacataaaagaaaaaaaaaagt

SEQ ID NO: 1748 - DNA, 406 bp, Homo Sapiens
cggccgctccaacatcacggcgtgcaacacgtgggggcggtgccggtcggagggctcctagtgcgccaggttgtgggaagtgaggctggcggtggcgacaaccgaggaggaggggcgggacgccgtggagcacggcgaccggctgagcgtcatggagggctcaggggagcagccgggcccacaaccacagcatcccggagaccaccgcatccgcgacggcgacttcgtggtgctgaaacgtgaagatgtgtttaaagcagtacaagtccagcggagaaaaaaagtaactttcgaaaaacagtggttctacctggataacgtcattggccatagttatggaactgcatttgaagtgaccagtgggggaagtctacagcccaagaagaagagggaagagcctactgca

SEQ ID NO: 1749 - DNA, 2813 bp, Homo Sapiens
ctccaccgacagccaggcactgggcagcacgcactggagacccaggaccctgtgcaggagcagctccgggtgacacgaggggactgaagatactcccacaggggctcagcaggagcaatgggtaaccaaatgagtgttccccaaagagttgaagaccaagagaatgaaccagaagcagagacttaccaggacaacgcgtctgctctgaacggggttccagtggtggtgtcgacccacacagttcagcacttagaggaagtcgacttgggaataagtgtcaagacggataatgtggccacttcttcccccgagacaacggagataagtgctgttgcggatgccaacggaaagaatcttgggaaagaggccaaacccgaggcaccagctgctaaatctcgttttttcttgatgctctctcggcctgtaccaggacgtaccggagaccaagccgcagattcatcccttggatcagtgaagcttgatgtcagctccaataaagctccagcgaacaaagacccaagtgagagctggacacttccggtggcagctggaccggggcaggacacagataaaaccccagggcacgccccggcccaagacaaggtcctctctgccgccagggatcccacgcttctcccacctgagacagggggagcaggaggagaagctccctccaagcccaaggactccagcttttttgacaaattcttcaagctggacaagggacaggaaaaggtgccaggtgacagccaacaggaagccaagagggcagagcatcaagacaaggtggatgaggttcctggcttatcagggcagtccgatgatgtccctgcagggaaggacatagttgacggcaaggaaaaagaaggacaagaacttggaactgcggattgctctgtccctggggacccagaaggactggagactgcaaaggacgattcccaggcagcagctatagcagagaataataattccatcatgagtttctttaaaactctggtttcacctaacaaagctgaaacaaaaaaggacccagaagacacgggtgctgaaaagtcacccaccacttcagctgaccttaagtcagacaaagccaactttacatcccaggagacccaaggggctggcaagaattccaaaggatgcaacccatcggggcacacacagtccgtgacaacccctgaacctgcgaaggaaggcaccaaggagaaatcaggacccacctctctgcctctgggcaaactgttttggaaaaagtcagttaaagaggactcagtccccacaggtgcggaggagaatgtggtgtgtgagtcaccagtagagattataaagtccaaggaagtagaatcagccttacaaacagtggacctcaacgaaggagatgctgcacctgaacccacagaagcgaaactcaaaagagaagaaagcaaaccaagaacctctctgatggcgtttctcagacaaatgtcagtgaaaggggatggagggatcacccactcagaagaaataaatgggaaagactccagctgccaaacatcagactccacagaaaagactatcacaccgccagagcctgaaccaacaggagcaccacagaagggtaaagagggctcctcgaaggacaagaagtcagcagccgagatgaacaagcagaagagcaacaagcaggaagccaaagaaccagcccagtgcacagagcaggccacggtggacacgaactcactgcagaatggggacaagctccaaaagagacctgagaagcggcagcagtcccttgggggcttctttaaaggcctgggaccaaagcggatgttggatgctcaagtgcaaacagacccagtatccatcggaccagttggcaaacccaagtaaacaaatcagcacggttcccaccaggttctcctgccaccaagatgtgttctccttactccatctcctccccaaacacgctccatgtatatattcttctgatggccagcaaatgaaattctgcctagaaattaagcccgagctgttgtatattgaggtgtattatttacgtctctggtccagtcttttctggcaaataacagtaaagatggtttagcaggtcacctagttgggtcagaagagtcgatgatcaccaagcaggaaagggagggaatagaggaatgtgttcgggttaagtgatgaaaatggcagtggtggccgggcgtggtggctctcgcctgtaatctcagcactttgggaggccgaggcaggtggatcacctgaggtcaggagttcaagactagcctggccaacatcatgaaaccccgtctctactaaaaatacaaaaattagccaggcatggtggcacacacctgtagtcccagctactcgggagcccaacgcacgagaaccgcttgtacccaggaggtggaggttgcagtgagccgaagttgcaccattgcactccaccctgggcgacagagcaagattctatcaaaaaaaaaaggcagtggcaagtaagttatagaagagaaatgctgctagaaggaattaagcgttgtagtaaacgcgtgctcatcctctaagcttgaagaagggagacgaaaatccatttgtttaaattcacatctcaaggagggagaacccgggctgtgttgggtggttgccaatttcctagaacggaatgtgtggggtatagaaaaaggaatgaataagcgttgtttttcaaatagggtccttgtaagttattgatgagagggaaaagattgactggggagggcttaaaatgatttgggaaaacaattgcttttgaggctcagtgacaacggcaaagattacaactt

SEQ ID NO: 1750 - DNA, 242 bp, Homo Sapiens
  misc_feature (14)..(14): n is a, c, g, or t
  misc_feature (20)..(20): n is a, c, g, or t
  misc_feature (24)..(24): n is a, c, g, or t
  misc_feature (30)..(30): n is a, c, g, or t
  misc_feature (34)..(34): n is a, c, g, or t
  misc_feature (45)..(45): n is a, c, g, or t
  misc_feature (88)..(88): n is a, c, g, or t
  misc_feature (132)..(132): n is a, c, g, or t
  misc_feature (145)..(145): n is a, c, g, or t
  misc_feature (220)..(220): n is a, c, g, or t
  misc_feature (232)..(232): n is a, c, g, or t
  misc_feature (240)..(240): n is a, c, g, or t
cccgggtagaagtnacgctncccncgctgnccanaatgtcggcgnccagaggaggtagagagcccccacataccactgtattccccgncaccatggatgacgtccccgccccaacccctgcaccagcaccgnccgccgctgccgnccccagggtcccgtttcactgcagtgaatgtggcaagagcttccgctaccgctcagacctgcggcgccactttgnccggcacacagngctcaagncc

SEQ ID NO: 1751 - DNA, 451 bp, Homo Sapiens
agatcgagctcgcccggtttatgctgggcaatgtaagaaccagaccgaatacagcctaggggacccacccctcgaacagcaagcactcagacacagcacaccacacacacagagcccgaccccaggccctgattatgcatgtgtgatgtgcagggagacatgaggggacgtgcatcaggacactcgagaccctttattttcagagggttcatggtcgggggttgggagattcttttctttatgtattgatgtttcctcactattagtggtaagtatggatgatctgcataatctctgaagactaatttaataaacaatgtctaacattcagagaaactacaggaggaagtcccaatgatagcatggaccatggagcccctgactccctggctgcccttctgccctctcccaaccacaggcctctgcccaacaccccacctaaggcccagct

SEQ ID NO: 1752 - DNA, 1404 bp, Homo Sapiens
gaattccgttgctgtcgcacttactgttcaatagtatatactctgtatttgaaaaatagatgtatatattctaggtgataaattaaaaatgaaagaatttaatcattggaaagtattaaatatatattgcttatcttctccaaggaagaggagttctctcgtacccatccaaactgacctaattctcaagctgcttcatcttgctagtactgtaggttcatttgcaatttgtagataatgctccttcaggattggcttttgtaaatttctgttagaagctggtttctgcattttgatttttgtgtatttggatacattttcatataggttgcagagaaatccatgagttaaaaaattatttttcctgttttatttctgcatgaacctaagtcacattgacccagtaattgatatatgtgtgattattgcaattaagtataagaaggtagaatatatagttttattagacagatgcttctgaaatattaattttgtatgtttttactatatcctttttgtgtatctacagatacaacagacatgcaagagaatggactcagaaatatgcaatgtaaaaatcaaaaaattttcatatataccagagtactgtaaaatctaggtttttttcaacattagcagtaaattgagcactgtttactgtttcattgtaccatgaaaccatttgatttttacccattttaaatgtgtttctgaagcaagacaaaacaaacttccaaaaatacccttaagactgtgatgagagcatttatcattttgtatgcattgagaaagacatttattatggtttttaagatacttggacatctgcatcttcagcttacaagatctacaatgcagctgaaaagcaaccaaattattttttgctgaaactagatgtttttacatgagaaatactgtatgtgttgtctaagatgtcagttttataaatctgtattcagatttcattctttgttagctcactttataatttgtatttttttactgtatagactaaatatattctatttacatgtatgtcaactcattacttttttcctgtgaacagtattgaaaaaccccaacggctgataattaagtgaattaactgtgtctcccttgtcttaggatattctgtagattgattgcagatttcttaaatctgaaatgatctttacactgtaattctcagcatactgattatggagaaacacttgttttgattttgttatacttgacttaactttattgcaatgtgaattaattgcactgctaagtaggaagatgtgtaacttttatttgttgctattcacatttgaattttttcctgtataggcaatattatattgacaccttttacagatcttactgtagctttttccatataaataaaatgctttttctact

SEQ ID NO: 1753 - DNA, 450 bp, Homo Sapiens
gagtctcgccggcgtccccgcccgcacactcgcgcacactcgcgctcgggcgcacacggagcagggaccggcgcccggagcgagccagggagcggctaaccggggacccaccgcgcggagccagcctagctgccagcgagcccaacccgcgacgacccacgcccctgagccccgcagccgacccctgccggccggtgtccccaccgccatccctgacccatggcgctgaagaggattcagaaagaattgagtgatctacagcgcgatccacctgctcactgttcagctggacctgtgggagatgacttgttccactggcaagccactattatggggcctcctgatagcgcatatcaaggtggagtcttctttctcactgtacattttccgacagattatccttttaaaccaccaaagattgctttcacaacaaaaatttaccatcccaac

SEQ ID NO: 1754 - DNA, 270 bp, Homo Sapiens
  misc_feature (105)..(105): n is a, c, g, or t
  misc_feature (120)..(120): n is a, c, g, or t
  misc_feature (131)..(131): n is a, c, g, or t
  misc_feature (162)..(162): n is a, c, g, or t
  misc_feature (183)..(183): n is a, c, g, or t
cactgggctcctgctggccgccgtcctgagcctgcagctggctgcagccgaagccatatggtgtcaccagtgcacgggcttcggagggtgctcccatggatccanatgcctgagggactncacccactgtntcaccactgccacccgggtcctcagcaacancgaggatttgcctctggtcancaagatgtgccacataggctgccccgatatccccagcctgggcctgggccctacgtatccatcggttttctgccagaccagcctttg

SEQ ID NO: 1755 - DNA, 458 bp, Homo Sapiens
gcggccgcgggagcccgcgccccgcccgccgcgcctctgccgggacccacccgcagcggggggctgagcccgccggcggctccccggagctcacccacctccgcgcgccggagcgcaggcaaaaggggaggaaaggctcctctctttagtcaccactctcgccctctccaagaatttgtttaacaaagcgctgaggaaagagaacgtcttcttgaattctttagtaggggcggagtctgctgctgccctgcgctgccacctcggctacactgccctccgcgacgacccctgaccagccggggtcacgtccgggagacgggatcatgaagcgctcggtagccgtctggctcttggtcgggctcagcctcggtgtcccccagttcggcaaaggtgatatttgtgatcccaatccatgtgaaaatggaggtatctgtttgccaggattggctgatggttcc

SEQ ID NO: 1756 - DNA, 232 bp, Homo Sapiens
  misc_feature (40)..(40): n is a, c, g, or t
  misc_feature (94)..(94): n is a, c, g, or t
ggcgcaggccccagccagctcaggctacactatcccaggntcagcatggccgtccgccagtgggtaatcgccctggccttggctgccctccttnttgtggacagggaagtgccagtggcagcaggaaagctccctttctcaagaatgcccatctgtgaacacatggtagagtctccaacctgttcccagatgtccaacctggtctgcggcactgatgggctcacatatacga

SEQ ID NO: 1757 - DNA, 280 bp, Homo Sapiens
  misc_feature (261)..(261): n is a, c, g, or t
gactggagaggccagcacgcacagtgacttaatccaagaagatggaataaaaaggcctacctcattgggctcgtgtgggtgaggagaactgaagagtctgagagcgcggcacgagccagaggctacggaaaacactgccctcctacactccaccttggagagacccagaaaagaacaagcttcatttgtaaaaaaggaaaacaactcaggcaatgggggtggcttaaaggcactctacagtgtgcagatgccttccacttnttccatctgccctgtctct

SEQ ID NO: 1758 - DNA, 3082 bp, Homo Sapiens
agggagtcgtgtcggcgccaccccggcccccgagcccgcagattgcccaccgaagctcgtgtgtgcacccccgatcccgccagccactcgcccctggcctcgcgggccgtgtctccggcatcatgtgtggtatatttgcttacttaaactaccatgttcctcgaacgagacgagaaatcctggagaccctaatcaaaggccttcagagactggagtacagaggatatgattctgctggtgtgggatttgatggaggcaatgataaagattgggaagccaatgcctgcaaaacccagcttattaagaagaaaggaaaagttaaggcactggatgaagaagttcacaagcaacaagatatggatttggatatagaatttgatgtacaccttggaatagctcatacccgttgggcaacacatggagaacccagtcctgtcaatagccacccccagcgctctgataaaaataatgaatttatcgttattcacaatggaatcatcaccaactacaaagacttgaaaaagtttttggaaagcaaaggctatgacttcgaatctgaaacagacacagagacaattgccaagctcgttaagtatatgtatgacaatcgggaaagtcaagataccagctttactaccttggtggagagagttatccaacaattggaaggtgcttttgcacttgtgtttaaaagtgttcattttcccgggcaagcagttggcacaaggcgaggtagccctctgttgattggtgtacggagtgaacataaactttctactgatcacattcctatactctacagaacaggcaaagacaagaaaggaagctgcaatctctctcgtgtggacagcacaacctgccttttcccggtggaagaaaaagcagtggagtattactttgcttctgatgcaagtgctgtcatagaacacaccaatcgcgtcatctttctggaagatgatgatgttgcagcagtagtggatggacgtctttctatccatcgaattaaacgaactgcaggagatcaccccggacgagctgtgcaaacactccagatggaactccagcagatcatgaagggcaacttcagttcatttatgcagaaggaaatatttgagcagccagagtctgtcgtgaacacaatgagaggaagagtcaactttgatgactatactgtgaatttgggtggtttgaaggatcacataaaggagatccagagatgccggcgtttgattcttattgcttgtggaacaagttaccatgctggtgtagcaacacgtcaagttcttgaggagctgactgagttgcctgtgatggtggaactagcaagtgacttcctggacagaaacacaccagtctttcgagatgatgtttgctttttccttagtcaatcaggtgagacagcagatactttgatgggtcttcgttactgtaaggagagaggagctttaactgtggggatcacaaacacagttggcagttccatatcacgggagacagattgtggagttcatattaatgctggtcctgagattggtgtggccagtacaaaggcttataccagccagtttgtatcccttgtgatgtttgcccttatgatgtgtgatgatcggatctccatgcaagaaagacgcaaagagatcatgcttggattgaaacggctgcctgatttgattaaggaagtactgagcatggatgacgaaattcagaaactagcaacagaactttatcatcagaagtcagttctgataatgggacgaggctatcattatgctacttgtcttgaaggggcactgaaaatcaaagaaattacttatatgcactctgaaggcatccttgctggtgaattgaaacatggccctctggctttggtggataaattgatgcctgtgatcatgatcatcatgagagatcacacttatgccaagtgtcagaatgctcttcagcaagtggttgctcggcaggggcggcctgtggtaatttgtgataaggaggatactgagaccattaagaacacaaaaagaacgatcaaggtgccccactcagtggactgcttgcagggcattctcagcgtgatccctttacagttgctggctttccaccttgctgtgctgagaggctatgatgttgatttcccacggaatcttgccaaatctgtgactgtagagtgaggaatatctatacaaaatgtacgaaactgtatgattaagcaacacaagacaccttttgtatttaaaaccttgatttaaaatatcaccccttgaagcctttttttagtaaatccttatttatatatcagttataattattccactcaatatgtgatttttgtgaagttacctcttacattttcccagtaatttgtggaggactttgaataatggaatctatattggaatctgtatcagaaagattctagctattattttctttaaagaatgctgggtgttgcatttctggaccctccacttcaatctgagaagacaatatgtttctaaaaattggtacttgtttcaccatacttcattcagaccagtgaaagagtagtgcatttaattggagtatctaaagccagtggcagtgtatgctcatacttggacagttagggaagggtttgccaagttttaagagaagatgtgatttattttgaaatttgtttctgttttgtttttaaatcaaactgtaaaacttaaaactgaaaaattttattggtaggatttatatctaagtttggttagccttagtttctcagacttgttgtctattatctgtaggtggaagaaatttaggaagcgaaatattacagtagtgcattggtgggtctcaatccttaacatatttgcacaattttatagcacaaactttaaattcaagctgctttggacaactgacaatatgattttaaatttgaagatgggatgtgtacatgttgggtatcctactactttgtgttttcatctcctaaaagtgttttttatttccttgtatctgtagtcttttattttttaaatgactgctgaatgacatattttatcttgttctttaaaatcacaacacagagctgctattaaattaatattgatat

SEQ ID NO: 1759 - DNA, 521 bp, Homo Sapiens
gaattcggcacgagtaaaattcctataattttttgctgcatattatcctcatccccaaaataacatccattttaaagtgtatagttgaggggaaggatgctgtttttcgtataagttgtcaaatatggcacatttgacctggagagggctaaaatcaatatttaatcctcagagcttcacctgtcaaaactatttaagtctgcagaaaatcaagattgamatgaaaactaccaaccagctgaacatccaaaacgtcaaattccttaacatgatgtaaavatgtaagctaaaggaattagtccattttgatagcagcaatagagagccctgtgtattcgtattcgactttcatggaaaggttcttctgtggcaagcccacctgtggactagtacctaaccacacagatttgtttattttgggagcttcacaatttgggatctcaaatacaaaacctaataggctgaacacggggtctatgaggctaagccccacattaattcaagaggttgccacagctaac

SEQ ID NO: 1760 - DNA, 332 bp, Homo Sapiens
  misc_feature (85)..(85): n is a, c, g, or t
gagcccagcccagagcaggcagcggaagccagcttggggcagcgcagagcaacacggagcacaggtctctgctgctgatgaagcngctaccaaacgcacccaacccttggcagccatctgtccctgcagccatagcccacattcccatgacctccctctgcttgttttgggaccatgtctgtacagcctctaggccccagccccggaggtgaatgccatgccatgattctggtgtgctccatggcatccccagcctagctcccaatcccactttggcacgatgttagccaacagctcctcaaccaacagttctgttctcccgtgtcctgact

SEQ ID NO: 1761 - DNA, 1942 bp, Homo Sapiens
agccagggtagagactgagtcggcgcctggcgggtgttgtgacgcgcaaaccaggggcgggttctaagcggcgacgcgcgggtgctgggaggccttagaacgccgtggcgtgccgcaggacgcgacggctgcagaacatccgccgcaccgctgggggccaacgttgtcggaccgaggagtccgaggtggcgactgagtgagatacccagctgtgcggagctaggacgcggaacatcccagaggccagcatcaacatgtttccatccttggggaatgaccacgcaactgggcccagccctggtgctgggggtggccctgtgcctgggttgtggccagcccctaccacaggtccctgaacgccccttctctgtgctgtggaatgtaccctcagcacactgtgaggcccgctttggtgtgcacctgccactcaatgctctgggcatcatagccaaccgtggccagcattttcacggtcagaacatgaccattttctacaagaaccaactcggcctctatccctactttggacccaggggcacagctcacaatgggggcatcccccaggctttgccccttgaccgccacctggcactggctgcctaccagatccaccacagcctgagacctggctttgctggcccagcagtgctggattgggaggagtggtgtccactctgggctgggaactggggccgccgccgagcttatcaggcagcctcttgggcttgggcacagcaggtattccctgacctggaccctcaggagcagctctacaaggcctatactggctttgagcaggcggcccgtgcactgatggaggatacgctgcgggtggcccaggcactacggccccatggactctggggcttctatcactacccagcctgtggcaatggctggcatagtatggcttccaactataccggccgctgccatgcagccacccttgcccgcaacactcaactgcattggctctgggccgcctccagtgccctcttccccagcatctacctcccacccaggctgccacctgcccaccaccaggcctttgtccgacatcgcctggaggaggccttccgtgtggcccttgttgggcaccgacatcccctgcctgtcctggcctatgtccgcctcacacaccggagatctgggaggttcctgtcccaggatgaccttgtgcagtccattggtgtgagtgcagcactaggggcagccggcgtggtgctctggggggacctgagcctctccagctctgaggaggagtgctggcatctccatgactacctggtggacaccttgggcccctatgtgatcaatgtgaccagggcagcgatggcctgcagtcaccagcggtgccatggccacgggcgctgtgcccggcgagatccaggacagatggaagcctttctacacctgtggccagacggcagccttggagattggaagtccttcagctgccactgttactggggctgggctggccccacctgccaggagcccaggcctgggcctaaagaagcagtataaagccagggcccctgccactgcctcttcttttccctgctgccacttttccagtcctggaactactctgtcccactcttgctctattcagtttacagtcaaccctcccaagcacacaccccgcttcccttggaatccctgaggggtagaaggggccagaaaaaacgcttataaaaccagaggccctctgagatcatgtgagtcctccatggcaaggaagcagttccagggagagtcaggttccagctagttagggctgccagcctagggctttgtgcctacacctcactaagcccatggagaggtcacagatgggccgtgcacgggcagatgggccccaaaaaatcttggcgaaggtcggtaaagtgctaagctgttgtctgcactctttcatcataaagtcacttttttccactgc

SEQ ID NO: 1762 - DNA, 661 bp, Homo Sapiens
  misc_feature (623)..(623): n is a, c, g, or t
gaatcattgcactccctactagagcggatgtgatgagggaaaaggagaactcagcactttccctgcaggaaccggctccctcggaggggcgtggctgggaggagctgtgagtaacgtgccacagtgttgtaaaaacccagtgagtgttataaaaacccagtcagcctggctcctgttgaatagtctaccccccttgcactctacctgacacagctgcagcctgcaattcactcgcactgcctgggattgcactggatccgtgtgctcagaacaaggtgaacgcccagctgcagccatgaagatctgtagcctcaccctgctctccttcctcctactggctgctcaggtgctcctggtggaggggaaaaaaaaagtgaagaatggacttcacagcaaagtggtctcagaacaaaaggacactctgggcaacacccagattaagcagaaaagcaggcccgggaacaaaggcaagtttgtcaccaaagaccaagccaactgcagatgggctgctactgaacaggaggagggcatctcttctcaaggttgagtgcactcaattggaaccatgaattttcctgtgtcttttgctggcaattcaaccttatgcctaaagctcaaggatnaagaatctatgggaaacagttgcccggaaattggcctc

SEQ ID NO: 1763 - DNA, 155 bp, Homo Sapiens
gttttttttttttttttatgaacgctaaatgaatgggtttaatgagatgctacttgactgagtaaaaggtcggcagattcggttgacgggggaagtccttctgcacataattacaataagtaatactcattgaaaactttccttatttacacaca

SEQ ID NO: 1764 - DNA, 473 bp, Homo Sapiens
tccatcaatatttctgatttttctaaaatagacaactattcttaggttccaaaaggcatttttacattcttttttaaaacttccactaaatattaaaattccttaatcccctggaaacatttttctaataaaaatacatggctaaaattatggtttcagtacagctggtacccactagtttaaataaaatttgggaatgtctcagaagagagatttcacaacagtcaataattaaggcagaaataattaaccccaaaaggaaaataatcttagcctacaacaaaagacttagtagcacagaagttccagggatttgggtgttctttttggttttgcactgtgagtgagcgtatttgtttttattacatgcatacattattctgttttgaaatcttgctaaaagatcacaacccctcctaccactcagctattcccctagggactaggcagcctgccacataaaaataaatgca

SEQ ID NO: 1765 - DNA, 324 bp, Homo Sapiens
atctcctaccccacgagaaaggaacacagtaaactgaattgatccgtttagaagtttacaatgaagtttcttctaatactgctcctgcaggccactgcttctggagctcttcccctgaacagctctacaagcctggaaaaaaataatgtgctatttggtgaaagatacttagaaaaattttatggccttgagataaacaaacttccagtgacaaaaatgaaatatagtggaaacttaatgaaggaaaaaatccaagaaatgcagcacttcttgggtctgaaagtgaccgggcaactggacacatctaccctggagatgatgcac

SEQ ID NO: 1766 - DNA, 4313 bp, Homo Sapiens
attagagtaattggagaacgttatcatttgtcttataagattgtacgaacggacagtcgcctagtacgcagcattctgacagcccatggatttcatgaagttcacccaagcagcactgactataacctaatgtggacaggatcccacctgaagcccttcttactgcgcaccctctctgaagcacaaaaagttaatcactttcccaggtcttatgaacttacccggaaggaccgactgtacaaaaacattattcgaatgcagcatacacatggattcaaggtttttcacatcctcccccagaccttcctcctgccagctgagtacgcggaattttgtaattcatattcgaaggaccggggaccttggatagtaaaaccagtggcatcttcaagggggcggggcgtctacctgatcaacaatccaaaccagatctccctggaagagaacattttggtctcccgttacattaacaaccccctgctcatagatgatttcaagtttgacgtgcgcctctatgtgctcgtgacttcctatgatcctcttgtcatctatctctatgaagaaggattggctaggtttgcaactgtgcgatatgatcaaggagccaagaacattcggaaccagttcatgcatctgacaaactacagtgtcaacaagaaaagtggagattacgtcagttgtgacgatccagaagtggaggattatggaaacaaatggagcatgagtgctatgcttaggtacctgaaacaagaaggcagagatacaaccgcattgatggcccatgtagaagacctgatcattaagactataatctctgctgaactagctattgctactgcctgtaaaacctttgttcctcatcgcagcagttgttttgaactctatggctttgacgtgctcatagattctactctgaagccatggttgttggaagtgaatctctctccttctttggcctgtgatgcgcctctggacctaaagattaaagccagtatgatttcagatatgttcactgttgtaggatttgtgtgccaagatcctgcccagcgggcatcaactcggccaatttatcccacctttgagtcttccaggcgaaaccctttccagaaacctcagcgttgccgtccactctctgccagtgatgcggaaatgaaaaacctcgtgggctcagcccgggagaaagggccagggaagttgggtggttctgtgcttggtctgtcaatggaggagatcaaagttttacgaagggtgaaggaggagaatgatcggcgaggtggatttattcgcatatttcctacatctgagacatgggaaatatatgggtcctacctcgagcataagacctcaatgaactatatgctggcaacacgcctcttccaggacagaatgactgctgatggagcgccagaattgaagatagagagtctgaattcaaaggccaagctgcatgctgcactttacgagaggaagctcctgtctctggaggtgcgaaaacgtagacgacggagtagcagattgagggcaatgaggccaaaatacccagtgattacccaaccagctgaaatgaatgttaaaactgagacagagagtgaagaggaggaagaagtcgcattagataatgaagatgaagaacaggaggcttcccaggaggagtctgcaggatttcttagagaaaatcaagccaaatatacaccctcattgacagctttggtagaaaatacacccaaagaaaattccatgaaagttcgtgaatggaataataaaggtggacactgctgcaaacttgagactcaggagctagagcctaaatttaacctgatgcagattcttcaagataatggcaatcttagcaaaatgcaggcccgaatagcattctctgcctatctccagcatgttcaaattcgcctgatgaaagacagtggcggtcagacgttcagtgccagttgggctgccaaagaggatgaacagatggagctggttgttcgtttcctcaagcgagcatcaaataacctccagcattcactgaggatggtattacccagtcgacgattggcacttctggaacgcagaagaatcctggcccaccagctgggtgactttatcattgtatacaacaaggaaacagaacaaatggctgaaaagaaatcaaagaagaaagttgaggaagaagaggaagatggggtgaatatggaaaactttcaggagttcatcagacaagcaagtgaggctgaactggaggaggtgttgactttttatacccaaaagaacaagtctgctagtgtcttcctggggactcactctaaaatttctaagaacaacaacaattattctgatagtggggcaaaaggtgatcaccctgagactataatggaagaagtgaaaataaagccacctaaacagcaacagacgacagaaattcattctgataaattatctcgatttaccacttcagcagaaaaagaggcaaaattagtttatagcaattcctcctctggtcctactgctactctgcagaaaattcccaacacccatttgtcatctgttacaacctctgacctctctccagggccttgccaccattcttctttatctcaaattccttcagctatccccagcatgcctcaccagccaacaattttactgaacacagtctctgccagtgcttctccctgcctacatcccggggcacagaacatcccaagccctactggcctgccacgctgtcgatcaggaagtcacaccattggtcccttttcttccttccaaagtgctgcacacatctatagccagaaactgtctcgtccctcttcagcaaaggcaggatcgtgctatctaaacaagcatcattcaggaatagccaaaacacaaaaagagggagaagatgcttctttatatagcaaacggtacaaccaaagtatggttacagctgaacttcagcggctagctgagaagcaggcagcgagacagtattctccatccagccacatcaacctcctcacccaacaggtaacaaacctgaatttggcaactggcatcataaacagaagcagtgcttcagctcccccaaccctccgacccatcatcagtcctagtggcccgacatggtctacacagtcagacccccaagctcccgagaatcactccagctctcctggaagcaggagcctgcagacagggggatttgcctgggaaggagaagtagaaaacaacgtgtacagccaggctacaggggtggtcccccagcacaagtatcaccccacagcaggcagctatcagcttcaatttgccctgcagcaacttgaacaacaaaaacttcagtcccggcagctcctggaccagagtcgagcccggcaccaggcaatctttggcagccagacactacctaactccaatttatggacaatgaataatggtgcaggttgtagaatttccagtgccacagctagtggccagaagccaaccactctgccacaaaaagtggtaccacctccaagttcttgcgcctccctggttcccaaacccccacccaaccacgaacaagtgctcagaagggcaacatcccagaaagcttccaaagggtcctccgcggaagggcagctgaatggactccagagcagccttaaccctgcagcctctgtgcccatcaccagctctacagatcctgctcacactaaaatatgaaccacaaacacacagagaaacaacctgttcaccactcctgggtgcatgattgagggtgaagcatccaccagcacttcaaggggtccatagtatttttttttttgctgcctcaaagtccccaaagccttcgagcagaagtggcagtagatggttgccaatcagccaatgcagactttcactgggacaacaagaaagcagatcttctgggttttgatggaacttggcagtggggacattcagctgatgcattatataccccgtcagagcacacttgtatcttttaccttccctttgccccatgcccccaaactgcttaggtcttctctgtccctttactgctgctgcacagagatgatataaaagaggctctttggctatttgcattttgcttcctcttcttttccagattacagtatgaagctttattttctttgtacaagcttaaaatttcaacatcatcatccgccaaagttgttcctcccttttcggaggatctagggggaaagaggagcattcatcacaagtttcctagagagaggagacaaatcggtgtgccattgacaacatgagccagggtaaaggcaccctttggaattactgatttcaaagattaataaagtaattctattttt

SEQ ID NO: 1767 - DNA, 343 bp, Homo Sapiens
  misc_feature (13)..(13): n is a, c, g, or t
  misc_feature (62)..(62): n is a, c, g, or t
atttactaaaatnatgtaataaataacatgttaatagactcaagctttaccttatgaaattnatgtatttttaccagttatttctaatgtaacattgaatatataagatctgacaaatgtatgtttaaacatgaattagaagagttgagaactaccattatgtatagggattctcatagtgtcttggcccttaattggaaagttgtggcaactttaaagtactttttactgtatgttataattctttataacttagagagagacaatggtcactcaaactatgagaactatggaattaggagataaaagtttaaatttggttgttgttttataaccagtatgt

SEQ ID NO: 1768 - DNA, 685 bp, Homo Sapiens
tgggcggcagtggtggaggtggaggttggaggtggtgctgctggggaacgggagctggatgaggttgatatgtcagatctctctccagaagagcaatggagggtcgagcacgcacgcatgcatgccaagcaccgtggccatgaagctatgcatgctgaaatggtcctcatcctcatcgcaaccttggtggtggcccagctgctcctggtgcagtggaagcagaggcacccacgctcctacaatatggtgaccctctttcagatgtgggttgttcccctctatttcacagtgaagctgcactggtggaggttcctagtgatctggatcttgttctctgctgtcacagcctttgttaccttccgagccacccgaaaacctctagtacagacaaccccaaggttggtttataagtggttcctgctaatctataaaatcagctatgccactggcattgttggctacatggctgtcatgtttaccctctttggtcttaacttattattcaagatcaaaccagaagatgccatggactttggcatctcccttctcttctatggcctctactatggagttctggaacgggacttgcagaaatgtgtgcagactacatggcatctaccatagggttctacagcgagtcgggcatgcctacaaacatctttcagacagcgtgtgtgctgtgtgg

SEQ ID NO: 1769 - DNA, 308 bp, Homo Sapiens
  misc_feature (162)..(162): n is a, c, g, or t
  misc_feature (190)..(190): n is a, c, g, or t
  misc_feature (223)..(223): n is a, c, g, or t
  misc_feature (257)..(257): n is a, c, g, or t
  misc_feature (259)..(259): n is a, c, g, or t
  misc_feature (293)..(293): n is a, c, g, or t
ttttgacctgctcaattaaaaataaacactggcgtttataatgaaaaggtttttttgtcgggggggggggggtcaagagaatttattttgtgatagtaataattttcaagaccttcagtcattcctatgtctatgttgctatctttattttaaaacttaganccctgatctaactcccttctcaagtgangatactgtgtagattcaagaattataatgtagngtaataggcctttaagtttttttttaatctgttngnaataaagagcatgatttaattattgttgaattancaattaaaatgaatc

SEQ ID NO: 1770 - DNA, 2104 bp, Homo Sapiens
ggaaacttctgcctcaggtggggagaggagtccatagatcagggaaacttatgtcttggtgaaatggaagaccatgtttctaaacacctgtcgccaggttacttgaatttccactagaggagcagaaatgccaccaatgccaagtgccccacctgtgcatccacctccagatggaggatggggttggattgtggttggagcagcttttatctccattggattttcctatgcattccccaaagctgtcaccgtattcttcaaagaaattcagcaaatattccacactacctacagtgaaatagcatggatttcatccattatgctggctgttatgtacgcaggaggtcctgtaagtagtgttttggtgaataaatacggcagccggccggtggtgatagcaggaggcttattatgctgtcttggaatggtgttggcctcctttagtagcagcgtggtacagctgtacctcactatgggattcattacaggtttaggtttagccttcaacctgcaacccgccttaaccataattggcaaatacttctataggaagcgacccatggcaaatggattggccatggcaggaagtcctgttttcttaagttcattggctcctttcaatcagtacctttttaatacttttggctggaaaggaagcttcctgattttgggaagtctacttttgaatgcctgtgtggctggttccctcatgagaccccttggacccaatcaaaccacttctaagtctaaaaataagactggcaaaacagaagatgattcaagcccaaagaaaatcaaaacgaagaaatcaacttgggaaaaagttaataagtatttagatttctccctttttaagcatagaggatttctgatatatctgtctggaaatgtcattatgttcctaggtttttttgcccccattatattcttggctccatatgctaaagaccaaggaattgatgagtactcggcagcttttctgctatctgttatggctttcgttgatatgtttgctaggccttctgtaggattaattgcaaactccaaatatattcgacctcgaattcagtacttcttcagttttgcaatcatgttcaatggagtgtgtcacctcttgtgcccactggcacaggactacacaagcctggtattatatgctgtattttttggccttggatttgggagtgttagcagtgttctctttgaaactctcatggacctcgtgggtgcaccaagattttccagtgccgtcggacttgtcacaattgtggagtgtggcccagttcttcttggccctcctcttgcaggtaaattggtggatttaactggagaatataaatacatgtacatgtcctgtggggctattgtggtagcagcaagcgtgtggctgctcattggcaatgctatcaactatagattgcttgcaaaggaaaggaaggaggaaaatgcaaggcagaagtccagagaatctgaacccttgagcaaatctaaacattcggaagatgttaacgtcaaagtttcaaatgcacagagtgtaacctcagaaagagaaactaacatttaacaagaatcacatctctgatttcagtgtttatgactttatctaggagtttgtttttcattttgtttttttaaagtattagaaaaggttttagctgaaatgaggagtcacaattdaaggatggaggtgatattttcctcaatggcaaattttaaattagtttttaaaaacttacttatttgggtagttaaattttgagattatgcatagaaagaatccatgctataggtttatttccatacctgactctgggtgtggtggttaaaatactaattttaaagtcttccagtgactttcggtcttggttatatggagaattctgaatcccaaacccctggtttaagtaggtagaaggaggatgcctaatcctacaaagtgaccctttatacatttcattttttatttgatattaaagtatgagatagagttgagagacaattaattatcccctcttacacacaaacacacatactcccacatacttacccacatgtacacagagtatctggagaataaaacccaaattcaaaaaaaaaaaaaaaa

SEQ ID NO: 1771 - DNA, 463 bp, Homo Sapiens
ttttttagagattagtatttccttgttcacaagacacctaattgacttgcaacaagacaaaatattcagtgcatctggttggggccaacatggatgatgacgtgtttctcataagcccttttcattgttttctcaatttgcttcagaaaaacttgcgggattcgtccacataaagtgtgcacagtctccaaaaacttcagctgaagggggtaatacatggattgaaagagattgtcttgaaagggaaaatcccgtattgcttcatagagtgctctgaacgttggttgcttatcgtcatggtagacgcctcggtttccatgcagaacagacacaccttcatgctcagcctctctgcagttgcttccgtacatgcagtgatcgggacggtagttccactggcaggggaatacatagagacactctgggttgaaataaaaaataatatttaataaatcctggtctc

SEQ ID NO: 1772 - DNA, 235 bp, Homo Sapiens
ttgaaattgcactgttatttaaaccactttcctgaagtcagaccctccttgtagctggcacagtttttcaggtcaattggcaacctggggaggcccctctggtattagtgaagtaaagaaggtggtgatgaaagaccaagctgaagccattaatccaggcctttgaattgcactggcatcttcacctccatcttctccactctcatcttcaagcccatcatccataagacgctcc

SEQ ID NO: 1773 - DNA, 2663 bp, Homo Sapiens
acgaggcggaggcggcctgccggggtggttcggcttcccgttgccgcctcgggcgctgtacccagagctcgaagaggagcagcgcggccgcgcggacccggcaaggctgggccggactcggggctcccgagggacgccatgcggggaggcaggggcgcccctttctggctgtggccgctgcccaagctggcgctgctgcctctgttgtgggtgcttttccagcggacgcgtccccagggcagcgccgggccactgcagtgctacggagttggacccttgggcgacttgaactgctcgtgggagcctcttggggacctgggagccccctccgagttacacctccagagccaaaagtaccgttccaacaaaacccagactgtggcagtggcagccggacggagctgggtggccattcctcgggaacagctcaccatgtctgacaaactccttgtctggggcactaaggcaggccagcctctctggccccccgtcttcgtgaacctagaaacccaaatgaagccaaacgccccccggctgggccctgacgtggacttttccgaggatgaccccctggaggccactgtccattgggccccacctacatggccatctcataaagttctgatctgccagttccactaccgaagatgtcaggaggcggcctggaccctgctggaaccggagctgaagaccatacccctgacccctgttgagatccaagatttggagctagccactggctacaaagtgtatggccgctgccggatggagaaagaagaggatttgtggggcgagtggagccccattttgtccttccagacaccgccttctgctccaaaagatgtgtgggtatcagggaacctctgtgggacgcctggaggagaggaacctttgcttctatggaaggccccagggccctgtgtgcaggtgagctacaaagtctggttctgggttggaggtcgtgagctgagtccagaaggaattacctgctgctgctccctaattcccagtggggcggagtgggccagggtgtccgctgtcaacgccacaagctgggagcctctcaccaacctctctttggtctgcttggattcagcctctgccccccgtagcgtggcagtcagcagcatcgctgggagcacggagctactggtgacctggcaaccggggcctggggaaccactggagcatgtagtggactgggctcgagatggggaccccctggagaaactcaactgggtccggcttccccctgggaacctcagtgctctgttaccagggaatttcactgtcggggtcccctatcgaatcactgtgaccgcagtctctgcttcaggcttggcctctgcatcctccgtctgggggttcagggaggaattagcacccctagtggggccaacgctttggcgactccaagatgcccctccagggacccccgccatagcgtggggagaggtcccaaggcaccagcttcgaggccacctcacccactacaccttgtgtgcacagagtggaaccagcccctccgtctgcatgaatgtgagtggcaacacacagagtgtcaccctgcctgaccttccttggggtccctgtgagctgtgggtgacagcatctaccatcgctggacagggccctcctggtcccatcctccggcttcatctaccagataacaccctgaggtggaaagttctgccaggcatcctattcttgtggggcttgttcctgttggggtgtggcctgagcctggccacctctggaaggtgctaccacctaaggcacaaagtgctgccccgctgggtctgggagaaagttcctgatcctgccaacagcagttcaggccagccccacatggagcaagtacctgaggcccagccccttggggacttgcccatcctggaagtggaggagatggagcccccgccggttatggagtcctcccagcccgcccaggccaccgccccgcttgactctgggtatgagaagcacttcctgcccacacctgaggagctgggccttctggggccccccaggccacaggttctggcctgaaccacacgtctggctgggggctgccagccaggctagagggatgctcatgcaggttgcaccccagtcctggattagccctcttgatggatgaagacactgaggactcagagaggctgagtcacttacctgaggacacccagccaggcagagctgggattgaaggacccctatagagaagggcttggcccccatggggaagacacggatggaaggtggagcaaaggaaaatacatgaaattgagagtggcagctgcctgccaaaatctgttccgctgtaacagaactgaatttggaccccagcacagtggctcacgcctgtaatcccagcactttggcaggccaaggtggaaggatcacttagagctaggagtttgagaccagcctgggcaatatagcaagacccctcactacaaaaataaaacatcaaaaacaaaaacaattagctgggcatgatggcacacacctgtagtccgagccacttgggaggctgaggtgggaggatcggttgagcccaggagttcgaagctgcagggacctctgattgcaccactgcactccaggctgggtaacagaatgagaccttatctcaaaaataaacaaactaataaaaagca

SEQ ID NO: 1774 - DNA, 1713 bp, Homo Sapiens
ccaagggagaaaactattctgtcaaagagacggtgccaaaaggcaaaaacaaaggagctgatggcaaagaaggtagctgtgattggagctggggtcagtggcctaatttctctgaagtgctgtgtggatgagggacttgagcccacttgctttgagagaactgaagatattggaggagtgtggaggttcaaagagaatgtggaagatggccgagcaagtatctatcaatctgtcgttaccaacaccagcaaagaaatgtcctgtttcagtgactttccaatgcctgaagattttccaaacttcctgcataattctaaacttctggaatatttcaggatttttgctaaaaaatttgatctgctaaaatatattcagttccagacaactgtccttagtgtgagaaaatgtccagatttctcatcctctggccaatggaaggttgtcactcagagcaacggcaaggagcagagtgctgtctttgacgcagttatggtttgcagtggccaccacattctacctcatatcccactgaagtcatttccaggtatggagaggttcaaaggccaatatttccatagccgccaatacaagcatccagatggatttgagggaaaacgcatcctggtgattggaatgggaaactcaggctcagatattgctgttgagctgagtaagaatgctgctcaggtttttatcagcaccaggcatggcacctgggtcatgagccgtatctctgaagatggctatccttgggactcagtgttccacacccggtttcgttctatgctccgcaatgtactgccacgaacagctgtaaaatggatgatagaacaacagatgaatcggtggttcaaccatgaaaattatggccttgagcctcaaaacaaatacattatgaaggaacctgtactaaatgatgatgtcccaagtcgtctactctgtggagccatcaaggtgaaatctacagtgaaagagctcacagaaacttctgccatctttgaggatggaacagtggaggagaacattgatgtcatcatttttgcaacaggatatagtttctcttttcccttccttgaagattcactcgttaaagtagagaataatatggtctcactgtataaatacatattccccgctcacctggacaagtcaaccctcgcgtgcattggtctcatccagcccctaggttccattttcccaactgctgaacttcaagctcgttgggtgacaagagttttcaaaggcttgtgtagcctgccctcagagagaactatgatgatggacattatcaaaaggaatgaaaaaagaattgacctgtttggagaaagccagagccagacgttgcagaccaattatgttgactacttggacgagctcgccttagagataggtgcgaagccagatttctgctctctcttgttcaaagatcctaaactggctgtgagactctatttcggaccctgcaactcctattagtatcgcctggttgggcctgggcaatgggaaggagccagaaatgccatcttcacccagaaacaaagaatactgaagccactcaagactcgggccctgaaggattcatctaatttctcagtttcttttctgttgaaaatcctgggccttcttgctgttgttgtggcctttttttgccaacttcaatggtcctagtcagcataatgctttgggctttattatcttgtcagtcactacctc

SEQ ID NO: 1775 - DNA, 764 bp, Homo Sapiens
taattaggctaggtacgaggctggttttaaatcggcgcgggggacgcgcgctgttatgccgccggtctgcctgcggtgctgaaaacccggcgcgcagtgcggctggctctgtggctgctgcgccagcaaatccactccgtggagccctgcggaccccgagcacgcgcctgacagcccctgctggccctggcgcgctggctgtctgccagtgccagctataggccccctgaccctggtgtgcctgcctgagacctgcggctacagggacctacccctgcgctaactatcacctgtggacgaggtgtgcccagcagctcagggtgcgagtgagcggtggctagtgatcgaccgtaaggtagtacaacatcagcgatgttcaccctgcctggcatccatgggggctccctgggtcatcagccactacgccagggcatgtgatgccactgggatcccattttgtggccttccacatcaacaatgggccttgtgaacgaagtatatgaactctctcctgatttggagaactgtctccagagcagcccagctttgagcccaccaagaataaaggagctgacagattgagtacctgggagctagcggggccacagtggagcggatggggctcatgaagtgccaaccatgtcttcttccctgctgtacctgcttgccatcttgctgctggatggtgctgcctggctcaccctttgggtcttgggacggtcttttgcccttcctcgtcttgtgcggtgctgtcagtgcagtca

SEQ ID NO: 1776 - DNA, 6518 bp, Homo Sapiens
ggaggcgcgccccccggctgggcgccgcgcgcaccatggggctcccagcgctcgagttcagcgactgctgcctcgatagtccgcacttccgagagacgctcaagtcgcacgaagcagagctggacaagaccaacaaattcatcaaggagctcatcaaggacgggaagtcactcataagcgcgctcaagaatttgtcttcagcgaagcggaagtttgcagattccttaaatgaatttaaatttcagtgcataggagatgcagaaacagatgatgagatgtgtatagcaaggtctttgcaggagtttgccactgtcctcaggaatcttgaagatgaacggatacggatgattgagaatgccagcgaggtgctcatcactcccttggagaagtttcgaaaggaacagatcggggctgccaaggaagccaaaaagaaatatgacaaagagacagaaaagtattgtggcatcttagaaaaacacttgaatttgtcttccaaaaagaaagaatctcagcttcaggaggcagacagccaagtggacctggtccggcagcatttctatgaagtatccctggaatatgtcttcaaggtgcaggaagtccaagagagaaagatgtttgagtttgtggagcctctgctggccttcctgcaaggactcttcactttctatcaccatggttacgaactggccaaggatttcggggacttcaagacacagttaaccattagcatacagaacacaagaaatcgctttgaaggcactagatcagaagtggaatcactgatgaaaaagatgaaggagaatccccttgagcacaagaccatcagtccctacaccatggagggatacctctacgtgcaggagaaacgtcactttggaacttcttgggtgaagcactactgtacatatcaacgggattccaaacaaatcaccatggtaccatttgaccaaaagtcaggaggaaaagggggagaagatgaatcagttatcctcaaatcctgcacacggcggaaaacagactccattgagaagaggttttgctttgatgtggaagcagtagacaggccaggggttatcaccatgcaagctttgtcggaagaggaccggaggctctggatggaagccatggatggccgggaacctgtctacaactcgaacaaagacagccagagtgaagggactgcgcagttggacagcattggcttcagcataatcaggaaatgcatccatgctgtggaaaccagagggatcaacgagcaagggctgtatcgaattgtgggggtcaactccagagtgcagaagttgctgagtgtcctgatggaccccaagactgcttctgagacagaaacagatatctgtgctgaatgggagataaagaccatcactagtgctctgaagacctacctaagaatgcttccaggaccactcatgatgtaccagtttcaaagaagtttcatcaaagcagcaaaactggagaaccaggagtctcgggtctctgaaatccacagccttgttcatcggctcccagagaaaaatcggcagatgttacagctgctcatgaaccacttggcaaatgttgctaacaaccacaagcagaatttgatgacggtggcaaaccttggtgtggtgtttggacccactctgctgaggcctcaggaagaaacagtagcagccatcatggacatcaaatttcagaacattgtcattgagatcctaatagaaaaccacgaaaagatatttaacaccgtgcccgatatgcctctcaccaatgcccagctgcacctgtctcggaagaagagcagtgactccaagcccccgtcctgcagcgagaggcccctgacgctcttccacaccgttcagtcaacagagaaacaggaacaaaggaacagcatcatcaactccagtttggaatctgtctcatcaaatccaaacagcatccttaattccagcagcagcttacagcccaacatgaactccagtgacccagacctggctgtggtcaaacccacccggcccaactcactccccccgaatccaagcccaacttcacccctctcgccatcttggcccatgttctcggcgccatccagccctatgcccacctcatccacgtccagcgactcatcccccgtcaggtctgttgcagggtttgtttggttttctgttgctgccgttgttctctcattggctcggtcctctcttcatgcagtgttcagcctcctcgtcaactttgttccctgccatccaaacctgcacttgctttttgacaggccagaagaagcggtacatgaagactccagcacaccgttccggaaggcaaaagccttgtatgcctgcaaagctgaacatgactcagaactttcgttcacagcaggcacggtcttcgataatgttcacccatctcaggagcctggctggttggaggggactctgaacggaaagactggcctcatccctgagaattacgtggagttcctctaaccgtgggccccagcagaactgctgagctttacatggtatccatgacaactgctgattccagtgtcgaggccatttctctttgccactgagaaatgcagcgtgactgactctgttgctacctgtcaacatgaatgtttctgtgagctctggtgtcactcatctccatgatcatctcagccaacatgcatcagtactgcaagaaaagaagtcaatcagcagaggagagcatttgataactaagaggaagacttgcaaagccgttttctcatgagtaccctgaatagggggcactcattttgtttcaacggtccaaacgcccaaccttcagaaagaggaagtcagatagaaatagtccctgagagcacactgtgtagctaagcctgctggggctgggtgaagaaattggcgctgagatccaggctggatccattgcttttgtttacaataggcactctctctaccccacctctcagtacttgagacttaaagtgctacaggcagctggatctgtttgcatgcaggatgaagagggttaaaacactgtttatataagatccaatctctcaccatctctaaagcagccgttggcctgtcatcagtgagatacaatccagtcttctcatgcacgggaacacacacaccctgcgtttctccctcccaggctaggaacctctctgccaccaagggctgccatccatcgcctagtaaccacggcaacccaacctactctaaaaccaaaccaaaaaaataaaataacacatcctctttgcatgacacattttttttctcccctttttggtacactttttttgaatggttttctaacaacttgaagcacaggatcaaggaattagggtggtctacttgaggcagatgggatagtagctgggaactgttccctttctgattaatttcagcagcatcggaatatatttggagcacaccctagtaacctcttgagattaaattacatagtcttaatatttctgttcctccatgcaactgatgtttgttttttaaagggtaagatgctgcctcccaatgggtgatgccatctgactggtttccccatgtcctcccattcacccatctctgctcccacccttgcctgcctctaacccaccactggccagcccccttgccctactctgggctgctgaacactggtgctgtggtggttttcaaggttaattcctaggctaaccgtatggcctatagtttaaaagcacatctatgttcactgccactctgaaaaagggaattatttctcagtctttcaaggcttgagactaatataggccattgtgattcaggaagaaacccaaggttggagggtgggatgagtaccctctgaaaaagggaatttgctggtgaaaagaggctggatcttgtggaagactgtcttggatggggaagtactacctggagatttcaaattcacttggcctgcaaacaacagagttatccgtatcttccacatgtgaatgtcattgcaagggtgactctagacaaactacaaaccgatggaccgtcaagctccccaggagccccttggatggcagcgttgcttcagagtgtttcctgtttctggaattccttgttagggaactttaaagaagaaaagaaaaacttgaattgtgttgaattactgtatcttttactttttttttttgaaaagataaacttgtaaatagagtgatttgaaatactatatggcaaagttttatatttgatattctttaagttagttgctcacacacttaggctttgattgctgaagaagtatgtttaagagggagagaggggaggcaaagctgaagagagtcaaggtcactgtccccgcttcggcctgaaggaaagagaagacatttctatggccttgctctctgctgtcctgttggtgggcacgacacatcagtggtgttcagtctttatgtgtttttaagcatcccttgggctttggatttggagatgggaagagcatctccaggcaatgagtttttcaaagaatgcctacttagtagtaagatgaagctcaggatttaaataagtggggtcaggcattcgagtttttgtctttcttctcaggtgtatttcttggtacccccaagatatcaggccagaaagagatgagtcagttgctgtgctctttacttctttttctccacatcttctgaggctttagaaatgtggacaagctagttttcaaattttgtgtgcgtctgtaagttcttaaagaaccagcttcttagaatgttcagttctcaatgtgctgctgctttcccttctcctaaacattttaaaactcttccctttcacctccaattcccgtgatcccaaaagaagaggaagactccaggaggggtatagattgtgccgtcatagctttacaggtggttttaaagttagcaggggtttgtcatggtgattcactactcagtttatcagctcaaggattatacagctcttttccgggaactcacccaggagcaagcgagacactaccattgaatcagggaatgagaattaagaatggacaggaccaagacagaactcaagaaagccactggggaaaactcgagaagaaagggagtatactagtaggttagatctgtgaacctgaggacaagaagaccttgggaaatggaggcctcaggggatgtgcattcacatactattacgcttctcaaagagagaccaacatcatgcttttaacacatttgatgaggttttttatttgtgtttttgtttgttttttgagatggagtctcactctgtggcccaggctggagtgcagtggcgcggtcttggctcactgcaacctccgcctcccgggttcaagtgattctcctgtctcagcctcccaagtagctgggactgcaggcatgagccatcacacccggctggttttttgtgtttttagtagagatggggttttgccatgtttgccgggctgatctcgaactcctgacctcaagtgatctgcccacttcggacccccaaagtgctgggattccaggtgtgagccgctgcggccgaccacatttgatgtttgaagttgtaatctgtcccatcataaacttacctggagctcatgtggaggaacagaaggccaagatccttgctttgggggtgcctcacgaagcatccctgtagacacttggccccagcttcactgcttggaagcatgtccctccctcttgagttggctctgatttgaaatcgggagaaacagagctgctgccaatgggatcttttaggtaactccctccctagcttccgtgtgtctgtgcagtgcccatgagctgctgccaatgggatctttcaggtaccccctccccagcttccctgtggctgtgcggtgcccttgacagatggcttctctgtttccctttgcccagccaggctcccctccttcctattagctacaaaactggataaacttcagaatatgagccaatgagtaggaaggaacttgaagactaaagattttactctctcccctatccatgccccctacctctgactctctctgtgtgaacaggaaactttagggtagatgaggagaatgaattggttatcagagtggaagaccatggcccaggatccctgagctttcccagtagcctccagtttcctttgtaagacccagggatcacttagccatagcctgaatcttttaggggtattaaggtcagcctctcactcttccttcaggttactaacaaaatttcgtagctaaagaatgccatggccgggtgcagtggctcacgcctataatcccagcactttgggaggccgaggcgggcggatcacgaggtcaggagattgagaccatcctggctacgacggtgaagccccgtctctgctaagagtgcaaaaaattagccgggtgtggtggcgggcgcctgtagtcccagctactctggaggctgaggcaggagaatggcatgagcccgggaggcggagattgcggtgagccaagatcgcgcccctgcactccagcctgggtgacagagccagactccgtctcaaagg

SEQ ID NO: 1777 - DNA, 259 bp, Homo Sapiens
  misc_feature (114)..(114): n is a, c, g, or t
  misc_feature (155)..(155): n is a, c, g, or t
cagatctgtgcaccattaatgtgagtggcctgaagttctccaaggccaaggaaaatgacttcaagcattttcattctgtgatttatatcaatgcctcagaaaacctgctgcctntagaggcatttcacacgtttccagccctaaaggaactgggntctcgcatttaatggcatcaaaactatctacgtgaaatatggagactttaagttattagaattcttggacctttccttcaacagcctgactgtggaggccatct

SEQ ID NO: 1778 - DNA, 458 bp, Homo Sapiens
gggctgaccatagaggttcccacgcgtcaaatcgaagatgggtgctacagacagtagacactttggggcataaataatacagtggtagaacaatagagtacttgtttcttcttgactgaaatttcttactgaattccctggctgatatttttcattgtgagttgcttatctcgatgtcctgctttggaaagtatgtgtttagggaatgtttttatttgcatacttactatgcttgttatggaaaatttagaaagtaatgttaagtaaaatgaagaaaataaaaaccatctgtactccctccattctagcattaaccactatttagattttggggataaagttttcctgtctttttacattaatacaataatagttaacatttattaagcattttctagtaccaagtactattccagttgctttacatgtattcgtctaatcttcgattttgacgcgtt

SEQ ID NO: 1779 - DNA, 339 bp, Homo Sapiens
  misc_feature (65)..(65): n is a, c, g, or t
  misc_feature (95)..(95): n is a, c, g, or t
  misc_feature (102)..(102): n is a, c, g, or t
  misc_feature (130)..(130): n is a, c, g, or t
  misc_feature (224)..(224): n is a, c, g, or t
  misc_feature (302)..(302): n is a, c, g, or t
caggaaacttgctcaccacagctggagatcaggaatagaacctttccaagatatcataatatttnttttataggaacactgagtaatggcaagantattttnagcttttccatggttaagagcgatagtntcagaggctggagaaaatgttcattctgctcagtgatccaggagtgtgaggacagtagcttcctttccacgtccacaagacaatgacagatgtntttccttctttgctctttctagggatctttctagggatgttgattctctcacaatatttcaatgtcccctttctgtgnttcttctccctccaggggcttgattacaattacatgg

SEQ ID NO: 1780 - DNA, 3053 bp, Homo Sapiens
gcaaagctaggctaggtcttggaggctggtgtaaggcgatgtgggtgaaggcaggaggctgatggaaagactggggggaagaaaagccgaaatggattcacggtgccttggatgaaggacgagaggggaactgcaagctccttcaactggttctgtccggtgagaagtgatcaagcttgggctgacaagaggctcagggagccctcacgttctttcgcttttttacctgccaatcaaactgctacaagacaacaccctgatctggcatggacatcgcgggtccaagcctgtagccccaaatcggataatctctgcagctgataacaagcaaaagagaagccaggcaacagccatattaaagaagaaaacaatcaactctgagatccaacttagaaataatgtttcattcaagataaggctcgtggcttaggagattgtgacctggcttgcatcattctaagacttctatcgtctgttttcaaaacccaaggaggacctccttttctgtgtgatagttcctcatgctttgccagccactgggtctttaaggaagcttgccaagagttcccggctgggaaggacagttcgagttcatcatagacaatgagctggcaccacagtttaagcgactcaccaacctggttgcccacttcaaaatgtcaagaaccacactatctaattgaaagaactgtgttttagcaaagtgtaattggatcgcctggcaagatcatctcaaactatgtctctgaccttgcctttcagtggctattttgagcacaagaggagaaaggaaatgattcctgaattatatcttgtttttaaaaattaagattaattaatacttggttttatgttcattccattgtaggaacttagtgattattacaaaacagtcaaaataggtcatagcaaaatgaacgtttaagattaggttaaaacattcctctgaaattttagtattcacttttgaagtgtcaattactatatttctgtaatttctcatttttttcttggcttagagtcaagatgaaaaatgatatttgaatcaaagacattgttttgttatatagccactcctttctaaaatgcaaatccaccctcccctcaccaatgctttattctttgtgcgcacacacacacacacacacacacacacacacacagacatacacagaaccagcacccaaatggtagaggaggtccttccaagacttctaggacctggatcatgtaagcagtagatgagaaaatgaagtaagagatatagagtaataacaataaaagtcaatgatttcattttacaaaaaagtcattgtgtagtactcagatatttttaagagcaagtattattatgactaaagtatattatacttctaaattattatgattctcatctaatttcaagccacacataggcgccatttgaaagcattttgtgttacaacctatcaacaaaaatcaactaatagttttataacgtgcataggtttaccccatggggaattaaaatttttatctgcaagtatttctgttgttgtgagactttaggacaagacaacatttggtgttaacatagaagaatattctatggcttttttagctttaaagttcattactctaaaataaagtacacgtggtatttttttcttcctagtgttctcttattatatgtagagtattttcggttgttgtttttaacgtatacattatttttattaagtcatttcataaaagataagatatatactaatagacccttggttttctcctaatttaattatttcaagtcaagcaaaattgggcaattttctttcaggaaaaaaaaaatattgagcatgattttgaggtaaaactgattatttacagcatcttttctctaataggctaacatttatgatggatcttatttcaaagttgattattctcaaagaaaagtggagatattagaatttccgagtaaattgcattgttttaaaaagtactttaatgcattgttcacattgttgccagctattgaccaaaaaagagaagaagaaaaaagaaataaaaaaagcagtatctgctccaaacgtcaagttttgcagtttgaaagacttgtacattataattgtttttttctttttttggaaagcagtagtaattaataccaaaggcatagacaatttagggccataacctcccttcccccctctccacctttttttttttttttttttttttttaactttaaccatgataggcatctctgcaaggtagcttttaacatatttttttcctaatttttttccctccattcagtaagaaggataagcttttagagtacccagtcaccgtggtaactgccaaaaaaattctcctgaagtttgaagaggtcagctagcagggtcaacaaccctggcctctctctgagctcggtctagcatgccccagcctgcggttggagtgtcaggccagatctgaccctgggaggtggaccattctggctctgatataaatttttcgagtcagttcatggcctggactctccaggtggcctccaaaatcgattttgaccccctgaccctgtctcacggaggcatagcatccaccctaagtaaggatttagccaggaatgacagctttccactgagtgttattggggacagtataaacagtttggaaagcaagtaaggaggtgtgagggctagcaatcattaaaagcacattaaaaaacaatttttaaaaatctttattagagaaagttgtaaatgcatatctgttacagaattcctgtgatttgtagagttttctagtcagttttgaatataaataggtcacatatctttatctttttgcatactttgttacaaatatgcaaataagataggcatacttgctacaaaataggtacagcaggaatgtaatatgttcagaaaaggcaaactggttattaaaacacattaacaggtaaggagtttctaatattttaaatactaaaattttacatgtgtattttgaagtttttaaaatggaaaaataaagaacctttaaaaagaaaaaaaaaaaaaaaaaaa

SEQ ID NO: 1781 - DNA, 553 bp, Homo Sapiens
ttgcgtagggggcgggactaaggctgtcaattggtctgttttttgtgccgatcaatgagatgggtgcggtgattggctgactaccttgagagtagcgggttgagtgtgtaagccctgagtgagtgcagcgttttcttgggctatctgtctggtatctctctctaccagaagtgttctgccgtgttcccccagctctggtgtaccctggctctgcatctgcgtcgccatgatgtggccatacgtccagtgctcgtgctcagccagaacacaaagctgtgaatccgtgaagaaaagttcaatcttggaaacatcaatgcttgccaagactatttgcagatatcatccgaacatgtttgggacccaagtccatgatgacagatgcttataggacacccaatgggaggcattgtgatgaccaatgatggcaatgccattcttcggagagattcatgtccagcatccagcggacaagtccatgatctgaaattaggcgggaccccaggatgaagagggttggagaatgggaccaacatcagtaattcatactttgcag

SEQ ID NO: 1782 - DNA, 686 bp, Homo Sapiens
gctgggctccgcagcgcagccagcgcagcgcggcgccccgggcccggccccatgcccgcagccccgccggaccgtccttgaagctgcggtgcgcctagcccgcgccccctgcccgccggacaccattgccccgacggcgcggccgggcggcccggcgctccccaggctcctgcgcgggccgaacgacgctgctagcggccgccgcgggtgtggtgatgctgctggtgctggtggtgctcatccccgtgctggtgagctcgggcggcccggaaggccactatgagatgctgggcacctgccgcatggtgtgcgacccctaccccgacgcggggccccggcgccggcgcgcggaccgacggctggcgacgccctgagcgagcagagcggcgcgcccccgcacttccacgctggatgcagggcccccaggtgaagccgggccgcaccggcaagcccggccctccggggcctcccggggacccaggtcctcccggaccctgtggggccgcacgggggagaagtggtgagccaggcaagccgggccctccggggctgccgggcgcggggggcagcggctgccatcagcacttgcactacaccacggtgccgcgcgttgccttctacgccggctcaagaaccccaagagggtacgagtatcaagtttgagacgtgtccccaactaggcacac

SEQ ID NO: 1783 - DNA, 279 bp, Homo Sapiens
  misc_feature (11)..(11): n is a, c, g, or t
  misc_feature (43)..(44): n is a, c, g, or t
  misc_feature (74)..(74): n is a, c, g, or t
  misc_feature (94)..(94): n is a, c, g, or t
  misc_feature (98)..(98): n is a, c, g, or t
  misc_feature (230)..(231): n is a, c, g, or t
ctcgtgcaatnttgatggtcctacaggtgaaggccgacttttnngattcagaatgggtcatagtgctcctcttnccaatatcagatattatggncagnatggacagcagattctaagtgcaagtcaagatggaactcttcagtcattttccacggtacatgaaaaattcaataagagcttgggacatggattaataaataaaaagagagttaaacgtaaaggacttcagnntaccatgtcagtgagacttccacccatcacaaagttttgcagcagagg

SEQ ID NO: 1784 - DNA, 6627 bp, Homo Sapiens
gacccatgcggcagccgccctgctcccgaaggcgccggggccggcccagagcagggccactcggccggcggaggcggctggtgccgccactgccacacgaagctggtggagctcaagcgacaggcgtggaagctggtcagcgggcccgggaccaccctccgggatccttgcctctctgccctgcttctcgacaagctaccagcacctggggccctgccagcctgtcgcccagaggccgagcgccgctgtgacgtctgcgccacacacctgcagcagctcacacgggaggccatgcacctgctgcaggcccctgccagccatgaggaccttgacgccccccatggaggccccagcctcgcaccccccagcaccacgaccagctcgagggacacgccaggaccagcgggtcctgcagggaggcagccaggacgagctgggccagacaggaccaaggggctggcctggtcccccgggcccagtgtccaggtgtctgtagcacctgcgggtcttggaggggcgctgagcacggtcaccatccaggcccagcagtgcctggagggcatgtggagtgtctcgcgggtcaacagcttcctcccgccggcgtgcctggccgaggcagcggtggcggccgtggcggtggcagacacggtccgagaatgcccccccgtggccggccctgatggcttgtcgaaggcctggggccgtggtggagtctgcacgtcagccctggtcacccccaccccgggctcggtggggggctccacaggcccctcagctgcagcctccttcttcataagggctatgcagaagctcagcctggcctccaagaggaagaagccccacccgccaccgcctccagccacccgcggcacctccacctaccccaccgacttcagcggggtcctgcagctgtggccgcccccggcgcccccctgcctgctcagggccgcctccaagaccaaggacaaccctggcagcatcgggaaggtgaaggttatgctgcggatctggcccgcacagggggcccagcgctcggccgaggccatgtccttcctgaaggtggaccctcggaagaagcaggtgatcctctacgatcccgccgccggtcccccaggcagcgcaggcccccggcgagccgccactgctgcagttcccaagatgtttgccttcgatgccgtcttcccccaggactccgagcaggccgaagtctgctcggggaccgtggccgacgtgctccagtcggtggtcagtggggctgatggctgcattttttcctttggccacatgagcctgggcaagtcgtacaccatgatcgggaaggacagctcaccccagagcctgggcatcgtgccctgcgccatctcctggctcttcaggctcatcgaggagcgcagggagaggacgggcacccgcttctccgtccgggtctcagccgtggaggtgtgcgggcgcgaccagagcctgcgggacctgctggccgaggtggcccctggcagcctccaggacacccagtctccgggagtgtacctgcgggaggaccccgtgtgtggggcgcagctccagaaccaaagcgagctgcgggcacccacggccgagaaggcggctttctacctggatgcggccctggcggcccgcagcaccagccgagcgggctgtggcgaggacgcccgacgcagctcccacatgttgttcacgctgcacgtctaccagtaccgcatggagaagtgcggccggggaggaatgtccggaggccgcagccgcctgcacctcatcgacctgggcagctgtgaggcggcggctggcagggccggggaggctgctgggggtcccctgtgtctgtccctgtcggccctgggcagcgtcatcttggccctggtcaacggagccaagcatgtgccgtatcgggaccacaggctcaccatgctgctgcgtgaatccctggccaccgctggctgccgcaccaccatgatcgcccacgtgtcggatgcgccagcccagcacgcagagacactcagcaccgtgcagctcgccgcccgcatccaccgcctgcgcaggaagaaggccaagtacgcctccagctcctctggcggggagagctcctgtgaggaaggccgggcccgtcggcccccgcacctgcggcccttccacccacgcactgtggccctggaccccgaccgcacgcctccctgcctgcccggtgaccccgattactcctccagcagcgagcagtcctgtgacacggtcatctacgtggggcccggtggggcggcgctgtcagaccgggagctcaccgacaacgaaggtccgcctgacttcgtgcccatcatccctgccctgagccgccaccggccctccaagggtccccgagacgcagaccacttccgctgcagcaccttcgcggagctgcaggagcggctggaatgcatggacggcaacgagggtccctcaggaggtccaggtggcaccgacggagctcaggccagccccgcccgagggggccggaagccctcgccaccagaggctgcatcccccaggaaggccgtgggcaccccgatggctgccagcacccctcgaggcagttctggtccagacacccaccagggtacccctgagccctgcaaggccattgtctggggtgaccagagagaggacagcagcgcttggcctgagctgctggtcccggaaaaggctgcagtgagtggaggcaggaggccactgcccagcccggctcccccacctcctcagttgctggaagcctgcagagccccagaagagcctgggggagggggcactgatggagtggcacggacccctcccgtgggcatgagtgggcaggtggctgggtccccgatgcttcctggggccacctgcccccgcctggctgctggcagtcgctgtccggagcggggcctgctcaccaccacagtgaccctgcagcggccagtggagctcaacggcgaggacgagctggtgttcacggtggtggaggagctgtccctgggggcgcttgccggagctgggcggcccaccagcctggctagcttcgacagtgactgctccctgcgggccctggcctcggggtcccggccagtcagcatcatcagcagcatcaatgatgagtttgacgcctacacctctcaggcccctgagggggggcccctggagggggcagcctgggccggcagcagtcacggctcctccatcagctcctggctcagcgaggtcagcgtctgcactgccgacagccgtgaccccacgccgcagccccgcttcagccccgactcgctggcagggcttgaccctgggggcccccctgccctggatggttccctgggggatggaagctctgggttcctggggccagacagacctgacagtcctgggccaacctggggtccgtgccctggggaagtggctgcagtggccccatcccgacccggcagggagccccaggccgggccctcgcggtgggcatccgcagcccagaccatccactccagcctcccccggaaaccgaggactgcctctgccaccacccgtgtgggctgtgctcgcctgggccagagcccacctggccgtggaggcctgtttgaggacccatggctgctccgggtaggggagtgtgatacccaggcagcttctgctggcagggcccccagccccacacttggctccccccggctgcctgaggcccaggtgatgctagcctgtgcccagagagtggtggacgggtgtgaggtggcagccagggcggcccgcaggccagaggctgtggctcggatcccaccgctgcggaggggtgccaccacgctgggtgtgacaacgccagctgtgtcctggggagatgctcccacggaggtggtggcctgctcggggagcctgaaggcctcccccaccagcaagaagggtctggctcccaaggcgggcttcctcccgaggcccagtggggcggcccccccggccccacccacgcggaagtccagcctggagcagaggagcagcccggcctcggcccctccgcatgctgtgaacccggcgcgggtcggggctgctgctgtccttcgaggggaggaggagcccagacccagcagccgggctgaccactctgtccccagggccacgtccagcctgaaggcccgggccagcaaggtagaagcagcacaccgtcttgccggacacgcgtctctggagcggtacgaaggcctggcgcacagcagcagcaagggccgggaagcccctgggcggcctccccgggctgtacccaagctgggtgtgccaccctccagccccacacacggtccagctcccgcctgtaggagcggcgcagccaaggctgtgggggcccccaagccccctgttggtggaggcaagggccgtggcctagtggctggtgggtcgcgggctctggggccttcggtgaagctgtctacggcctctgtgacgggcaggagccctggcggccctgtggccggtcccagagcagccccacgggccgggcccagtgtcggggcgaaggctggccggggtaccgtcatgggcacaaagcaggcgctccgggctgctcacagccgcgtccatgagctgtcagccagtggagccccgggccgaggtggctcctcgtggggctcggcggactcagacagcggccatgacagcggcgtgaacgtgggggaggagcggccacccacgggcccggccctgccctccccctacagcaaggtgaccgccccacggcggccccagcgctacagcagcggccatggcagcgacaacagcagcgtgctgagtggagagctgccgcccgccatgggccgcaccgcccttttccaccacagcggtggcagcagtggctatgagagcctgcggcgcgacagcgaggccaccggcagcgcctcctccgcccctgactccatgagcgagagtggggctgcctccccaggcgcccgcacccgcagcctcaagtcccccaagaagagggccacaggtctgcagcggcggcgcctgattcccgccccactgcccgacaccactgccctgggccgtaagcccagcctccccgggcagtgggtggacctgcccccgcccctggctggctccctgaaggagccgttcgagatcaaggtgtacgagatcgatgacgtggagcgccttcagcggccccgccccaccccgagggaggcccccacccagggtctggcgtgcgtcagtacaaggctgcggctggcggagcgcaggcagcagcggctgcgggaggtgcaggccaagcacaagcacctgtgtgaggagctggccgagacccagggccggctgatgctggagcctggccgctggctggagcagtttgaggtggacccggagctggagcccgagtcggccgagtacctggcggccctggagcgagccacggcggccctggagcagtgcgtgaacctgtgcaaggcgcacgtcatgatggtcacctgcttcgacatcagcgttgcagccagtgctgccatcccggggccgcaggaggtggacgtctgaggctgggcgccggacaagaggagggggcgtgcagcgggctggaggacgggacgtgggacggagcgaggatgtggtgggggctgcggggggaggatgcggaggggtttctgtgcaggacgggagtctcagagaggagacggagtgtgggggagggagggccggccacgcggtggacagagcgagggtgccagggtgaccagaagaccgtcaccacccgacagcaacgcaagtgcctttgaccttgatttggacttttctcccttttgcatttggtgctacagacttgagacaccagcagaagttgtgttcagcccggccccgctgcgcctgtccgggccggggctggcgccggttgtgtttgtgtccaccttgccttctttgcagccaagcagtttttgtggagtggagtgggacttacctgcacgccccaggggtctttcaggattcaggatgacttttcttttacaatggtttcctctcggcagagcccgggttgtgggggatctgtgtggggttctcaacgcagatccatcctggggtctcccgggcagggatggctgacctcgagtcccctcccttcccgagaacccgctctgtcccgagggcagctaacaagggctgagccccaggtacaggttgcctcttccacggcaggaatttttaccaaaaccacaagcaaaaaacaaaacagaccaccacgaccaacaacaaagatggggggtagggttttgtaaaggttctgttaggttcatatttttatatcattttgcccataaatgcggaatttgccgtgggaatttgaagacaaatgatctatgtttttatggttttctagggaaggtgttctgggggccgggctctctccagctgtgggaggcctgctccctctggggggcaccctgggcagggtgggggggccttgggaggcgcttcttgccaaatgcagacgaggggtgagcctgccagcgtttgcgacgtccccgcacgacaggctcatactttctgaggatcgtgcatagcataggacgtctgaacctttgtacaaatgtgtagatgacatcttgctacagcttttatttgtgaattaaagatgcatcgatggtt

SEQ ID NO: 1785 - DNA, 1339 bp, Homo Sapiens
ggaccccgaaatggcgctgctggcggagcacttgctgaagccgctgcccgcggacaagcagatcgagaccgggcccttcctcgaggcggtgtcccacctgccgcccttcttcgattgccttgggtccccagtgtttactcccatcaaggcagacataagcggcaacatcacgaaaatcaaagctgtgtacgacaccaacccagccaagttccggaccctgcagaacatcctggaggtggagaaagaaatgtatggagcagagtggcccaaagtaggggccacactggcgctgatgtggctgaaaagaggcctccgcttcatccaggtcttcctccagagcatctgcgacggggagcgggacgagaaccaccccaacctcatccgtgtcaacgccaccaaggcctacgagatggccctcaagaagtaccatggctggatcgtgcagaagatcttccaggcagcactgtacgcagcaccctataagtctgacttcctgaaagcgctctccaaggggcagaatgttacggaggaggagtgcctggagaagatccgcctcttcctagtcaactacacggcgaccatcgatgtcatctacgagatgtacacccagatgaacgctgagctcaactacaaggtgtagtgcccactgctggacacgttcccgactcgtgggcacatggagaaacaggtaaaccagaatcactgtgaatcaagtcggtgaactgcccctggcctgtgtcccccagagcagcccagggtcctgccagagtctgcaggggacagccctcgttttttaagtctttttttttttttttttggtctattctaaaggaccagtaaataatgatcttacttccaaatctccttggaatttcacgacagcacagactgactttataccttcatttcagcgtggtaaaaaccgattaacacttctaatgagtcaagtcctagggttttttggttttgttttgttgccaacgaggaacacagctttggggaatggtgtcatccacctcgctttaaaaataagcacatgatggctgggcaccgtggcttacgcctgtaatcccagcactttgggaggctgaggcgggtggatcacctgagggcgggagtttgagacaacctggccaacatggtgaaaccccatcgcttctaaaaatataaaaaattagctgggcatggtggcgcacgcctgtagttccagctcctcaggtggctgaggcaggaaaatcgctttaacccggaaggtgaaggttgcagtgaactgagatcgccccattgcactccagcctgggcaacaagagcgaaactctgtctcaaaaaaaaaaaaaaa

SEQ ID NO: 1786 - DNA, 2470 bp, Homo Sapiens
acgaggcctggccggggcgggcggcgcgggggcggcatgagggcccgcggcccggggggctgaggcgcccgccgcctgccgcgggggccgctcgcgtcctccatggaggccggagaggaaccgctgctgctggccgaactcaagcccgggcgcccccaccagtttgattggaagtccagctgtgaaacctggagcgtcgccttctccccagatggctcctggtttgcttggtctcaaggacactgcatcgtcaaactgatcccctggccgttggaggagcagttcatccctaaagggtttgaagccaaaagccgaagtagcaaaaatgagacgaaagggcggggcagcccaaaagagaagacgctggactgtggtcagattgtctgggggctggccttcagcccgtggccttccccacccagcaggaagctctgggcacgccaccacccccaagtgcccgatgtctcttgcctggttcttgctacgggactcaacgatgggcagatcaagatctgggaggtgcagacagggctcctgcttttgaatctttccggccaccaagatgtcgtgagagatctgagcttcacacccagtggcagtttgattttggtctccgcgtcacgggataagactcttcgcatctgggacctgaataaacacggtaaacagattcaagtgttatcgggccacctgcagtgggtttactgctgttccatctccccagactgcagcatgctgtgctctgcagctggagagaagtcggtctttctatggagcatgaggtcctacacgttaattcggaagctagagggccatcaaagcagtgttgtctcttgtgacttctcccccgactctgccctgcttgtcacggcttcttacgataccaatgtgattatgtgggacccctacaccggcgaaaggctgaggtcactccaccacacccaggttgaccccgccatggatgacagtgacgtccacattagctcactgagatctgtgtgcttctctccagaaggcttgtaccttgccacggtggcagatgacagactcctcaggatctgggccctggaactgaaaactcccattgcatttgctcctatgaccaatgggctttgctgcacattttttccacatggtggagtcattgccacagggacaagagatggccacgtccagttctggacagctcctagggtcctgtcctcactgaagcacttatgccggaaagcccttcgaagtttcctaacaacttaccaagtcctagcactgccaatccccaagaaaatgaaagagttcctcacatacaggactttttaagcaacaccacatcttgtgcttctttgtagcagggtaaatcgtcctgtcaaagggagttgctggaataatgggccaaacatctggtcttgcattgaaatagcatttctttgggattgtgaatagaatgtagcaaaaccagattccagtgtactagtcatggatctttctctccctggcatgtgaaagtcagtcttagaggaagagattccacttgcacggcaacagagccttacgttaaattttcagtccagttatgaacagcaagtgttgaactctttctgcttgttttgattcaaagtgcagttactgatgttgttttgattatgcaactaagtaggcctccagagcctctctagtggcagagcagctcacactccctccgctgggaacgatggcttctgcctagtacttatccttgtgtttctgatgcagtggtagcattggttcaagttctctcctgctgtggtcagagttgcttcgatgttggccaagtgcttttcttcttgggctcccttctgacctgcaggacagttttcctggagccatttggtatgaggtattaatttagcttaactaaattacaggggactcagaggccgtgctcctgaccgatccagacactattactggctttttttttttttttttaacaatggtgtgcatgtgcaggaaatgacaaatttgtatgtcagattatacaaggatgtattcttaaaccgcatgactattcagatggctactgagttatcagtggccatttattagcatcatatttatttgtattttctcaacagatgttaaggtacaactgtgtttttctcgattatctaaaaaccatagtacttaaattgaacagttgcaaagatgtcttaattgtgtaaagaattggtgtagtcatgactttagctgatactcttatgtacgagatctgtctctgctgtttaacttcattggattaatcagctggtttcaactctactgcgaaacaaaaatagctccttaaaagtactgttctccttcagtggcatgtagttatctaatcaagacacctcattcaaacaaaacctgccttaggaaaatttaatatattttaaattattttaaaagaaatacaacatcttattctttagctttcaaaaaaaaaaaaaaaaaa

SEQ ID NO: 1787 - DNA, 2335 bp, Homo Sapiens
gaattccccccccccccccccgagagactggatggacccacaagggtgacagcccaggcggaccgatcttcccatcccacatcctccggcgcgatgccaaaaagaggctgacggcaactgggccttctgcagagaaagacctccgcttcactgccccggctggtcccaagggtcaggaagatggattcatacctgctgatgtggggactgctcacgttcatcatggtgcctggctgccaggcagagctctgtgacgatgacccgccagagatcccacacgccacattcaaagccatggcctacaaggaaggaaccatgttgaactgtgaatgcaagagaggtttccgcagaataaaaagcgggtcactctatatgctctgtacaggaaactctagccactcgtcctgggacaaccaatgtcaatgcacaagctctgccactcggaacacaacgaaacaagtgacacctcaacctgaagaacagaaagaaaggaaaaccacagaaatgcaaagtccaatgcagccagtggaccaagcgagccttccaggtcactgcagggaacctccaccatgggaaaatgaagccacagagagaatttatcatttcgtggtggggcagatggtttattatcagtgcgtccagggatacagggctctacacagaggtcctgctgagagcgtctgcaaaatgacccacgggaagacaaggtggacccagccccagctcatatgcacaggtgaaatggagaccagtcagtttccaggtgaagagaagcctcaggcaagccccgaaggccgtcctgagagtgagacttcctgcctcgtcacaacaacagattttcaaatacagacagaaatggctgcaaccatggagacgtccatatttacaacagagtaccaggtagcagtggccggctgtgttttcctgctgatcagcgtcctcctcctgagtgggctcacctggcagcggagacagaggaagagtagaagaacaatctagaaaaccaaaagaacaagaatttcttggtaagaagccgggaacagacaacagaagtcatgaagcccaagtgaaatcaaaggtgctaaatggtcgcccaggagacatccgttgtgcttgcctgcgttttggaagctctgaagtcacatcacaggacacggggcagtggcaaccttgtctctatgccagctcagtcccatcagagagcgagcgctacccacttctaaatagcaatttcgccgttgaagaggaagggcaaaaccactagaactctccatcttattttcatgtatatgtgttcattaaagcatgaatggtatggaactctctccaccctatatgtagtataaagaaaagtaggtttacattcatctcattccaacttcccagttcaggagtcccaaggaaagccccagcactaacgtaaatacacaacacacacactctaccctatacaactggacattgtctgcgtggttcctttctcagccgcttctgactgctgattctcccgttcacgttgcctaataaacatccttcaagaactctgggctgctacccagaaatcattttacccttggctcaatcctctaagctaacccccttctactgagccttcagtcttgaatttctaaaaaacagaggccatggcagaataatctttgggtaacttcaaaacggggcagccaaacccatgaggcaatgtcaggaacagaaggatgaatgaggtcccaggcagagaatcatacttagcaaagttttacctgtgcgttactaattggcctctttaagagttagtttctttgggattgctatgaatgataccctgaatttggcctgcactaatttgatgtttacaggtggacacacaaggtgcaaatcaatgcgtacgtttcctgagaagtgtctaaaaacaccaaaaagggatccgtacattcaatgtttatgcaaggaaggaaagaaagaaggaagtgaagagggagaagggatggaggtcacactggtagaacgtaaccacggaaaagagcgcatcaggcctggcacggtggctcaggcctataaccccagctccctaggagaccaaggcgggagcatctcttgaggccaggagtttgagaccagcctgggcagcatagcaagacacatccctacaaaaaattagaaattggctggatgtggtggcatacgcctgtagtcctagccactcaggaggctgaggcaggaggattgcttgagcccaggagttcgaggctgcagtcagtcatgatggcaccactgcactccagcctgggcaacagagcaagatcctgtctttaaggaaaaaaagacaagggaattc

SEQ ID NO: 1788 - DNA, 602 bp, Homo Sapiens
  misc_feature (46)..(46): n is a, c, g, or t
  misc_feature (99)..(99): n is a, c, g, or t
  misc_feature (458)..(458): n is a, c, g, or t
  misc_feature (495)..(495): n is a, c, g, or t
  misc_feature (505)..(505): n is a, c, g, or t
  misc_feature (532)..(532): n is a, c, g, or t
  misc_feature (539)..(539): n is a, c, g, or t
  misc_feature (599)..(599): n is a, c, g, or t
gggaggtctcctccaccccaaccgtcaccctgggtcccgactgccnacctcctcctcctccccctccccccaacaacaacaacaacaacaactccaagnacaccggccataagagtgcgtgtgtccccaacatgaccgaacgaagaagggacgagctctctgaagagatcaacaacttaagagagaaggtcatgaagcagtcggaggagaacaacaacctgcagagccaggtgcagaagctcacagaggagaacaccacccttcgagagcaagtggaacccacccctgaggatgaggatgatgacatcgagctccgcggtgctgcagcagcttgcttgcccaccccctccaatagaggaagagtgcccagaagacctcccagagaagttcgatggcaacccagacatgctggctcttttcatggcccagtgccagatcttcatggaaaagagcaccanggatttctcagttgatcgtgtccgtgtctgcttcgtngacaagcatnatgaccgggccgtgttgcccgttgggncttcagnaaagcttggaagcgcttcccattaacctgattgcacaattacccagctttcatgattggnaat

SEQ ID NO: 1789 - DNA, 790 bp, Homo Sapiens
tggcctgttgcagccatggtgcattgcagttgcgtgtgttcagaaagtatggaaatttcatcgataagctaagactcttcaccagggaggatccggtggaatgggttatcctcgtttaggtggagaaggtggaaaaggtggtgatgtctgggtgtagcccagaacagaatgactttaaaacaacttaaagacaggtatcctcggaaacggttgtggctggagtaggagcaaacagcaaaattagtgcactgaaaggctccaaaggaaaagactgggaaatccctgtgcctgtgggtatttcagtaactgatgaaaatggtaaaattataggagaactcagtaaagaaaatgacagaatttggtagctcaaggaggtctggtggtaaattacttacaaatttcttaccatgaaaggccagaaacgaataattcaccttgatctaaaacttatagctgatgtaggcctagtaggattcccaaatgctggaaaatcctcttgctaagtgtgtttctcatgcaaaacctgcaatgcagattacgcatttacaacattaaagcctgaacttggaaagataatgtacagtgatttcaaacagatatcagtagctgatcttccgggtttaatagaaggagcacatatgaacaaaggaatgggccacaaattcctcaagcatatagaaagaatagacaactacttttggtgtgatatttctgggattcaggtttcttctcacactcaatacaggacagttttggaacatatactggttcaaagagtgcatgtcccagg

SEQ ID NO: 1790 - DNA, 5021 bp, Homo Sapiens
gcccacccgtccagcaaaatagagtccctcagggtgacagttgacttcctgaaggtgcctcttggcctaaagaagccggtgctgaaggaggtggctgtggggccccccaagaggccccagcctgcggccctggagcgctacaaggcgcggcgttcagacgccatggacaccgagtcccagtactcgggctattcctacaagtcgggccactcccgcagctcccgcaagcacagggaccgccgggaccgacaccgctctaagagtcgagatgggggccgaggggacaagtcggtgacaatccaggctcccggggagcccctgctggacaatgagtccacacgaggggatgagcgggatgacaactggggggaaacgacgacagtagtaacgggcacctcagagcacagcatctcccatgatgacctcacacgcatcgccaaggacatggaggacagtgtccctctggactgctcccgtcacctgggtgtggcagcgggggccaccctggcactgctgtctttcctcacgcctctggccttcctgctgctgcccccactgctgtggcgggaggagctggagccttgcgggacggcctgcgagggcctcttcatctctgtcgccttcaagctgctcatcctgctactgggcagctgggctctgttcttccgccggcccaaggcctcgctgccccgcgtctttgtgctgcgtgccctgcttatggtgctggttttcctgctcgtggtctcctactggctcttctatggtgtgcgcatcctggatgctcgggagcgcagctaccagggcgtggtgcagttcgccgtgtcgctggtggacgcccttcttttcgtgcactacctggccgtggtcctgctggagctgcgccagctccagcctcagttcacgctcaaggtcgtgcgctccaccgacggcgccagccgcttctacaacgttggccatctcagcatccagcgcgtggcagtgtggatcctggagaagtattaccatgacttccctgtctacaaccctgccctcctcaacctgcccaagtccgtcctggccaagaaagtgtctggcttcaaggtgtattccctcggagaggaaaacagcaccaacaactccactggccagtctcgggctgtgattgcagcggcagctcggaggcgggacaacagtcacaatgagtactactatgaggaggctgagcatgagcgaagggtgcgcaagaggagggccaggcttgtagtggcggtggaggaggccttcactcacattaagcggctgcaggaagaggagcagaaaaaccccagggaggtgatggacccccgggaggcagcccaagccatctttgcatccatggcccgtgccatgcagaagtaccttcggaccaccaagcagcagccctaccacaccatggagagcatcctgcagcaccttgaattctgcatcacgcatgacatgacgcccaaggccttcttggagcgatacttggcggctggacctaccatccagtaccacaaggaacgctggctggccaaacagtggacattggtgagcgaggagccggtgaccaacggcctcaaggatggcatcgttttcctcttaaaacgccaggacttcagcctggtggtcagcaccaagaaggtcccattcttcaaactctccgaggaatttgtggatcccaagtcacacaagtttgtcatgaggctgcagtctgagacctcagtgtgactgtgcaacagcagggggagtgggaaactctggggggtcctgagggggtgggagggggcttggttctcaggcccagccacattcctgccacccttcttcttcttgctcttttttttttacttgaattaacgcacccccaccttctctcctcgcttcttccttattttaccccatgtgaacctggagagaccatcctgctgtcaacagtacctgggaaggactcccacctcaccaacaacttttgtattactctaggccctgcaggaatcagtgcctctctccctcttctttccctagtcttttcccagattacagtctctcctgaaagggcacagggccctgctgattgtactttcccctcctgagccccgactcacaaatccaagttcttaaaacatttctcttcagtggcccaacagggtttctctggggcacatggacatgactccagagagccacagtgccaaactcctccagggcagcaactggccctcctgtccctcaccccagccacaacaaaccctgggttctagggcagggatactcctgccacacagcccgagttagaaatctccttgctaggagcatttgcttccacatatatttagagcaaagaaggatcccatccttttcccagaaatctccacctaatgtttttggtttgtatggtcacgtgaccataggcaaccacgtggaaaccctctgtgaccacttttccagggacttaggggaaggtacctttcttccaatgtgtcttcctaggcagcccctgaggaggagggctgaatagatccctgaggttttggagagacccccatcactgactcctgctccctaaccctaccctcactttcgtccccgctcttcccagtgaaggatggtatgtagactcctgtacagacatagtggcttgcagaccctgacccagcccctgtggtcttagacaaatgtttttatttttgtcaccagccacccctgtcctgccgccttctctcgactccagagacctgttgcctcatctcttttggggaagagccggcagctcctcctcatcccctgccttaagtccagttctttgcctcaggggtctcgtttccttggccttccagggtccccaccccttttctccctgcctgattctctgagctctgggctccgtctgtattgggttgaggggcaaggattactgccttttgtaggtacttcacccctcaccccattttagcttccatagtctttgcaccaaatccaaattcttgataatttagatctcattttgagcaaaatttgctggccctctaataaatattttcaatataaatctgagcctttgactcagacatttttgccaaggagagtagaattaggaagtacccatatacatccagccaggatccacatggaggacctttctgatggctgcaatgactaggccattcctctgagtaactcacagtgtccttttgtaggcccttcttttccctgaaagactggttggtacttaccttgcagagcacatcctgggataagatccccagtgtctcccctgggaggctccccctctgtgtagcaccagccctgggaatgatggagcctagtgatcggggtttctcctgctgtcctttctgcaaaagttcacttgtttacccaccgcatgctagagaggagctcattggccaatgcttaccttgtccccaaaggggtgggttgtggagctcacttaggcagggcctctggctggggccagggttatgagataggcctgtatgaaatatgtcctgttctgggggtctgtctcttttcttctcttcaaaaactttgtgtcagagagtcccttctgagtcacataaatacctcactatcctggaaaacagggcctggatggtgactggggtcattgcctttgtggacaggatggagtgtggtgtggtctgaggagcaggttggggtgggggagagggaaaggatttgggatcttagttgctgccctaggttaggggctggggagtgtttattttaagatcctgccatgtttttaatcactgtgatttttttttcattcccctttcctaaaaaaaaatttttttcctccaactctctaagcactaagggctgtgcctgagaatggtagcattttggtcttttgcttcagaactgtggtatctttgtcttttttcattattattattattattattattattattactattgttttttaaaatgtcaggatgaattgtcagacatatggccatgtgtttgtcctctgcttctcccctgtgggaagttgtctccatgctgtgaactgctgtggggtgtgcagctgactcagtccctctgagcagtttccccactgtgtctgtcccatcatgcgctggatctgctcattctcctgctgtgggggtatgcccacctcttacccccttgacaccatagggctgctgtggctgggcctcaccagcactgtcttttgtgtgactcatggcatcctcgttcatccccaccgtgcctagcaggccttccttttcaccacctcggaacgcttgcctttcctccctccacaacaggacgctgtgcctcagtccttcacctacctcgccactctgccactgtccccattggtcctttctcctaaactggtctttgtgctctctttgttttttcttatttccctcttgtctctcattttttcttcccattcccctcccatttcagcccttaacttttctctttcccatctccactcagtattccaatggcaaaccctgatgatgtaacacctgcgatgagacatcggactctccggaactttctcatctgacacgtctttttcccagggttcgtacttctcctccattggtcccaggctaactcccctgttcctctgtggtgtctgtcagtccgtctgtcttctctttcctctgcccttcccacagggcagtatctgctgatggattcagtcctggtgtgtgattgttgtgatttgttcttccgtgcgcaaaaggaagagggctttttgagtcccttccaagtgagattgtaaatgtagaattttccactgttggatctagattttttttccttttttttgggggggtggggttacagagctgagaccttgtgcatgcatgtagaaaattgtaaaatgtaaattttttttaatatataaaaagcttgtttctacagtttgcagtggatctaaacattacggcaattttaggatttttttcttaaacataggaactaaaactgtacaaattttttttatataaaataaagacatttgacttttg

SEQ ID NO: 1791 - DNA, 1067 bp, Homo Sapiens
cggctcaagtgaactgactctgctagaacagtgccgtgcttttccacagaaggttagaccctgaaagagatggctcagcaccacctatggatcttgctcctttgcctgcaaacctggccggaagcagctggaaaagactcagaaatcttcacagtgaatgggattctgggagagtcagtcactttccctgtaaatatccaagaaccacggcaagttaaaatcattgcttggacttctaaaacatctgttgcttatgtaacaccaggagactcagaaacagcacccgtagttactgtgacccacagaaattattatgaacggatacatgccttaggtccgaactacaatctggtcattagcgatctgaggatggaagacgcaggagactacaaagcagacataaatacacaggctgatccctacaccaccaccaagcgctacaacctgcaaatctatcgtcggcttgggaaaccaaaaattacacagagtttaatggcatctgtgaacagcacctgtaatgtcacactgacatgctctgtagagaaagaagaaaagaatgtgacatacaattggagtcccctgggagaagagggtaatgtccttcaaatcttccagactcctgaggaccaagagctgacttacacgtgtacagcccagaaccctgtcagcaacaattctgactccatctctgcccggcagctctgtgcagacatcgcaatgggcttccgtactcaccacaccgggttgctgagcgtgctggctatgttctttctgcttgttctcattctgtcttcagtgtttttgttccgtttgttcaagagaagacaagatgctgcctcaaagaaaaccatatacacatatatcatggcttcaaggaacacccagccagcagagtccagaatctatgatgaaatcctgcagtccaaggtgcttccctccaaggaagagccagtgaacacagtttattccgaagtgcagtttgctgataagatggggaaagccagcacacaggacagtaaacctcctgggacttcaagctatgaaattgtgatctaggctgctgggct

SEQ ID NO: 1792 - DNA, 454 bp, Homo Sapiens
aatttgtttcatccattttaatcaacttgacacacttaaaaaacagatacccatgacttttcccaaaattgacttttactaattgaagtcattcttgttctttagagatttcagcggaaaataacattagagaaactgaatcccatgcaaatttcactttaattcattagcaaggttttcttctatctttatttaataaagtctgacaataattcagtaagatctgacaataattttttctcaatgatatattcaagtatttccctaatttgtattatatacagtagctctattaaaatattaaagcattgtatatggtatatatagtatccttctagttttttatatttcttgaatagcctgggacatttccaaagctatatatcttcacatagtaaaagtcagtaaagtaatattttaatggggtaaaatctataaaagtagcagattggta

SEQ ID NO: 1793 - DNA, 471 bp, Homo Sapiens
tttttttttttttttttttttttttttttgtttttagtctcgcttttcggttgccgttgtcttttttccttgactcggaaatgtccggtcgtggtaagcagggtggcaaggcgcgcgccaaggctaagtcgcgctcgtcgcgcgggtgctgcagttccccgtgggccgcgtgcaccggttgctccgcatggcaactattcggagcgcgtgggcgcggcgccggatctatctggccgcggtgctcgagtacttgactgccgagatcctggagcttgccggcaacgcggcgcgatcaacaagaagacgcgcatcatcccgcgcaacctgcagctggccatccgcaacgacgaggagctcaacaagctgctgggccgcgtgaccatcgcgcagggtggcgtcctgcccaaaatcaaggccgtactgctgcccaagaagacggagagccaccacaaggccaagggcaagtgaggc

SEQ ID NO: 1794 - DNA, 5190 bp, Homo Sapiens
ccagaagttctccagggcttccgcagagcactttttcgctgcctgtgagctgcagcgcgggagagctcgggctcgcgcggaccccagcgcctggcaggctgacagcgctctctcgccccaggtgcccgcgcgcgtggtgagcagctgcaccaggtggcgtccggggtggggtcaatgaagtgcagcctgaggaagatgtggcgccctggagaaaagaaggagccccagggcgttgtctatgaggatgtgccggacgacacggaggatttcaaggaatcgcttaaggtggtttttgaaggaagtgcatatggattacaaaactttaataagcaaaagaaattaaaaacatgtgacgatatggacaccttcttcttgcattatgctgcagcagaaggccaaattgagctaatggagaagatcaccagagattcctctttggaagtgctgcatgaaatggatgattatggaaatacccctctgcattgtgctgtagaaaaaaaccaaattgaaagcgttaagtttcttctcagcagaggagcaaacccaaacctccgaaacttcaacatgatggctcctctccacatagctgtgcagggcatgaataatgaggtgatgaaggtcttgcttgagcatagaactattgatgttaatttggaaggagaaaatggaaacacagctgtgatcattgcgtgcaccacaaataatagcgaagcattgcagattttgcttaacaaaggagctaagccatgtaaatcaaataaatggggatgtttccctattcaccaagctgcattttcaggttccaaagaatgcatggaaataatactaaggtttggtgaagagcatgggtacagtagacagttgcacattaactttatgaataatgggaaagccacccctctccacctggctgtgcaaaatggtgacttggaaatgatcaaaatgtgcctggacaatggtgcacaaatagacccagtggagaagggaaggtgcacagccattcattttgctgccacccagggagccactgagattgttaaactgatgatatcgtcctattctggtagcgtggatattgttaacacaaccgatggatgtcatgagaccatgcttcacagagcttcattgtttgatcaccatgagctagcagactatttaatttcagtgggagcagatattaataagatcgattctgaaggacgctctccacttatattagcaactgcttctgcatcttggaatattgtaaatttgctactctctaaaggtgcccaagtagacataaaagataattttggacgtaattttctgcatttaactgtacagcaaccttatggattaaaaaatctgcgacctgaatttatgcagatgcaacagatcaaagagctggtaatggatgaagacaacgatgggtgtactcctctacattatgcatgtagacaggggggccctggttctgtaaataacctacttggctttaatgtgtccattcattccaaaagcaaagataagaaatcacctctgcattttgcagccagttatgggcgtatcaatacctgtcagaggctcctacaagacataagtgatacgaggcttctgaatgaaggtgaccttcatggaatgactcctctccatctggcagcaaagaatggacatgataaagtagttcagcttcttctgaaaaaaggtgcattgtttctcagtgaccacaatggctggacagctttgcatcatgcgtccatgggcgggtacactcagaccatgaaggtcattcttgatactaatttgaagtgcacagatcgcttggatgaagacgggaacactgcacttcactttgctgcaagggaaggccacgccaaagccgttgcgcttcttctgagccacaatgctgacatagtcctgaacaagcagcaggcctcctttttgcaccttgcacttcacaataagaggaaggaggttgttcttacgatcatcaggagcaaaagatgggatgaatgtcttaagattttcagtcataattctccaggcaataaatgtccaattacagaaatgatagaatacctccctgaatgcatgaaggtacttttagatttctgcatgttgcattccacagaagacaagtcctgccgagactattatatcgagtataatttcaaatatcttcaatgtccattagaattcaccaaaaaaacacctacacaggatgttatatatgaaccgcttacagccctcaacgcaatggtacaaaataaccgcatagagcttctcaatcatcctgtgtgtaaagaatatttactcatgaaatggttggcttatggatttagagctcatatgatgaatttaggatcttactgtcttggtctcatacctatgaccattctcgttgtcaatataaaaccaggaatggctttcaactcaactggcatcatcaatgaaactagtgatcattcagaaatactagataccacgaattcatatctaataaaaacttgtatgattttagtgtttttatcaagtatatttgggtattgcaaagaagcggggcaaattttccaacagaaaaggaattattttatggatataagcaatgttcttgaatggattatctacacgacgggcatcatttttgtgctgcccttgtttgttgaaataccagctcatctgcagtggcaatgtggagcaattgctgtttacttctattggatgaatttcttattgtatcttcaaagatttgaaaattgtggaatttttattgttatgttggaggtaattttgaaaactttgttgaggtctacagttgtatttatcttccttcttctggcttttggactcagcttttacatcctcctgaatttacaggatcccttcagctctccattgctttctataatccagaccttcagcatgatgctaggagatatcaattatcgagagtccttcctagaaccatatctgagaaatgaattggcacatccagttctgtcctttgcacaacttgtttccttcacaatatttgtcccaattgtcctcatgaatttacttattggtttggcagttggcgacattgctgaggtccagaaacatgcatcattgaagaggatagctatgcaggtggaacttcataccagcttagagaagaagctgccactttggtttctacgcaaagtggatcagaaatccaccatcgtgtatcccaacaaacccagatctggtgggatgttattccatatattctgttttttattttgcactggggaaataagacaagaaataccaaatgctgataaatctttagaaatggaaatattaaagcagaaataccggctgaaggatcttacttttctcctggaaaaacagcatgagctcattaaactgatcattcagaagatggagatcatctctgagacagaggatgatgatagccattgttcttttcaagacaggtttaagaaagagcagatggaacaaaggaatagcagatggaatactgtgttgagagcagtcaaggcaaaaacacaccatcttgagccttagctcctcagaccttcagtgaggcttctaatggggggtgcatgacttgctggttctaactttcaatttaaaaagagtgaggaagaagcagaatgattgattttactgcgtgtgaaatcatggttcctgcatgctatataaaagtaaaccatcttttatcctctattcatattttctaccaatcactatgtattggggatatctttgcagatatgttcaaattggactggactttgatgagatataatctcattatttgaatgggtagaaaatgaatttgctagaacacacatttttaatgaaaagaagtaataaatgtaactattaagctaaaatgcaaatgtcagtactgaattcctgcttgttaattacataatatgtgatgctctagaaaatagtcacaagtattaataatgccttagatgatagtcttaaatattaggttgaggtctacctaacctaagctgcttcctggaaagcttcatgttgaaagaacctatgggtggcaccatgtggacttttctgtccctactgtgatgaatagccccacccttcttgctgtccccaacacacctgatgtcactttgagccatatagttgaagtacaaattaataggccttatgatatgcacgaattttactatagataatatatgttgtttctggttttgtttgccaatgagcataataaatgtaaaacctatatagtatccctgtgattattgtatgagcctttgtttgagatttgaaaaaaacatggctccatcacatattcccttttttcttttgatgtctactcaaatcatgaattaatcacatacctcatcattaatcttttcaaggtccttctattgttttgtctgattttctccatcatcctgattagcatgtttattccctcactacccccaggagatattcactgtaatgaatatgtctttggctatgtatgtgtccttgtgttatgttgtacagtgttgttttgagtctgttattatttacacagatgttattatgctatagcttctatttctgtttttgcttcttatttctcttataattctcacttatttcctattttttctactcatttctatttgttactcctttttactggacatgatgtttacaagatacaactgtgttactgtattccatctagtacggggcctttggtgtggcttactatttcattgtgtgcacccacccacccaccacactggacttttctagagatggacagcttggttacctccaccttcctgcactcattctcaaacatactgatgttcatacaaaccagcagagtgctgagggacgatatgtactattacaaaaccagacacttttacattcatggtccaacagaacacatggcctagaggcaatgttgcatataccttaatctttgatatgaataatatctttgttctttatatttcttaaaacagaaagggtggaaaatcactatacagaagcaatatccaaagatctcctgatcataaagacaaggggtcttttcagtcttccctctcctcaaaccttgtgtagcattgcacaatatagatctcagtcaacattcactgagtgccaagaatgtgagaaacactgtaccatgcctgtcatgcgaaatatttaaataaacagattgtcttacag

SEQ ID NO: 1795 - DNA, 358 bp, Homo Sapiens
gcggccgctatgaagcgatcgaccagcgtctgctcgaccggtgcgtcgacgaggaaatcagcctcggcgatttcgtgctgtcgggcggcgagctgccggcgatggcgatgatggatgcggtcgtgcggttactgcccggcgtgctgaacgattcgctgtcggccgtgcaggacagtttcgccgatggcctgctcgattgtccgcactacacgcgcccggaggagtatgacggcgtgcgtgtgccggacgtgctgctcggcgggcatcatgccgagatcgagcggtggcggcggcaggaagcactgaggaatacgttgcggaagcggccggacctggatcgtccggggcgcgccgcgag

SEQ ID NO: 1796 - DNA, 352 bp, Homo Sapiens
  misc_feature (79)..(79): n is a, c, g, or t
  misc_feature (116)..(116): n is a, c, g, or t
  misc_feature (153)..(153): n is a, c, g, or t
ctaccacccaactggccccagtacattcattctctcaggaaaaaaaacaaggtccccacagcaaagaaaaggaataggntcaagagatacgtggctgctggcagagcaagcatganttcgatgacttcagcagttccggtggccaattctgtnttggtggtggcaccccacaatggttatcctgtgaccccaggaattatgtctcacgtgcccctgtatccaaacagccagccgcaagtccacctagttcctgggaacccacctagtttggtgtcgaatgtgaatgggcagcctgtgcagaaagcttttgaaagaaggcaaaaccttggggggccatccagatcatcattgg

SEQ ID NO: 1797 - DNA, 335 bp, Homo Sapiens
  misc_feature (2)..(2): n is a, c, g, or t
  misc_feature (54)..(54): n is a, c, g, or t
  misc_feature (87)..(87): n is a, c, g, or t
  misc_feature (126)..(126): n is a, c, g, or t
  misc_feature (272)..(272): n is a, c, g, or t
tnaagacctgggcccctgctcagtgcctttgctctagaatgggtccagcttggntttggctactgggaacagggatcctggcctctntccactgtcagccccttcttgcccatggagataaaagtntgcaggggcctcaaccccccaggcatcagctctcagagccagcccccgcctaccacagaatcacacccaccattaccaattttgctttgcgtttgtataaagagctggcagcagacgcccccggaaacatcttcttctcgccagtnagcatctccaccaccctggccctgctctctcttgggggcccaagctaacaactcagctctgat

SEQ ID NO: 1798 - DNA, 647 bp, Homo Sapiens
ataaaatcctttttttgttgttttctgtttgtttgtttgttttggagaaggagtctcgctttgtcacccaggctggtgtgcagtggcacgatctcggctcactgcaacctccgcctcccaggttcaagcgattctcctgtctcagcctcctgagtagctgggattacagacgtgcgccatcacgcccagctaatttttgtatttttagtagatacggagttttgccttgttggccaggctgtgctggagctcctgacctcaggtgattcacctgccacagcctcccaaagtgctgggattacaggcgtgagccacagcaccctgccaaataagatcctttttaaaaaatatctgaaaaaagcttcatatctttacaaactcataaaatagctgattgggccatggaggagatgaggctgtttagaactggttttgtttcaagtttgtcaattttccctgtatgagaacttgggtaaagcacaaagaaacatacagtgctagtaacaggtctcctgcgccctggaactaggtgtttggaggaaggactaaaccccgggggaggtgagtataaaataattccactaagatcacctcctcagtccccagaaggctgatggtggatcctctggccatctcctgtggggtct

SEQ ID NO: 1799 - DNA, 454 bp, Homo Sapiens
  misc_feature (4)..(4): n is a, c, g, or t
tttntttaataaggctttataactatggcgtggatccttttgtgctagtcttctaagaagggccattttattttttagagtcacttctaaagtcatgtggtaattaactttggagactgttttgcgtatgagtgctgatacaaattaaaacccaagtagacctcattgcatgtcaccctatgaatgttgacaatggaaggaataccttgcctgtagtatactgtcacttctggattgataagctgaggaagaaagttaagtttcttttttacataagtcagaaaaacttacagctggtgttcctagtttcctggttgacctcagcagatgaagtgaacagatagtgttaattcagattgaagaaattatctgaatcttggtttgtgtagatttacaatctacatgcaatattaactaaatcagatagcttttacagtttcacatgtgtacatag

SEQ ID NO: 1800 - DNA, 5994 bp, Homo Sapiens
gaggtttgggaggcgcgggagatgtccaccctgggctggtggcgccgccgggcgccgggcgccatgagggtgcgctaggcggctgttcgtgcccgaggctgcgcagcactgaggtgagctttgccttcttgatcttccgtccttcttggagacgactggcgagaggaagagggactaggtccaaacgctaggtggctgggtccagccggagacccgcaccaaggaggagatcatcgagctcttggtccttgagcagtacctgaccatcatccctgaaaagctcaagccttgggtgcgagcaaaaaagccggagaactgtgagaagctcgtcactctgctggagaattacaaggagatgtaccaaccagaagacgacaacaacagtgacgtgaccagcgacgacgacatgacccggaacagaagagagtcctcaccacctcactcagtccattctttcagtggtgaccgggactgggaccggaggggcagaagcagagacatggagccacgagaccgctggtcccacaccaggaacccaagaagcaggatgcctccgcgggatctttcccttcctgtggtggcgaaaacaagctttgaaatggacagagaggacgacagggactccagggcttatgagtcccgatctcaggatgctgaatcataccaaaatgtggtggacctcgctgaggacaggaaacctcacaacacaatccaggacaacatggaaaactacaggaagctgctctccctcggagtgcagcttgctgaagacgatggccactcccacatgacgcagggccactcatcaagatccaagagaagtgcctacccaagcaccagtcgaggtctaaaaactatgcctgaagccaaaaaatcaacccaccggcgggggatttgtgaagatgaatcttcccacggagtgataatggaaaaattcatcaaggatgtgtcacgcagttccaaatcgggaagagcaagggagtcaagcgaccggtcacagagattccccagaatgtcagatgataactggaaggacatttcattgaacaagagggagtcagtgatccagcagcgggtttatgaagggaatgcatttaggggaggctttaggtttaattcaacccttgtttccagaaagagagttcttgaaagaaagaggcgctatcattttgacacagatgggaagggctcgattcacgatcaaaaaggctgtcccaggaagaagccctttgaatgtggtagtgagatgagaaaagccatgagcgtgagcagcctgagcagcctcagctccccctcctttaccgagtcacagccaattgattttggggcaatgccatatgtatgtgatgagtgtgggaggtcgttcagtgtcatctcagaatttgttgagcaccagatcatgcatactagagagaacctctatgagtatggtgagtcctttatccacagtgtggctgtcagtgaagttcagaaaagtcaggttggagggaaacgttttgaatgtaaggactgtggagagaccttcaataagagtgccgccttggctgaacatcggaagattcatgctagaggttatcttgtggaatgtaagaatcaggaatgtgaggaagccttcatgcctagccccacctttagtgagcttcagaaaatatatggcaaagacaaattctacgagtgcagggtgtgtaaggaaaccttccttcatagttctgccctgattgagcaccagaaaatccactttggggatgacaaagataatgagcgtgaacatgaacgtgaacgtgaacgtgagcgcggggaaacctttaggcccagcccagcccttaatgagtttcagaaaatgtatggtaaagagaaaatgtacgaatgtaaggtgtgtggggagactttccttcatagctcatccctgaaagaacatcagaaaatccatactagagggaacccatttgaaaacaagggtaaagtgtgtgaggaaacctttattcctggtcagtcccttaaaaggcgtcagaaaacttacaataaggagaagctctgtgactttacagatggccgggatgccttcatgcaaagctcagagctcagtgagcatcagaaaattcattctcgaaagaacctctttgaaggcagagggtatgagaaatctgtcattcatagtgggccattcactgaatctcagaagagtcatactataacaagacctcttgaaagtgatgaggacgaaaaggcgttcaccattagctctaacccctatgaaaaccagaagattcccactaaggaaaatgtctacgaggcaaaatcatatgagaggtctgttattcatagcttagcctctgtggaagctcagaaaagtcacagtgtagcagggcccagtaaaccaaaagtaatggcagagtctaccattcagagcttcgatgctatcaaccatcagagagttcgtgctggagggaacacctctgaaggaagggaatacagtaggtctgttatccatagcttagtggcttccaaacctccaagaagtcacaatggaaatgaattggtggaatctaatgagaagggagaatcctccatttatatctcagaccttaatgataagcgacagaagattcctgccagagagaacccttgtgaagggggcagtaagaatcgcaactatgaagactctgtcatacagagtgtattccgtgccaaacctcagaaaagtgttcctggagagggatctggtgagtttaagaaggatggcgaattctctgttcccagctcaaatgtccgtgaataccagaaggctcgtgctaaaaagaaatacattgagcataggagcaatgagacctctgtaattcactctctgccttttggtgaacaaacatttcgccctcgagggatgctctatgaatgtcaggagtgtggggagtgctttgctcatagctctgacctcactgagcaccagaagattcatgatagggagaagccctctggaagcagaaactatgaatggtctgtcattcgcagcttggcccctactgaccctcaaacaagttacgcccaagagcagtatgctaaagagcaagcgcggaacaaatgtaaggacttcagacaattttttgctaccagcgaagacctcaacacaaaccagaaaatctatgaccaagagaagtctcatggcgaggagtctcaaggcgagaatactgatggggaggagacccacagcgaggagacccatggtcaggagacaattgaagaccctgtcattcaaggctcagacatggaagaccctcagaaggatgaccctgatgacaaaatctatgaatgtgaggactgtggcctgggctttgtggatctcacagacctcacagaccatcagaaagtccacagcaggaagtgcctggttgacagtcgggagtacacacattctgtaattcacacccattccatcagcgagtatcagagagattacactggagagcagctgtatgaatgtccaaagtgtggggaatcttttattcatagctcattccttttcgagcatcagagaatccatgaacaagaccagttgtattccatgaaggggtgtgatgatggttttattgccctcttgcccatgaagccacggaggaatcgtgctgcagagaggaatcctgctcttgctgggtcggccattcgatgccttttgtgtggacaaggcttcattcatagctctgcccttaatgagcatatgagacttcatagggaagatgatttactggagcagagccagatggctgaggaagctatcattccaggcttagccctcactgagtttcagagaagtcagaccgaagagagactctttgaatgtgcagtctgtggagaatctttcgtcaacccagcagaacttgcagatcacgtaactgttcataagaatgagccctatgagtacgggtcctcctatactcacacctcatttcttactgagcccctcaaaggagctataccattctatgaatgcaaggattgtggtaagtcctttattcatagcacagtcctcactaaacataaggagcttcatctggaagaagaagaagaagatgaagcagcagcagctgcagcagcagcagcccaggaagttgaagccaatgtccatgttccacaagtagttctgaggattcagggcttaaacgtagaggctgctgagccagaagtggaggctgccgagccagaagtggaggctgctgagccagaagtggaggctgctgagccaaacggagaggctgaagggccagatggagaggctgcagagcccattggagaggctggacagccaaatggagaggccgagcagccaaatggggatgctgatgagccagatggtgcaggtattgaagacccagaagaaagagctgaagagccagagggaaaagctgaagagccagagggagatgccgacgagcctgacggtgtgggaattgaagacccagaagaaggtgaagatcaagagattcaggtagaagaaccatactatgactgccatgaatgcacagaaaccttcacttccagcacagcattcagtgaacacctgaaaactcatgccagcatgatcatatttgagcctgcaaatgcctttggggagtgctcaggctacatcgaacgtgccagcaccagcacaggtggtgccaatcaagctgatgagaagtacttcaaatgtgacgtctgtgggcagctcttcaatgaccgcctgtccctcgccagacaccagaatacccacactggctgagggcatggggtaaaggttagaaaaccttcacctaggacttgacccttaccaaaccacagagaatccaaaccaatccatgataatgtcagtaggagacttaaccttagtgtgttacacacctgacttaacatctctaaactcagattgaaaagagaccgaatgtgcagattccacagtcttaagctttccccttcagatgtcagtgtctgcatgtgggaaagccatagcacacatcttacctttccaagtaatcagattgagaaaaccctatgagtattccagactacagagtttgcccaaatcaactgtaaatgacacttgtgtaacgtatatatagtgtttcatgaggtgtatataaaatagcaaattatgacagaacagtgatcacatatatttggatttatatgatatacagttacagtttactctgcagaggtaccttacctggtattctttgaattttttttttttttggaggaggaagagagcaacaaatttgattatatttttaagtgtcttagatcctgagaaagatttattgtgcattatttgaaccctgtcaatatctttttgagtaattgttttgtttcttacccttaaatagtcttgtgaagctgtaggcatgatagataacatggcttttactccttactgtttgaaaagataagtactttagcttctttctgcagccatttcatctgcaccaacactttggaacctaatactgtgtaaggctttacaatatacggattggctttttgtgacccagattgattggttgccacatgttatgtttgttgaagtggttctcatgcaaaaatattacacatttgtgttctgggtttttttttttttttaaccaactcaatatgtgtttgatgatagtgaattgataaaacccgaagcttttccctgtaaatcttacatctttgcctttaaagaatgggttacaaccatcactagatcacagtagtgcctaatgaaggttgagaaccgtaggagaggctctcatgctgtaaataatgttgcaggctaataacctttcatcacttcctttgtgcgcttcctgccttaagtgacaagtagcaacatggcttgggtcccctgtgcagcatcagcttatgctgccacaagtcagtttgcaccctaggtgcccaggagctagtatccttagatctttctatcgctaacttaattctcttcgttatttatctgaccctctaactccatgtctaacttgcatt

SEQ ID NO: 1801 - DNA, 2643 bp, Homo Sapiens
acacacacaaacgccttcttcccggagtattgaatagttgggaattggaacccctccagggggaaccaaacattgtcgttcagaagaagacaaagagagattgaaatgaagctgttgatttcaacacacaaattctggtggtagatgaaagcaaagcaagtaagtttctccgaatccctagtcaactggaggtagagacggactgcgcaggttaactacagctcccagcatgcctgaggggcgggctcagcggctgcgcagactggcgcgcgcggacggtcatgggacttcagcatggcggtgtttgcagatttggacctgcgagcgggttctgacctgaaggctctgcgcggacttgtggagacagccgctcaccttggctattcagttgttgctatcaatcatatcgttgactttaaggaaaagaaacaggaaattgaaaaaccagtagctgtttctgaactcttcacaactttgccaattgtacagggaaaatcaagaccaattaaaattttaactagattaacaattattgtctcggatccatctcactgcaatgttttgagagcaacttcttcaagggcccggctctatgatgttgttgcagtttttccaaagacagaaaagctttttcatattgcttgcacacatttagatgtggatttagtctgcataactgtaacagagaaactaccattttacttcaaaagacctcctattaatgtggcgattgaccgaggcctggcttttgaacttgtctatagccctgctatcaaagactccacaatgagaaggtatacaatttccagtgccctcaatttgatgcaaatctgcaaaggaaagaatgtaattatatctagtgctgcagaaaggcctttagaaataagagggccatatgacgtggcaaatctaggcttgctgtttgggctctctgaaagtgacgccaaggctgcggtgtccaccaactgccgagcagcgcttctccatggagaaactagaaaaactgcttttggaattatctctacagtgaagaaacctcggccatcagaaggagatgaagattgtcttccagcttccaagaaagccaagtgtgagggctgaaaagaatgccccagtctctgtcagcactcccttcttcccttttatagttcatcagccacaacaaaaataaaacctttgtgtgatttactgttttcatttggagctagaaatcaatagtctataaaaacagttttacttgcaatccattaaaacaacaaacgaaacctagtgaagcatctttttaaaaggctgccagcttaatgaatttagatgtactttaagagagaaagactggttatttctcctttgtgtaagtgataaacaacagcaaatatacttgaataaaatgtttcaggtatttttgtttcattttgtttttgagatagggtctttgttgctcaggctggagtacagtggcataatcacagctcactgcaacctcaatcctgggctcaagtgatcctcccgcttcagcctctcaagcagcgggaactacaggtgtgcactaccacacctggctattttttttttttttttttttttcccttgtagagacatggtctcactatgttgctgaggctggtctcaaactcctaggatcaagccatcctcccgctttggcctcctaaagtgctgggattacatgagccaccacatgcagccagatgtttgaatattttaagagcttctttcgaaagtttcttgttcatactcaaatagtagttattttgaagatattcaaacttatattgaagaagtgactttagttcctcttgttttaagcttctttcatgtattcaaatcagcatttttttctaagaaattgctatagaatttgtggaaggagagaggatacacatgtaaaattacatctggtctcttccttcactgcttcatgcctacgtaaggtctttgaaataggattccttacttttagttagaaacccctaaaacgctaatattgattttcctgatagctgtattaaaaatagcaaagcatcggactgaaccaactttggaaataatttatttttataatgggatcatgttaagtagaagtagctttttatgcaaatacatgcatttatgcaatattaatgtaagggctctaaaacaatggagtagagccagaggtataactgaataagaaatttttttaagcaagagaaagacaactgttctgcgggttggagaaaatacaattttttttttttttttttttgagacagtctcgctctgtcccccaggctggagtgcagtggctcgatctctgctcactgcaagctccgcctcctgggttcatgccattctcctgcctcagcctcctgagtagctgggactacaggcgctcgccatgtatttagcagagacggggtttcaccgtgttagccaggatggtctcaatctcctgacctcatattccacccgcctcggcctcccaaagtgctgggattacaggcgttagccactgcgcccggcccgagaaaatacagttttaaaaagagaaagctttataacctcaccaatgaatacaaatgtttaaataaaatattgattaaaaaaacattaaaagcgaaaaaaaaaaaaaaaaaaaaaaaaaaa

SEQ ID NO: 1802 - DNA, 543 bp, Homo Sapiens
tagcggtccagaggatcccgagctgccacaaaggatgccacatgctttaaaaacatctacataatggccaaagccagggccccaaatcaaaaggtggtcccagttgaaagtccctgcttgctgccctagcttcatgggcagtgtgttgtcagcagtgcctggtgctagctgcctgggtgcccacaggtcctccctcggccctgcgaccgtggtaccttcgaggcttcagtctggctccataattatcttcatcatctgcatcagattcattgacttgagataatttgggcattctggaagtatataccattggcttctccctgtcatattccatttctgagcaagtgaaagattcatgggagtcactatcagaagaggattctggagctggaatgccatccgctggattccttgttctagacagtggccttctgcagtcctcctctgaagaagacctcccatggtctgcactgaaaattcttgggtttctagggcgaggtgtgttgagcctctccacttcttcaatagaaagtccgactggag

SEQ ID NO: 1803 - DNA, 1613 bp, Homo Sapiens
ggtggcgggaagaggaggcgcgagaatggaggtggaggccgtctgtggtggcgcgggcgaggtggaggcccaggactctgaccctgcccctgccttcagcaaggcccccggcagcgccggccactacgaactgccgtgggttgaaaaatataggccagtaaagctgaatgaaattgtcgggaatgaagacaccgtgagcaggctagaggtctttgcaagggaaggaaatgtgcccaacatcatcattgcgggccctccaggaaccggcaagaccacaagcattctgtgcttggcccgggccctgctgggcccagcactcaaagatgccatgttggaactcaatgcttcaaatgacagcatgaccgacggagcccagcaagccttgaggagaaccatggaaatctactctaaaaccactcgcttcgcccttgcttgtaatgcttcggataagatcatcgagcccattcagtcccgctgtgcagtcctccggtacacaaagctgaccgacgcccagatcctcaccaggctgatgaatgttatcgagaaggagagggtaccctacactgatgacggcctagaagccatcatcttcacggcccagggagacatgaggcaggcgctgaacaacctgcagtccaccttctcaggatttggcttcattaacagtgagaacgtgttcaaggtctgtgacgagccccacccactgctggtaaaggagatgatccagcactgtgtgaatgccaacattgacgaagcctacaagattcttgctcacttgtggcatctgggctactcaccagaagatatcattggcaacatctttcgagtgtgtaaaactttccaaatggcagaatacctgaaactggagtttatcaaggaaattggatacactcacatgaaaatagcggaaggagtgaactctcttttgcagatggcaggcctcctggcaaggctgtgtcagaagacaatggccccggtggccagttagagcagagacttcactgactgacttacaggtgccctattctgaggtacaggagccgcggctttctgatgggggaaaatgccgccttaggctggagccaacatgactgtcctttaaactccagtggctggccaggcacggtagctcacgcctgtaatcccaacactttgggaggccgaggcaggtggatcacctgaggtcagaagttcaagaccagcctggccaacatggggaaaccctgtctttactaaaaatataaaaattagctgggtgtggtggcgggcacctgtaatcccagctactcgggaggctgtggcaggagaatcgcttgaacccaggaggtggaggttgcagtgagccaagatcacaccattgcactccagcctgggcgacagagtctccatctggggaaaaaaattaaataaataaactcccgtgacttgcatgtttgcttctgggacgtctgtgccccgcaagtgtttgagtttggcctccaccccattgatgcggtgacggggcggaaaggcgcagagaagctgagggcggtctctgatctgtgtgtgggttgacattttagctaataaagccttgcagtgtttgttggcaaaaaaaaaaaaaaaaaaaaaaa

SEQ ID NO: 1804 - DNA, 3888 bp, Homo Sapiens
aagcttttgttggggtgaatgaggcaagagttagagaagggcaggagagagcccgcccagggaagggacacaggaaatcagaaaggaatttcctctagaaccaaggtgcagaatcgaggaagaaaatgagggagaccaggattcatagaggagcttccttcctctggggaggaaaatcccaggtggagcagcagggtctagccgaagcccccagggtctgtggctcctgagaggtggatttgctgaggagagaaacctggacccaacactgaaaaagagctaatgtgatgacagagcccagagtttaggcatggcagtggcctggccatcccagagggaagtggccggtcaaacaaatgctagcagagagggaaggacatgggtgtggaagggagggtaagcctcttctccttcatgaattatcagctcacacctcttctcagctcacaccaggaggcctggcacaggacagtgaatcatgcccaagaaactgccttgtggcttcctgccttcctccctccctccctatctttcctcttttcttttctcttttcttttcttttcctttccttcccctccccttcctttcttccttcctttctttctttctttccttctctctctctctctttctttctttctttcctttcttctttatctatctctgtttctttctcacttcctttctcccttccatgaacctacagctctattcaggagaacaatgactgtccattgacttaacacccatgataaccaggcactgtgtgacgctgaagtagaacaaggggctttcagaacctggtggaaggagctgggcatcaggttcaagggagtaacacagtcgtggaacattgggaaaggaggagctattcacatgcctgagatgtaaggatgtctggattttccaagggccgcgtctagtaagagagtgtgtattgagggcaactctgagttagtgacttgaggttcatcctgtagtgatcagaggaaatggctggtgtatgaacctagggaatcagcacgctcctcttcctatgtcactcctggagaagaaagataccacaagaggcagggtcttcagggctgagccacaatgtcacacagatccagtcaatcctgcctgtccatctcaatgacatctactatccctgatcaacacggcaccttaaggcgcccttcacagtgaaagcaacttatttccaaagcaggcattttgccttccattgctcctcccaggtccaaatccagtaagagactgaaaatcagatgattcacttattctgcaccatccccatggcctcgcagaaccagaaatgcctattgttatttccatgtccacttcaaccatgaggaagcccaataggactaatctggctaaagattagggcccaggcaagaggcctggctcgttctagtcctaggagcatggtacttcctcctaatttaatccattgccattcaagaagacctttgcccacagcaaccacaccacaaagggtggacagtgagtcaggcccaggtgacatcactgtcagagcttaagtgacaaaaaatgttaagccagagatacttatcacaaaagctggaatgaagttagagcagtcttttaaaaaatccaattttcttaaggcagggctcattttctatataaataccagctaacaagagactcttcaccagatcccagaggctgaacacctcgaccttctctgcacagcaggtgagtctccgcattaggaacaccttaatattctccaatagtttctttattttgattgagatctctttgctatgcaatgaatatatttattttaaatgcaataagcacttttgtttaaggtgaccttatacatattttgactttccactcagattacaggtgtggaacttaggatcagaaaaggggagtgatttctgtaaaggcttgctaagttagcaagacaatatacccacttcaagagcactctcctgtcaacatgtattgaaaatttttaatatagaaggcactacattggcaattttgatgatcaaaagataagtttttctttattgcatgaatgtataatccattagaaaacatatacttgactaaaatttgcaaacatacagcatggggagtgattagcagagagggaaagcaagtatcatgctgtggcaaaacgaggaaggtgagagcatcaggaaggacagccatgagaggtgggcatgtgtggggaggcagcgatgatgtggagagcctgccagagagcatgtgcagcaggcacagtgtgaacagaggctcccaggtggattgtgggagccttagggggaagtttagataagagttctcctgggagaactatcgcactctataaggaggacatgagtgagtagattctagactgctgaccttaaaatctttccaacttatggaaaaactgaggtgtcacatcaatcttcagccaatgacacacagccaagagtggtattaaaagtgatttaatcagggaagagcaagaaacatgcatttcttttcactcaattcctcagatgatccctgagcagctgaagaccagaaaagccactaagactttctgcttaattcaggagcttagaggattcttcaaagagtgtgtaagcgaaagcttcagagtatatatttgcatatttgtatgtgtttttatgttgtacgtaggtttttagatgtaccaggaagaaaagaagcataaagaaaggctccatttacacgatgtggaagaaataactttaccttattctctggaagataagtggggatcaccaaagcatcccatgatctcaaattcagggaaaaagaaagaaaagagaggctctcagttctgaaggagaatgaaatgacagatatttgtcattaaactgggcttcattcctacttaatcaaagcactgaattagctgtttttgctctctaggtccacgatcctttgaagcatgagttcttaccagcagaagcagacctttaccccaccacctcagcttcaacagcagcaggtgaaacaacccagccagcctccacctcaggaaatatttgttcccacaaccaaggagccatgccactcaaaggttccacaacctggaaacacaaagattccagagccaggctgtaccaaggtccctgagccaggctgtaccaaggtccctgagccaggctgtaccaaggtccctgagccaggttgtaccaaggtccctgagccaggctgtaccaaggtccctgagccaggttgtaccaaggtccctgagccaggctacaccaaggtccctgaaccaggcagcatcaaggtccctgaccaaggcttcatcaagtttcctgagccaggtgccatcaaagttcctgagcaaggatacaccaaagttcctgtgccaggctacacaaagctaccagagccatgtccttcaacggtcactccaggcccagctcagcagaagaccaagcagaagtaatttggtgcacagacaagcccttgagaagccaaccaccagatgctggacaccctcttcccatctgtttctgtgtcttaattgtctgtagaccttgtaatcagcacattgtcaccccaagccatagtctctctcttatttgtatcctaaaaatacgtactataaagcttttgttcacacacactctgaagaatcctgtaagcccctgaattaagcagaaagtcttcatggcttttctggtcttcggctgctcagggttcatctgaagattcgaatgaaaagaaatgcatgtttcctgctcttccctcattaaattgcttttaattccagtcttggctgtgtgtgtcattggcagaatcttcctccttccttgtttccccattgtgagtcaggacctatagacagagaggagttgatgtagaagcatcta

SEQ ID NO: 1805 - DNA, 731 bp, Homo Sapiens
tccgagtcagacaactatactgctaggtagcgaggcctgggtgtgtgcctagctggttttgaagtcgcggccgtgttcctgggactccggttgaccgcgcgtctgctgcagagaccatgtctgccgacggggcagaggctgatggcagcacccaggtgacagtggaagaaccggtactgctgcccagtgtggtggacctgtgtggccagcatgcctctgatcagctccacctgcgacatggttgtcctgcagcctatgcctccaccaatggagatgctaccctgcacgtcaagactgtcttgcgacgacagctagagaagtggagtgaggaccctcacggcggctgcgtgtcagcaggggctcagccgattcctctccaagctggatgccccaggattgcattcagccagcgaatacgcccacaggggtgctggacaagttggaggagaatctccccatcctgcagcagcccacggagagaggtcctggcggacaccaaggagcttgtgtcgtcgtaaggtgtcggggagcccaagagatgggtgtctagcgccaaggtacacggtggccacccaattgtcggactgcggtggactgcgacccgtggtgctgtgcacgagcggcgttggacagacaaagtccgtagttgaccggcggcgttcaatctagtcatgggctccggttggcccagattgtgctgagtgggggcgacccgggctggggacatcgag

SEQ ID NO: 1806 - DNA, 3492 bp, Homo Sapiens
cacgcgtccctcttgcaacttgctgagtttccctaagatcattattttgaattccttttctggcatttttatagatttccttttcttttgaatctgttactggagaattattgtgtctctttggaggtatcaaatttccttgctttttcatgtttcttgtgtccttacattgatatctattcagctagtggaagagttgcttcttccaattttatggattggctttcataaggaaagacttttttgtaggcatatctgtagttttggttgtgattaggatgttttggctttgattctggtgagcacaggagtgtaggctcaatgatttcttcagctgtaaccaatgtaactggtgtcatgtaaccatgtcactgtgagtcctcagtggcttaagttgccattgttagctgaggctgttgtgaggcttttctggggaaagggatgccagaggggccagtccctgggccttttggtggcatgggcaggctttagctgtggtggcgatgggctgggcatgctagtcctcaggaccccagctggtgtaagtgctggtagtggggggcccaggtgggctggtcctcaagcccccaggcagcatttatggtgctggcagtggcagtagcagcagtgggctagacactggactgtcaggtggcaatcatagctgttggcagtagctgtggcaggatgaatgggacagtttctagccccctaggtgatgcacttgggtgggcactggtggtaggtggggcaggcctgttcaggccttgggattgtgtgcgtgggcaccagtggtgttggatggggtgggccagtcgtcaggcccccctacagagcatataggcaccagtagtggcatgagggaaagatagcgctggagaacactggtgacagtgggtggagcaggcctgtctttaggttcttggatggcacatatggacatactggtcctcaggccccctgaaggtgcacacaggcatgctgttgccctgctgagaggggcaaggttctgttggtggcattggtgttgggaagatggctcccaggttctgggagcttcagctccctttttcctggggtagcctccctggtgtgctatactgcctgttccctgggatataagacacttcatgggtcagagtactggggacctggctgcactgctgggtgattgtgatactgcaaccttctggatggatgtgggaggatgttcttgggggtccagggatgtggactgcaggggcttattggaccccaagtgggcaggatataatctggtgggggctagcctcttaaaatggtgctgtgccacagcagcatgtttcttgggatgtgagtaggatccagtggaattccctttctggaagaacgcatttgcatggattccaggcagctccgtatactggactcagggcctgtgaaggctgacggcatcccctgtgggtgccagcatctgtgctgcgaatgtggaccactgcagttctttgacttttcttttcccagaaatgggattcccctcctgcttctgagccagtccaagacatgctggctgctttatttactgctccctttgtgcctcagaagttccctgttgaatagtgttctgtctttggtgctctacctgacatgtggttaactacttgcttttttggtcctttgttgtgcaggagttgagtgccaggctcacggttttttgattaccatagttttgtagtttttgaaattcagaagtgtgagacctccaactttttctttttcaagattattttggctgttgagtcaattatgattccatatgcattttagatggatttttctatttctggaattgtgccattaggagtctgatagatactgcattgaatctgtagagtgctttgggtagtattgacatcttcccactattaagtcttccagtacatgaacacatgcattttcctgatgactaatgatgttgtaccttttcatatgcttattggctatttgtagatcttcctgggagaaatgtctatgcagactttttgccaattttttaatttgtccatttaaaaatcagggttttttttgttgttgagttgtaggagttctttttgtattccttatactagtcccttatcagatatatgctttgcagatattttctcccaggtgggttgtcttcacttccttggtagtgtcttttaatacacaaagttttaaatttttatgaagtcaaatgtatctacatttttctttggttgctcatgcttttggtgttgcatctaagaatccactgccaaatccaaggtcatgaagatttactcctatgttttcttctaagaattttatagtttttgctattacataaggtctttgagccattaagatctttgacttaacttttgtatatgatgtaaagtcactgtcaaacatcattcttttgcatttggctgtcactgggttactgaggactgggtagcttagttgagtagataatcttttgttgtttcctccttgtaatatacaagccttggcttctgtgacatcatactctcctagatttccccctgtcactgtggcttcttctcagtctctgtccatccctggtgctcctgaaggttctgttctcagccttacacacattacctgggtgatctcattctctgccatgacttcacttgccatatatgtgctgattttccccaaattcctatttctcccgacctttacatctattttatttgcaggtcatatatctaataaggaattgatatccagtgtacatgtagaactcctgtaattcaatacagaaaccaaacagtccaattaataaatggagaagagatttgaatgaacatttttctaaagaacatctcaagctcaagatttcccagataacttttctttcttcaaaatctgcttctgtgtttcctcatctgtaggtggcacagcatacatctgatttcccaagccagaaacctcatagttattcttgactccaggaagaaatattattgagtttttaaaaactcagcttattgactcattgttttatataataaaatgcaacagttttaagtgtatatttcaatgagttttaatacatttatgtacttgtgtcactatcctcatagatagagacaaaacatttctatcacaccggcaatttcctatgtgtcccatcccaatcaatcctttcccctttgctggctccaaacaatgactctttcctatctttttagaaagattagaattgcttttctagagttccagtaatggaatcatacagtgtctaagtctgtttgtggtgctgtaacaaaatacctgagactgggtaatttataaattataggaatttatttctcacagttctggatgctgaaaagtttatgatcaaggcactagcaggtttggtgtctgagggcccagtttctaatttgaagatggtgctttaaacactgtcctcacatggtagaaggggcagatgggcaaacaaaaaaaaaaaaaaaaagg

SEQ ID NO: 1807 - DNA, 424 bp, Homo Sapiens
gaccggcgagatagcaggaaggaataacaggacaggcccacgcgtctcctcggtccgcacataggtgcaaaaccgctgcctccagatcaggcctctccaaggccccctcccgaaagaagaagggcagcaaaggccccgtgatcaaaatcaccgaaatgtcagagaagtacttctcgcaggagtcggaggtctcagagtgaggcggctggaccccaggaaccccagggcactccactgcagcaggagggacttaagctagactcaagaaagcagcttggagcctctaggttgagaagagaggcaaaacctgatattgaactgagagaggggttcaaaactgactgtgttttgtgggctgccagggtgggagaggagcatcaccagctcctcagagccactccgctccatatcagtatctcacagt

SEQ ID NO: 1808 - DNA, 392 bp, Homo Sapiens
  misc_feature (35)..(35): n is a, c, g, or t
  misc_feature (37)..(37): n is a, c, g, or t
  misc_feature (90)..(90): n is a, c, g, or t
  misc_feature (167)..(167): n is a, c, g, or t
  misc_feature (274)..(274): n is a, c, g, or t
  misc_feature (280)..(280): n is a, c, g, or t
  misc_feature (297)..(297): n is a, c, g, or t
ggcaaacactgtttcctgcccctgccctgtaattntnacagatattcagaaaggtttggttgccctgtgcctcagtaaataaggaaaatnctttcttagaaggctgctccagtaactgcatattccttgccatcctctacagaaatcaccatctgctctcctaagtncttctggaaagagcaccgtaaccatgtcatcctaacagcaatgccatgaagaaagggaggcagctccctccacgtcctggctccagtgcccactcccgtgccccctncatggnccacggagcctggccanctgggtgacatctggtccctgtgtcactttctgcaagacaaggaccagcttaaaagaggagggcatggtgttcttgaaggaggttgggggccacc

SEQ ID NO: 1809 - DNA, 17538 bp, Homo Sapiens
atggaaatgttctgtatttgtgttgtctgatgagataaccactaactgtagtgctattgagcatttgaaacatggctagtgtaatcaatgaaccaaatttttaattttatttaattgtaattaattttaagtggccacatgcagggagtgactgctgcattggacagcacggctctaaattgagccttttttccttatttggtgaggcatacttgccttaagattgggaagtctatttttggaacctgctaccaatgctggtctcacacttgcaattctcagctgagccaagaggtgagagaaaggtcattttccattccaagatctcactctcccctgtgacactgaggaaactggcaagtgatgtgaaggctggagagcgtgtcctgtatgctggctctgtcccttctgcctgtgttgactgacatagttagttgctgcccttgctggtctcccttcctccaaccttgcctctctgagcacacctgacattcatctcatgacttccctaaaaacattctttgggaacaagaaactaacaaatcccaagtgacctatcacatatacaaacatacagggcagagtttggattcgcggtagaagaaagggaggttagacattaagaagaatggtctggtgatgacagttgtgagataatagaaacaggaaaaagaaatctaagttttctttctttttttaagaaccaataataatttctctcttttgactagtcagtagggctggggtggattggaggaagcttacatattccatgaacaagcctcttcctaaggtcctgtaagtgatcctgccccactgattagcccctagaagacccttcaaaggttggatctccaggagggagtgggggaggaaagccctgtaccaggcagcctctgctccattgctctgggggggtggggaagacaaaccctggtcatcccctcagtctgtagcccttttgtgtgagtgcctggcaagggtgacgtggggctgtttctgcgggcacagctgcagcaattaccggagtggaggcagggcccaggcagcactgccctccaagatcttcccttgggcttttcagcagtaaggggacatgcaccccaagggcctccacttggcctgaccttgctgcgggggctctctgtccccaggaacagtagagatggcaagcttatcgagaccctctctgcccagctgcctctgctccttcctcctcctcctcctcctccaagtgtcttccagctatgcaggtaagacatgttttttttcctgccctggggagaccctgaaaacagaaaggctagtttcctgggggttagctccttcaaacatcctcaagttggtatattatctttctaaaacatagacctactgacatgcctcccttcctcagaaaccttccgtgggtggttcttacagccttcaagatggagtccagactcttttttttttttgggacagagtctccctctgttgctcaggctggagtgcagtggcatgatctcggctcactgcaacctcagcctccctggttcaagcgattctcctgacttggcctcccaagtagcggagactacaggcgcctgccaccacacccagctaaatttgttcttttctttctttttttttttttttgggattttaggacagacggggtttcacatgttggccaggatggtctcgatctcttgacctgctgatccgcccgcctcagcttcccaaagtactgggattatgggcgtgagccactgcactaggcctaatttttttatttttagtagagatggggtttcaccatgttggccaggctggtctggaacccctgacctcaagtggtctgccctcctcagcctcccaaagttctgagattacaggcatgagccattgcgtctgacccagactccttaatgtgactaactccaggctttccttggactacttcttacttgtctttccagctttgtcttttcacctctccaattgagataaaataataacaacctcttggagttctcatcaggattacatgaaatgagatatgtaacatgcttagcagtgcctgtccatagtaaatctcaataaatgtttgtggaattataatatcttgtcatgtttgagactttgctctgcataatcaggcaccagtaggtttttataaaggaacccgtctgtcacgtgcagaggagaaataaacagaaagtttcccatcctcagggagccacctgactgacagaggcacagtgcatccactctccaggtctaggggagaaagcagccttatttcttagtagctcagaatctgacttgagaaacacatccacatagaaaaaaacaaggaactttttcgggtcagggtccgggacccacagtgaggtggaagatacaggggaaggaagagggaaatagagccatccccagggtggaagatctcagaagagaatttgggaaacaaggtatgaacaaggactgaatagtgagaagtgatggagagacagctaaagtagatggagtgtcaaaaccaaaacctctaagggtagaataggcagcaatttggccaagtcctaacagggaggcccataggaggattcaacctcaagatgctgtgccacattccaagagggaacctaaaggctgggctgaagagtcagagatggctacagctggcaaaaagatgggcagatgctgagaggagatgattgctaaaatgttctgtccaggacattcacagtatctctataaccagagtcttttttgtcgttgttgttctcaagaaggaaacttgaggccgggtgtggtggtttatgcccataatcccagcgctttggggccaaggcaggcggatcacctgaggtcaggagttcgagaccagcctggccaacagtgtgaaacctcatctttactaaaaatacaaaaattagctggatgcggcggtaggtgcctgtaatgccagctactcgggaggctgaggcaggagaatcacttgaacctgggaggcggaggttgcagggaggcggaggttgcagtgagccaagattgcaccactgcactccagcctgggcgacagagagtaagactgtctcaaaaaataaatgaataaataaaaaggaagaagaagaagaagaacaattgcaatcctccctggctctagaatgtcatttaaaagtcgagtgtcttcttccttccctgttttgaagcagcccttctcatgacaggcttgcttgccaaggttccctctgaccttaaatctcttccttttggtgtcttggacagggcagttcagagtgataggaccaagacaccctatccgggctctggtcggggatgaagtggaattgccatgtcgcatatctcctgggaagaacgctacaggcatggaggtggggtggtaccgcccccccttctctagggtggttcatctctacagaaatggcaaggaccaagatggagaccaggcacctgaatatcggggccggacagagctgctgaaagatgctattggtgagggaaaggtgactctcaggatccggaatgtaaggttctcagatgaaggaggtttcacctgcttcttccgagatcattcttaccaagaggaggcagcaatggaattgaaagtagaaggtgagtagtgccatataatattaggtattaactgttgggtggccaagaacaattattctctcaactgagatgagatccctcaacccaaacatctcagtcctgggaatgatttccataaaaatgtacacatcaataaacagaaactcatgcttagggatgtctgttgcatcattattcagagtagcaaggaaattgggatcaaaatcaatgcctttgagtaggtaagtgacagaatgaacaatggtagccatactgtgaatattatgcagggattaaaaagattattttagcactaggccagatggtttggggggctcctctaaggtattattgagtgataagagcaagctgctgtaggatacaaaaacaaaaacaaaaccctagggcatggtggtttgcctcgcagctactcaggaggctgagacgggaggctggcttgagcccaggggtttgcagttacagtgagctatgattgcaccactgcactccaacccgggtgacagagcaaagaccttcacccccactccctacccgtctctaaaaaaaacaaaaacaaaaacaaaaaaacccttgggcccagcgccgtggctcacgcctgtaatcccagcactgtgggaggccgaggtgggcagatcacaaggtcaggagatcgagaccatcctggctaaaacggtgaaaccccgtctctactaaaaatacaaaaaaaaaaaaaaaatttagccaggcatggtagcaggcgcctgtagtcccagctactcgggaggctgaggcaggagaatggcgtgaacccggaagcggaggttgcagtgagccaaaatccttccactgcactccagcatgggggacacagcgagactccgtctcaaaaaaaaaaaaaaaaccctgtatttgtgagcgcacacacacacacacacacacacacacctgtgcttggtcctagtgaataagcaagtaaatcaaatgtctaaatataattatagaaaggagatgtcaccttttggctgtacctccactatttcattctgcagaattgcagaatttcttttttttttcctttctttcttttctttttttttttgacacagagtctcgctctgtaacccaggctggagtgcaatggcgccctccgcctcctgggttcaagtgattctcctgcctcagcctcccgagtagctgggattacaggtgcccaccaccacacccagctaatttttgtatttttagtagagacagggtttcaccaggttgtcaaggttggtctcaaactcctgacctcaggtgatccactcgcctcagactcccaaagtgctgggattacaggcatgagccatggtgcccggcctcagaatttcattttcaacatgttttgcatgatgggtgattttggagaatattttttgctctatcgcaggatgattaagatgtggacaaggtgaagccgatggagggggagctttgaaagttacttgctatttaattgaggaactaaactgctttgagagcctgggggtcagatcctctgccttttcctcctccccacctgcagtgcaaacatcagacaattgatcactattgtatcttggaggtgggagtgaccattgcagtgctgggaccagaagatggcattgtatgtggaacaacaaagcactatttctagagactgcctgcagggatatggaaatagctttatgtgtctcagaatgttcttcatacagctgtttttattggggaaattctacttgccgaaaagtttgatagtgagaccctctccagtttgcagatttttctccttcctgctcaacaacttcctagctcagtaactgcctctcccaacaaactccctcagtttcaccacaccaaaaaaggaagacaagccggttgcggtggctcacacctataatcccaaaactttgggaggccgaggcgggtggatccacctgaggtcgggagttcgagactagcctgaccaacatggagaaaccctgtctctactaaaaacacaaaattagcctggcgtggtggcgcattcctgtaatcccagctgggaggctgaggcaggagaatcgcttgaaccccggaggcggaggttgcagtgagccaagatcgttccattacactccagtctgggcaagaaaagtggaactccatctccaaaaaaaaaaaaaaaaaaacaaggaagacaaaaagaaaagcagctaaagactttgcctcaggggagaaagttctcttttgggttgctatccacattccaacctcctgttcccacctcttcgtctgcatgcctaagaaactgttttacaagtaaataagggacgctttgtctaggctttggagccaggaagttgagacaaatttaggaatgagatgaagtaatggtattattgcaagtctcaggtgtaactacctctgctctttctctgaagagtttctaatttctcttgtttacttatttttttcttgtcatttttgggattttattactagttgtctctaatcctttctttaaattcttcattatgaaacataaaaacaaatgccaggcgcggcagctcacgcctgtaatcccagcactttgggaggccgaagcgggcagatcacccgggtcaggagttcgagaccagcctgatcaacatggagaaaccccgtctctactaaaaaatacaaaattagctaggcgtggtggcacatgccagtaatcccagctacttgagagactgaggcaggagaatcgcttgaaccgggaggcagaggttgcggtgagccaagatcgcgccattgcactccagcctgggcaacaagagcaaaactctgtctcaaaaaaaaaaaaccacatacaaaccagagataatattataatgagcctccaagtgcctaccaccttgctgcagcacttgtcaatccagggaccacccacctcaccggctccccactcattaccaccctcccctactcaattactgaggtaaatcctaggcagcatgatcatttcttttttttctttttatttattttgagacaggatctgtctctgtcacccaggctggagtgtagtggcatatctctgctcactgcagcctctgcctcccgggcagaagccatcctcccacctcagcctacatagtagctgggaccacaggcacacaccaccacacactgctaatgttttgtattttttgtagagactgggttttaccatgttgatcaggctggtctcaaactcctaggctcaagcaatcctcccacctcggcctcccaaagtgctagaattacaggcgcgagccactgcacccagcgaagaacactttttaaaaaataaataggccgggcgcggtggctcacacctgtaatcccagtactttgggagcccaaggagggcgaatcatgaggtcaagagattgagaccatcctaagtaacatggtgaaaccccatttctactacaaatacaaaaacaaaattagcctggcgtggtggcaggcgcctgtagtcccagctacttgggagctgaggcaggagaatggagtgaacccgggaggcggagcttgcagtgagctgagatcatgccactgcactcccccctggggcaacagagtgagactcccaaaaaaaaaaaaaaaagccccccctccccacacacaataatataaataaataaataaccacaatactattatcacatcttacaaactcaacaaaaatttcttaatatcatcaaatacccagtttgtgttcaaattttcctgattgtttcataaatatactcttacagttggtttcttttagcgagattcaaatgagacccacctgttgacctttgcccttagggtttcccagggtctgaattttgttgacgacattcccatgttgctatgtaatacggtcctccatgccctgtgtttttctgtaaactgatagatgtggaggtgcaatgacatttgtgtttgatttactttggcaaatatagttcatcagtgatactctatacttcttgttgctttacatccggaggctgataatgtctgcttttctctcttttctaattatttgtgaaaggaaaaatgtggggggttgggagaaaaaaacccttaagtacatactcgctaaatcacattgctacaggtaacttccattaagaacttgaaagtaaaggtagctgcattttcccctagggaacacaatgatagacaggagccttagtctacagcttgaaggattgtaattatacctaagcaaccctcctggaccagtttaatgttattagctgtgatgtatccctacctttgatgtcattatccttacttagctcccttaaagcagagatcaagatgaaaagggcttcagctgcagcatggcacatggagattagagtggggcttttggatgctgaggagcagacctagaatgggaaatagatgggagccacagaagtgaaggtccccctccctcattgctcaacctactccacatctccaggtctgcacatctgttcagttactgaatcctgtgtaagctaccttctttttcttttttcttttatttatttatttattttttttttgagatggagttttgctcttgttacccaggctggagtgcaatggtgcaatctcggctcactgcaccctccaactcccaggttcatgcaattctcctccctcagccttccaagtagctgggattacaggctgcaccaccatgtctggctaatttttgaaaaatcagtagagagagggtttcaccatgttggccaagccggtctcgaactcctgacctcaagtgatccacccaccttggcctcccaaaatgctgggattacaggtgtgagccaccatgcccgctgtaaactaccttcttaaaagctctagaagagggcttttaaccttttgttgtgtgtcatgcaccttccgcaagctgatgaagttgatagacccatctcagaattttttttttttttttgagacagtgtctcactctgtcacccaggattggttgcagtggcacgatcatgggtcattgcagcctccacctcccaggctcaagtgatcctcctgactcagcctcttgaatagctgagaccacaggcttgtgtcaccatgcccaggtaatttttaattttttttcgtagaggcagggtctcacattatgttgcccagtctggcctcgagaactcctgggctcaagcaatcttcctgccttgggctcccaaagtggtgggattacaggggagagccaccacacctagccaggaggatgttttaaatacaccaaataaaacatttatacccaaatacagttatccaaatattaaattaacaagagttagggtgaccctattaattagtgtaatttccaaatagtaatgaacataagtgatagtttgagatttctgtgacttttctaatgtgacgtgaaaatatttgtgatttttctttttcttttttttttttgagatggagtttcgctcttgttgcccaggctggagtgcaatggcaagatctcggctcacctcaacctccgcctcctgggttcaagcgattctcctgcctcagcctcttgagtagctgggattacaggactgtgccaccacgtccagctaattttgtatttttagtagaaacagggtttctccatgttggtcaggctggtcttgaactcccaacctcaggcgatccgcccgcctcggcctcccaaagtgctgggattacaggtgtgagccaccgcacctggccaatatttgtgatttttattgacgacaaagtcaaaggttctcttcatattattgtggtgtatcgcctacaagcataattaaaataaacactaaatttcagtttaaagtttactgaaaataaatatgtattttttattccctatttaagctttgaatcccctgacttcctataccattaccactgtcctagttcaggttcatgttgttttttactttaattgttatcacagtctcttaacatttctccctatgttctccagtcctgtaggtgctaaatctgacgtggtcacttctcagcttggaatccttcagtgcaccaccacagccttgaactacatatttgaaatacatatttattttcagtaaactttaaactgaaatttagtgtttattttaattatgcttgtaggcgatacaccacaataatatgaagagaacctttgactttgtcgtcaataaaaagtcccttgaggggacttcagatgtaagtcccttagctgctcgttaaaactcccccaggctgacccaatacacaatcttgactttaaaccacttgtcattctaaatcactagcatttcctggaaaaaaaagccatttttccttcagggctaagctcagggaccaattctgtgtcaccttctttgaatcctgatgatattcacttctttatttgacctgatttattgggccccagacaccatgctgagtgttggggattcagctctggacaatgtcaaatgtcagtcctgcctttcagatcctttctactgggtgagccctggagtgctggttctcctcgcggtgctgcctgtgctcctcctgcagatcactcttggcctcgtcttcctctgcctgcagtacagactgagaggtacagggcagagggtgggtggatcaggatcctttctttaaatgagctggcttcttggagctacaccacttaacatgtatttgtgagtgacttctgggttcagaagttcttctcactattgagtgataaagaaaaaaaataactccatgatgaaagagttttacatcttacggaatgctttcatatgaataatcggacctagcatttccctatgagctaactatgccatatagtaaccccattttacagaggatacaactgaggccaggagtagttcagtgacttactcaaaccgatataacttataagtggtagagctgaggcctctgtatcatacctagcagctccatgcaacttgggagagtgtgagcttcgaagtcagacaggtctaggctattaggagttttgaataaagatactgaagtgaaagtctctaccacacagtaggcgttcgaaaattgtttcctctttctccattcaacactgaggactcaggttcagctgctgatgaagctcctcttttttgcctagagctttcattctgagccttctcctcctaccaagtgtctccccaatgccagagcaggaagagtcttcactcctcccaatgccccacctcccatttgttactaagaggagaggagaaagtagcaaggagggtatggggaatgttctgggggaatgggtgttggtgcgatcaacaacaaagtcctttctctcaccttgaattcatcccagatgcctgcttgtttacttcttccacacaaaaaaaggccttcagccctcatggctgagcagaaagaatctgaatgttagagtcaggcagcctgggtttgaattccatctcaggtactgaactctatagcaaaattcttagattctccaagcttcagttgccttgtctgtcaaatagagaaaacatccttcgtcctaaattgtagggaggattaaagtcatgcaaagtgcctactacaaatccagtcacaaagtagctagctactcactaaatgttcagctcctccctcctcattcagatgggaagtggctttagataaacaaagtggcaacgcagtgggctggagcagctctgtgaactgagaatccaagaaaaggggcgaagagcagctgggatgtattggatgcttgtgctggcttggagcattgctcacattctttattcgctattgtatctagactatagctagagaaagagccgcaaccattggctttaaatccagtgctcttcctactctcctgaggttgtttccaggctgcagagaaatagcctgcacaaggggcccaggcgctgggtgtgggagggtccccaccgagagccagaacatgcaggaactaaaatgttgcctttttctattttaggaaaacttcgagcagagataggtgagttccagtcatcgtttctcccaattcttgccttttggttttttggcataacggaaatggtcccattcttggaccgtctctccctctcaataccctgttttcccctcagtttccctttctctacagtgggtgtgtcgtgcctagaacaagttttaagtaattaaataacaaagactcaggataaaaggatcctttttggagtgccctactaaatccatttccatttgtttctctttcagagaatctccaccggacttttggtaagttccggcatgtctaggccctcccaggtcaacttggtatttcactctagttccagtcacctgggggaacaaggacccctggctcctggttgagtcccttcctctcttctcttttctttctttaaataagaagtcatttgcatttaggattggtaaaatcataataaaaatactcatgtactgtttttatgtgccaggcactattctaactactttacaaaaacgttatcttattctgtttaactccttatgcacatgatctctcttttcaggaatgccaaaacagaggtaaatagatcgtttacacgtaaacctgatgtctggttggggaggtgaaacaaacagaaacaagacacaactgtatcacctgtacttatatttctgctttacaaactcaggatgtttccatgagtacagaacatgactaatcagagaagacctcatagaggaatagaaaagccaccaagccccactaggaattgacccctcaaggacatggtttctagcctttttgttcactgcagattgcccaatgcctaaagataatggcaacagaagagcacccaaatatttgttagataaatgttgcagacactagaaggtgtcattagggcacagatggtaccttctctgagcaaacttccttcacagctcctcctcccgaggctgtaggtgactctactcttgtcacctggcacacagagttctatcgtacgatttaggaaattagaccagtgtgtggaccacacacacacacatctttacacacccaaagaggaggaatagtatctttgttttggaggacttgactatgaaaggtcttaactcctttttgtaccatgaatctctctggcactccagtgaagtctaaaggacccctttgcagaatgtttttaaatatacacataaaatagaacacataggattgcaaaaacaatcattgtactaaaatacagttatcaaccgataatcacatttgtgatatagtaacataaatgtttcttttttttttttttggaggcagagtttggctcttgtcacccaggctggagtgcaatggcgcgatctaggctcactgaaacctctgcctcccgggttcaagcgattctcagcctcctgagtagctgggattacaggtgcccgccaccacacccagctaatttttgtatttttagtagagactaggtttcaccaggttggccaggctggcctcgaactcctgacctcaggtgatccacctgccttggcctcccaaagtgctgggattacgggcatgagccaccgtgcccggccataaatatttctttagccaaagtaatacattaagtaatgtagcagcaagtctaataacctgtaatttctttctttctttctttctttctttttttttgagatgaagtttttttgagatggagtgcaatggcacaatctcggctcactgcaacctccacctcctgggttcaagcgattctcctgcctcagcctcccaagttgctggaactacaggcgcatgccaccatgcccagctaatttttgtatttttagtagagacggggtttcaccatgttggccaggctggtcttgaacccctgacctcaggtgatctgcctgccttggccttccaaagtgctgggattacaggcatgagccaccaggcccagcccaataacctttaatttcaacatactaataaacataaacagtatttcaagatttctgcaataactctaatgggaatgaaaacatctgtggcttccattggtaattaagtcacaggtactgctcatattgtggttagttgtaaaatgttttggtttgttttgttttttccaagacttgggggaatgggtgttggtgggatcaacaagagtcttgctctgtggcccaggctggagtgcaggggcaggatcttggctcactgcaacctccgcctcccaggttcaagcgattctcctgcctcagcctcctgagtagctggcattacaggcatgtgccaccacgcccagctaatttttacatttttagtagagatggggtttcaccatgttggcctggctggtcttgaactcttggcctcatgatccacccgtctcggactcccagagtgttgggattacaggcatgagccaccacacctggcagttgttacatttttaatgaaagaaaatgttaaatccagttattgaaaataaggaggcagtacttttctcatccaagttcatggactttctgaattttgtccccagagtcctttggtgttctaggaccccaggttaaggaacccaaaaagacaggtgggtggggcatgagggggaacacatgttaatccctgtttgttctggtgaacaattcagatccccactttctgagggtgccctgctggaagataaccctgtttgtaattgtgccggttcttggacccttggttgccttgatcatctgctacaactggctacatcgaagactagcaggtgcagtggctgggcagcaggcaagaccaccaaatagtgggggaccaagtcagctctgaatgggaagccaaaagagaatagaaccaggactcaagattaggggagctgggatttccttattcctctgtccccatgcccaaccccaggctcttctgagaaactgtgaagagaaccacttactggatctgtgggatcccccagtggaaagggcagtgtgggtcactccaaatgtccatagggaggatgtggggaaggtgctattcatcttccactaatcacatatttgtttctttttgttttcagggcaattccttgaagagctacgtaagttctcttctctctgttataagcagagaataaaaagccaggaaagggagacagaagcaacaagaggaagaggcgggctattgagggatcacattcccagaggaaaggaggagctggagagcctgggtggagggaagactcctcctgggaggtagagggcaaagaagccagctgttagagacacatttacaggtggcagagaagctggaggcactcctatctgccacctgatccattcctccttcactgcccctaagcaggaatccaaccctagctggtctcattgcccattccacagcaactgcccagtgcctcacctctcagatcaaccattgaggcaggaatggagacaagatgaccccaagggcttttcttctccctagttcaatggttttatgatacaaactactgacatacgtttttcaagttattttctccttcttctaggaaatcccttctgagtgatgtcacatcttggcaggggtggaggagagcctggttgcccagggatttgtccttggggacatctcatccatcaagttgcacactcactggcatctttgctatggggacattccaatttgcactttcaggaacactctgaattccaagtagaattgatttcccttcttctgtcatctaccttttctcttcattttcccatttttattacccttctttccatttctctctccagtcttccacctggaagccctctctggctaaggacaggcaggtgcccctctctccatcagaggacacctgtactggagagcaacacaggatggtctctgccatgaactggaggccaggaatctcctcactgaaaattacagtatggtaactttgcaaatggtggttgtttcttccaagactccagccctgattgcgcaaaactgaaaggcatgtgaagggaaggaagaggaagagtgcaaaacattgaagagagagctgagtgagctgaagagtgaggatatgagtagccccaacccaaacctggagatggggagaaacctacagaatactagccagagctcctccttgtcttggcagcctactagggacctggggaagcaaaaacgaaagctgggcaacatgcctgctttagaatgttttccttctacttacacatcttccacaggtctcagaatctttccttcctctcatccttttctcctatctacatatctatcagagtatccactgtttattcaacaactactacttgatggtcagacacaaacaaacaagctaggtgctaattaataaagatacgagttttggccgggtgcggtggctcacgcctgtaatcccagcactttgggaggccgaggcgggcgaatcacgaggtcaggagttcaagaccagcctggccaacatggtgaaaccccatctctactaaaaatacaaacaattaactgagcatagtggtgggcacctataataccagctactccggaggctgaggcaggagaatcgcttgaacccaggaggcagaggttgcagtgagctgagatcgcgccactgcactctagccggagtgacagagtaagactctgtctcaaaaataaataaataaataaataaataaataaataaataaataaaaaataataatacaagttttcataagcacacttctaaccccttgtcttttatgtatttccttccttatccacgcacctgtctccctctactccagcctcattaccccagaggtcagtcctcaggaaaactaaacacaaagaaagagctcagtcagaaaggccatttatttatgtttcaagatgctcactgcctcctttgttttgtctcctttgcaggccttctctcttaggcctcttctcctgggggtatggatcctggggggagattgatcacctccatgcttccattcctccccagccatagtggggacatcatgagagaagccaagccactggcccaggatcacccggcatttatggtggctgctctggcacaggtccttgcctttatagcccctccagtgatccataaggccctctttctccccaaaggagaggtcacagatagggcaaaggtagctcttctgcttccagtgggtctgctggtgtctgaccagcctggaaaatgagctgaaagacttgctgcaatggaagcagtagttgggcggctctgtgaggtggcccttctggtgtctggagagataggatttcttgctaaaagtcaaagaacaatgggggcaacagaagacattgagtcttgagggcttcactggatgagagttggatctggcatcctgacagagggttccagtgatgggtgcctgggtcctggtcacaggtgcttggttcttaagtacagatgcctggttctgggccataggaccctcagttctaaatatgggttcctgggacctggccactggtgcatggttcacatccaaaagcccctggatggacctctggcttctggcgatgggtgtctggaattcagcctgggtgcctggaatcctcaaagtacactcctggtttccatccactggctcctggttttggtgtatcttctggtggcgtttgagctcagactggtcccggaagctcttcccacacacagagcatgaatggggccggtaacccagatggacgcggcggtgacgacttagtccagaagcatcacagtaggtcttgtcacagagcgtgcaacagaagggcctctccccaagatgcatgcgtctgtgatagctgagggacttggggctccgaaacaacttcccacactgactgcagctgttagtcagcttgggattgtgaacaaactggtggctatagaggtaggagcgcctgctgaaacatttggcacaggtgtagcaaaa

SEQ ID NO: 1810 - DNA, 474 bp, Homo Sapiens
ttttttttttaaagattaagatgatttataaaaatgctaaaacacccagcacgcaacatggtaaaattcgcaatgcctcaggcatcaacccgagagtaccaggcccacaggaaggcagcataataggaccccaaacaaggaggaaaagcagcctcctgaaaccgaccctgatatcagaaccagcagacatgggcactcagcagttcttacaactgaatcccaatctgcaaaagttagtagagacatggaagatgtaaaggggaccccaagcaagcctctagagaattataacatgttggctgggcttggtggctcacgcgtgtcatcgcagcactttgggaggctgaggcaggaggatcgcttgagcccaggagttcaagaccagcctggaccacatagtgagacccccatctcataaaaaataaaaaaaattgaattacaacacgaggtgacaaaagcactggatgagattaa

SEQ ID NO: 1811 - DNA, 834 bp, Homo Sapiens
cgcctccgaggcagtgtgtttccgcccagagctggagtctcccagctgccagccgaccccgaacccgcactcccgccaaccgcgctttttgtgggcggtcggaaaccacagcctccgttggatatgttcggtgcatgttataaacaaccacttaaaccctccggatctgagcctcccgcagaggaatgcagaatgacgccacggcacgcaggatgtgatgtcaccgagatgcagaggatactcagtcaaccaacatttactgagcatctacttcgtgccgtcttgtcaacggaaaggggtccctatccagaccccaagagagcattcttggatctcttgcaagaaagaatttgaggcgaatccatagagtaagcaaggcaagttacttctatatagaagggtgcacccttacagatcaaacaatgcttagtgatgtgtgtcagacctctgagcccaagcaaagccatcatatcccctgtgacctgcatgtatacatccagatggcctgaagcaagtgaagaatcacaaaagaagtgaaaagggccggttcctgccttaactgatgacattccaccattgtgatttgttcctgccccaccttaactgagcgattaacctgtgaacttccttctcctggctcagaagcttccccactgagcaccttgtgacccccgcccctgcctgccatagaacaaccccctttgattgtaattttcctttacctacccaaatcctataaaacggccccacccctatctcccttcgctgacactctctttggactcagcctgcctgcacctaggtgattaaaaagctttattgtcacgcaaaaaa

SEQ ID NO: 1812 - DNA, 280 bp, Homo Sapiens
cggtcaatcagttactactgacagctacgaaagaacgaattgacttcttacctcactatgacacactggttaaaagtggcatgtatgaatattatgccagtgaaggacaaaatcctttgccatttgctcttgcggaattaattgacaattcattgtctgctacttctcgtaacattggggttagaagaatacagatcaaattgctttttgatgaaacacaaggaaaacctgctgttgcagtgatagataatggaagaggaatgacctctaaacagcttaa

SEQ ID NO: 1813 - DNA, 455 bp, Homo Sapiens
  misc_feature (395)..(395): n is a, c, g, or t
  misc_feature (445)..(445): n is a, c, g, or t
gaatttctagttgaatccagatgttgaacggtccttgaagttctattccagggctcccaggcagcagaatctgcccacatattttggagtgatagattcgtgtggcctttcaaatgattgtgaagtggtggaaatggatccaaaataataagtgacttctctaccaaagcatagaagattcttcatatctccttccagtggctcaatttagattttgggaaggagcagaacaagtgaaacacagaaaactgaagagaagaaatcctcattttggacctatatttctccttgactatttcttaatatccatcctacccatcgttctaatgttttaactttgctctgaatttataaatagtaaaggccaaagacatagaatatacatttagtagctntataccaagaaatttgccttgaaagctgctgttcgtggagggaaaagtgnagcacattcc

SEQ ID NO: 1814 - DNA, 1587 bp, Homo Sapiens
gccggggggaggggccggggcggtggcggctgtggccggtactggacccggcgggatgagcgaggtggaggcggcagcggtggctacagcggtccccgcggcgacggtgcccgcgacggcggcaggggtggtagcggtggtggtaccggtgcccgcaggggagccgcagaaaggcggcggggcgggcggcgggggcggagccgcctcgggccccgctgctgggaccccctcggcgccgggctcccgcacccctggcaatccggcgacggcggtctcgggaacccccgcccccccggcccggagtcaggcggacaagccggtgctggcaatccaagtcctgggcactgtcaaatggttcaacgtccggaatggttacggattcatcaacaggaatgacaccaaggaagatgtctttgttcaccagacagctattaaaagaaacaaccccaggaagtttctgcgcagcgttggagatggggagactgtggaatttgatgtcgtggaaggagagaagggcgcagaagccactaatgtaactgggcctgggggagtacccgtgaagggcagccgttatgcccccaaccgacgtaagtcccgccgattcatcccccggcctccctcagttgccccaccacccatggtggcagagatcccctcggcggggacaggacctggcagtaaaggggagcgggctgaagactctgggcaacggccccgacgatggtgccccccacccttcttctaccgacggcggtttgtgcgaggcccccggcctcccaaccagcagcagcctatagagggcactgacagggtagaacccaaagagacagccccattggaggggcaccaacagcagggagatgagcgagtccccccgcccagattccggcccaggtaccgaaggcctttccgccccaggccacgccagcagcctaccacagaaggtggggatggtgagaccaagcccagccaaggtcccgctgatggttcccggcctgagccccagcgcccacgaaaccgcccctacttccagcggagacggcagcaggcccctggcccccagcaggcccctggcccccggcagcccgcagcccctgagacctcagcccctgtcaacagtggggaccccaccaccaccatcctggagtgattccaactcaactcaaaggacacccagagctgccatctggtatctgccagtttttccaaatgacctgtaccctacccagtaccctgctccccctttcccataattcatgacatcaaaacaccagcttttcaccttttccttgagactcaggaggaccaaagcagcagccttttgctttttcttttttcttccctccccttatcaagggttgaaggaagggagccatccttactgttcagagacagcaactccctcccgtaactcaggctgagaaggaaccagccagctcttacctcctcctggttgcttttcttgcccccaccccaagtttatttttgttttcccccggccccctacctctgaagccattttatgatctgtcatgtgccacctgagcctccagtaaaaacaaaaacaggccaaaaaaaaaaaaaaaa

SEQ ID NO: 1815 - DNA, 4040 bp, Homo Sapiens
gtccttcccacccttagtcccaggcatctgactaccgggaacctcagccagagtccgggagccccccaccccgtccaggagccaacagagcccccgtcttgctggcgtgagaatacattgctctcctttggttgaatcagctgtccctcttcgtgggaaaatgaaccagaagacaatcctcgtgctcctcattctggccgtcatcaccatctttgccttggtttgtgtcctgctggtgggcaggggtggagatgggggtgaacccagccagcttccccattgcccctctgtatctcccagtgcccagccttggacacaccctggccagagccagctgtttgcagacctgagccgagaggagctgacggctgtgatgcgctttctgacccagcggctggggccagggctggtggatgcagcccaggcccggccctcggacaactgtgtcttctcagtggagttgcagctgcctcccaaggctgcagccctggctcacttggacagggggagccccccacctgcccgggaggcactggccatcgtcttctttggcaggcaaccccagcccaacgtgagtgagctggtggtggggccactgcctcacccctcctacatgcgggacgtgactgtggagcgtcatggaggccccctgccctatcaccgacgccccgtgctgttccaagagtacctggacatagaccagatgatcttcaacagagagctgccccaggcttctgggcttctccaccactgttgcttctacaagcaccggggacggaacctggtgacaatgaccacggctccccgtggtctgcaatcaggggaccgggccacctggtttggcctctactacaacatctcgggcgctgggttcttcctgcaccacgtgggcttggagctgctagtgaaccacaaggcccttgaccctgcccgctggactatccagaaggtgttctatcaaggccgctactacgacagcctggcccagctggaggcccagtttgaggccggcctggtgaatgtggtgctgatcccagacaatggcacaggtgggtcctggtccctgaagtcccctgtgcccccgggtccagctccccctctacagttctatccccaaggcccccgcttcagtgtccagggaagtcgagtggcctcctcactgtggactttctcctttggcctcggagcattcagtggcccaaggatctttgacgttcgcttccaaggagaaagactagtttatgagataagcctccaagaggccttggccatctatggtggaaattccccagcagcaatgacgacccgctatgtggatggaggctttggcatgggcaagtacaccacgcccctgacccgtggggtggactgcccctacttggccacctacgtggactggcacttccttttggagtcccaggcccccaagacaatacgtgatgccttttgtgtgtttgaacagaaccagggcctccccctgcggcgacaccactcagatctctactcgcactactttgggggtcttgcggaaacggtgctggtcgtcagatctatgtccaccttgctcaactatgactatgtgtgggatacggtcttccaccccagtggggccatagaaatacgattctatgccacgggctacatcagctcggcattcctctttggtgctactgggaagtacgggaaccaagtgtcagagcacaccctgggcacggtccacacccacagcgcccacttcaaggtggatctggatgtagcaggactggagaactgggtctgggccgaggatatggtctttgtccccatggctgtgccctggagccctgagcaccagctgcagaggctgcaggtgacccggaagctgctggagatggaggagcaggccgccttcctcgtgggaagcgccacccctcgctacctgtacctggccagcaaccacagcaacaagtggggtcacccccggggctaccgcatccagatgctcagctttgctggagagccgctgccccaaaacagctccatggcgagaggcttcagctgggagaggtaccagctggctgtgacccagcggaaggaggaggagcccagtagcagcagcgttttcaatcagaatgacccttgggcccccactgtggatttcagtgacttcatcaacaatgagaccattgctggaaaggatttggtggcctgggtgacagctggttttctgcatatcccacatgcagaggacattcctaacacagtgactgtggggaacggcgtgggcttcttcctccgaccctataacttctttgacgaagacccctccttctactctgccgactccatctacttccgaggggaccaggatgctggggcctgcgaggtcaaccccctagcttgcctgccccaggctgctgcctgtgcccccgacctccctgccttctcccacgggggcttctctcacaactaggcggtcctgggatggggcatgtggccaagggctccagggccagggtgtgagggatggggagcagctgggcactgggccggcagcctggttccctctttcctgtgccaggactctctttcttccactaccctccctcgcatccgcctctgagccaggagcctcctgaccctgtgatgcctgacacaggggacactgaaccttgttgatgccagctgtactgagttctcatccacagaggccaggcatggcccagcctggagccgtggccgagggcttccctagatggttccctttgttgctgtctggctttcccgaatctttttaggccacctccaaggactctaaaagggggctattccctggagaccccagagtagggttgccagtcctgcaagtccatagctgagctggaaaggatgcttctgctcacattccctctcatccaggtcctttccttctcgtcttcctctctctcacctacttcctcctcctcctcctgttcctgccttctcttctatcctgcaatttctcccgaatcctgaggggatatccctatgtcccagcccctggtactcccccagccctcagttttcagtcaagttccgtctcctctccagccctatggaagtctcaaggtcacgggacccctaatcagagtggccaatccctgtgtgtcgttcccttgtgtctgttgcttattgggagtaggagttgctcctacccctgtcctggggctgggtgtgtttcaggacagctgcttctgtgcatttgtgtctgcctgcctcatgctctctatagaggaggatggtcatcgtgacagcagcagctcaagttagcatttcaagtgatttgggggtgcaatgataatgaagaatggccattttgtaccagggctctgtattctgcaacagcctgtttgggaggctggagtggaaacaaagggtgggcatcaaagatgagaagccaaagcccctacaactccagccacccagccaggaggggctgtccaatcacattcaggcatgcgaatgagctgggccctgggtgaggtgggggtctggcctagtggggaggggcctggcctgggtggggcagggcctggcctggtccaggcttgggctccattcccatcactgctgtccctcctgaggtctggattggggatggggacaaagaaatagcaagagatgagaaacaacagaaacttttttctctaaaggactggttaaatcaattctgatacagccttacaatacaatagtatgcagctaaaaaataattgtatgtctttatatactaatatgtaataatcttcaggtgaaaaaggcaagccacagaaatgtgtatagcgcacttcccatttgtgtttcagaaaggagtagaatataaacacataattgcttatgtatgcctattcagaataaatgggtaacactgattacttttgggaggggaaccagtaggttgaggacaggagagggaagggtcttaacacttacacccttttgtacattttgaattttgaaccatgtgactgtattacctattcaaaataaacaataaatgggcccaaaaaaaaaaaaaaaaa

SEQ ID NO: 1816 - DNA, 5792 bp, Homo Sapiens
aaagttcatccccccagaatgaaaatgaggacatttgagaaggtgatttaaggtgtggacatttgagaaggtgtcctatcaaattagtaaaccaaaggaaaagtactgaatagattaatccaaaacacttactgttttttaaacgaagaggatttcaccttgacagaaaaacaacttttattcaatatgtatttcctgaaattaaagagacaagtacagactgaaaggaaaatagattcgtaaataagctacgtcaactctatcctgctgaggatagctcagtgatgttaaatcctttacaaatccctggttgtcttcctacagacaagactgctttttgatgggactgatattaagagaaataggacctttggggcattcaactccttgataaaacttaaaagtatcggcatgagtggcttaacagaggaaataaagaagttttcaactaaatccaaaagtgcggtcattttctttactgctgttattttaaaaacctcttcataaccattgaaaaagaatcgacaactattttaaaagattaaagaaaggcagatgtctgcaaataattcccctccatcagcccagaagtctgtattacccacagctattcctgctgtgcttccagctgcttctccgtgttcaagtcctaagacgggactctctgcccgactctctaatggaagcttcagtgcaccatcactcaccaactccagaggctcagtgcatacagtttcatttctactgcaaattggcctcacacgggagagtgttaccattgaagcccaggaactgtctttatctgctgtcaaggatcttgtgtgctccatagtttatcaaaagtttccagagtgtggattctttggcatgtatgacaaaattcttctctttcgccatgacatgaactcagaaaacattttgcagctgattacctcagcagatgaaatacatgaaggagacctagtggaagtggttctttcagctttagccacagtagaagacttccagattcgtccacatactctctatgtacattcttacaaagctcctactttctgtgattactgtggtgagatgctgtggggattggtacgtcaaggactgaaatgtgaaggctgtggattaaattaccataaacgatgtgccttcaagattccaaataactgtagtggagtaagaaagagacgtctgtcaaatgtatctttaccaggacccggcctctcagttccaagacccctacagcctgaatatgtagcccttcccagtgaagagtcacatgtccaccaggaaccaagtaagagaattccttcttggagtggtcgcccaatctggatggaaaagatggtaatgtgcagagtgaaagttccacacacatttgctgttcactcttacacccgtcccacgatatgtcagtactgcaagcggttactgaaaggcctctttcgccaaggaatgcagtgtaaagattgcaaattcaactgccataaacgctgtgcatcaaaagtaccaagagactgccttggagaggttactttcaatggagaaccttccagtctgggaacagatacagatataccaatggatattgacaataatgacataaatagtgatagtagtcggggtttggatgacacagaagagccatcacccccagaagataagatgttcttcttggatccatctgatctcgatgtggaaagagatgaagaagccgttaaaacaatcagtccatcaacaagcaataatattccgctaatgagggttgtacaatccatcaagcacacaaagaggaagagcagcacaatggtgaaggaagggtggatggtccattacaccagcagggataacctgagaaagaggcattattggagacttgacagcaaatgtctaacattatttcagaatgaatctggatcaaagtattataaggaaattccactttcagaaattctccgcatatcttcaccacgagatttcacaaacatttcacaaggcagcaatccacactgttttgaaatcattactgatactatggtatacttcgttggtgagaacaatggggacagctctcataatcctgttcttgctgccactggagttggacttgatgtagcacagagctgggaaaaagcaattcgccaagccctcatgcctgttactcctcaagcaagtgtttgcacttctccagggcaagggaaagatcacaaagatttgtctacaagtatctctgtatctaattgtcagattcaggagaatgtggatatcagtactgtttaccagatctttgcagatgaggtgcttggttcaggccagtttggcatcgtttatggaggaaaacatagaaagactgggagggatgtggctattaaagtaattgataagatgagattccccacaaaacaagaaagtcaactccgtaatgaagtggctattttacagaatttgcaccatcctgggattgtaaacctggaatgtatgtttgaaaccccagaacgagtctttgtagtaatggaaaagctgcatggagatatgttggaaatgattctatccagtgagaaaagtcggcttccagaacgaattactaaattcatggtcacacagatacttgttgctttgaggaatctgcattttaagaatattgtgcactgtgatttaaagccagaaaatgtgctgcttgcatcagcagagccatttcctcaggtgaagctgtgtgactttggatttgcacgcatcattggtgaaaagtcattcaggagatctgtggtaggaactccagcatacttagcccctgaagttctccggagcaaaggttacaaccgttccctagatatgtggtcagtgggagttatcatctatgtgagcctcagtggcacatttccttttaatgaggatgaagatataaatgaccaaatccaaaatgctgcatttatgtacccaccaaatccatggagagaaatttctggtgaagcaattgatctgataaacaatctgcttcaagtgaagatgagaaaacgttacagtgttgacaaatctcttagtcatccctggctacaggactatcagacttggcttgaccttagagaatttgaaactcgcattggagaacgttacattacacatgaaagtgatgatgctcgctgggaaatacatgcatacacacataaccttgtatacccaaagcacttcattatggctcctaatccagatgatatggaagaagatccttaatcactgagctaacctaaataaggaaggatttcattttatggactgatattttgctgtgtaacttgttcttcgtagattgtcatctgcagtgctgcaaagatatgaagaaatatgataacgaataagtgacaccagtactgtagttcataatgagtaggtacaggcgggaaactgaataataagaagtcataatggaatcaaggtgaagctttttataaacttttttagcctaagcaataactggttttgtattttttcttaatccttcactttaatacaataggctcacttaatttgtcttcccatttctctttatatatatatatatatataaaaaaatataaatatatgtttgtttgtttgtttttttaaggaaaaacaagtcaagctagcatccagttactatatagcttggctaaattatacaagacttacaagattgattactcgacaggcttgtatttaagagataactgtgaggttaccattatgtgatgttactataaggacttttaacattggtttaacaaaccatagaggcattgaagggtttttcttagatgcctagaaaaagcacactgggctgttttacctttcttttttaggtcaatcaagactccaaaatagtgattcctaacctttttggagttgctctgctactctgaatatgttctatacagcataaggattgtcaccttctgtgtgttgcaacagcttctaagataattagggacaaatgatgttacaaaaggaagagtactgctggtctaagtgctgagttgtatgtctttgcatagctccactctgctgctaaatatgcatgttctgactgacaccatcttgatgccagtactggattccagcattcagcaggtgcagatctcggctttacacaatttatctttacctagggttcagtcagtaatttctgctttttagccagggccagtgcagggtcagttaatgctacagttactgtatagcaaacagtatccttttttctccttcccctagcctattgggctttgcagatatctggagtgttttaaagtcaattattttaagcagtttgaggggatgtgtaggagtggagcatgaaacagtttataaggctggggctgtattatcagcacagcaaattaaagaatgaaagaagtacttctttttacatttcagctccagcagccagctatttaaaaaatatttttaaatatcttccccaaagtttaagatgtgggaccatctacttgtaagaaacagtggcttatttcttcatttctcagtaatcattgtaaacctttttttttttcttctccactctaacaaaagtaaaagaacaaaacttttgctgaggtcttggactccactacttgttagttatgttggcctggacagatggcaggtctgtcggcagttcctcagtctgtaaaatgaagattatcattcttgcctctccctttgtcacagtgttgtcgtgaagatcagatatgtatgaatgcagtcaaataaactaaaaactaggaaagtgttaactatcgttgcccaccgaatttgaggtagcaaaaaaaaaaaagaatgttctggtacatgaacagactgagaaggcctttcgacatccctgaagctagtctcctgtctagactaaaaatatccttgaaagaatagtagcaaacagtatgcagtactcctgtgttctaagttcttttatgttttagtttaccctcacagcagccatagtgttaagtcattatgagcttcatcttaaagataagaaaactgaggcaaggggagattaacttactgccaaatttcaaacagttagtagtatttgagaccagtagtatggctctaatcttacccttagccctcccaaccattatgctgtactatctacccataaatacctccaggaaacattcccctcttggtaatttgtccttctatagaagcttcaaagattaaatcaaattaattttcaaaaaaaatttttttttagaaatgttattttccctgtgatagaggatgacttcccagtttcaccaaagtctgtttatatcaacacacacaaaatggaataattctgagtcactaggcaatcaatctactgtggttttactatgtaaggtgaaaattaactggaacgatgtttgtttgctatacttacatagtcaaactttacaagccatgaaattaattgcactctttgtatttgttgttaaatgcctaagaagttttctaaaaattttgtaaaggcactgtcagagaatctggagttgaatgattattccagatactgtataacctgcataactttttgtctttaagtcgtgtttgtaaaagaagtaattgctagaaacatttgataatgtacaaagtagtctataatgactgttcagtacatttttaatatttttttggttatatccaactttttgtaaatatactggaagcttgataataaaatgtatttcctatcaccatacttttccatgtgaaaacctgagcctatttctagtataagtatccaaagaaaagttttacctggttgtgttattttaccagac

SEQ ID NO: 1817 - DNA, 282 bp, Homo Sapiens
  misc_feature (78)..(78): n is a, c, g, or t
accaattgtacttttattatatcaggctgattcactgtttctaatgcaatgaacttgacacagattttaaatttttcntcaatctgtcccattgtgtagacaaattaattcaaagttctttttcttccttctctttttcatctaagcctgtgcttatgagtagaaaaagagaagaggctaccttgaaatgcctcgggcccaaactcagaaggctctgcactcaactgagcctcccttcctactaagaatgggaatagtgttgcttataggggtgttgggtcc

SEQ ID NO: 1818 - DNA, 613 bp, Homo Sapiens
  misc_feature (249)..(249): n is a, c, g, or t
  misc_feature (287)..(287): n is a, c, g, or t
  misc_feature (453)..(453): n is a, c, g, or t
  misc_feature (536)..(536): n is a, c, g, or t
  misc_feature (546)..(546): n is a, c, g, or t
  misc_feature (563)..(563): n is a, c, g, or t
  misc_feature (587)..(587): n is a, c, g, or t
  misc_feature (601)..(601): n is a, c, g, or t
agcggccgcggctttgggtccaggcgggactatgggaaacgggatgtgctcccgaaagcagaagcggattttccagacgctgctgctgctgaccgtcgtgttcggctttctctacggcgcgatgctctactacgagctgcagacgcagctgcggaaagccgaggcggtggcgctcaagtaccagcagcaccaggagtccctctccgcccagttacaagttgtatatgaacacagatcaagattagaganatccttgcaaaaagaaagacttgaacataaaaaagcanaggaagattttcttgtttataagttagaagcacaagaaacattaaataaaggaaggcaagattccaatagcagatacagtgcactgaatgtccaacatcagatgttgaaaagccaacacgaggagctaaagaaacagcacagtgacttggaagaggaacatcgcanacaaggggaagacttcagtagaacatttaatgaccataagcaaaaatacttgcagctccagcaagaaaaagaacaagaactcntctagctaanagagactgtatacaatntgagagaagagaaatagacactangggaagcacaccangacatacataca

SEQ ID NO: 1819 - DNA, 411 bp, Homo Sapiens
ccactgtctgtgaagaacaccaagaggaggctggagggcgccaagaaagccaaggcggacagccccgtgaacggcttgccaaaggggcgagagagtcggagtcggagccggagccgtgagcagagctactcgaggtccccatcccgatcagcgtctcctaagaggaggaaaagtgacagcggctccacatctggtgggtccaagtcgcagagccgctcccggagcaggagtgactccccaccgagacaggccccccgcagcgctccctacaaaggctctgagattcggggctcccggaagtccaaggactgcaagtacccccagaagccacacaagtctcggagccggagttcttcccgttctcgaagcaggtcacgggagcgggcggataatccgggaaaatacaagaag

SEQ ID NO: 1820 - DNA, 6996 bp, Homo Sapiens
gcggggaccgcgacgagcccgggtcgccgttggcagcagcagcagcaacaccagcagcagcagcagccccggcggcggcgcggaaccccgagcgcccgggcgcaccccggcttcccggagcgcgacgcggcggcagcagccccggtgcggccgcgcgcgccttaggctcggccccgcggctcggggaccccgactcccggcccagcgagcgcgtcccccggcgccgcccgagagcccgaggaggcagcggccgcagagcccgggggaggggggcggccaccgcccgcgccgggcatcctcaggagccccagagcgcggagggcgcggcgccgccgagcggtgctggcccccgcgggctccccggaccttccccaccgcctgggcccgagggacgcgtgatcgggcgggcggccgggcgcaagggtgggagggagccgcccccgcccgcgccccctccgcccctcgccccaaacccctgggcgccgggcccgggccgcgcggcctgaagcgcccgcgatggcgagcccgccgcggcacgggccgcccgggccggcgagcggagacggccccaacctcaacaacaacaacaacaacaacaacaaccacagcgtgcgcaagtgcggctacctgcgcaacgaagagcatggccacaagcgcttcttcgtgctgcgcggacccggcgcgggcggcgacgaggcgacggcgggcggggggtcggcgccgcaaccgccgcggctcgagtactacgagagcgagaaaaagtggcggagcaaggcaggcgcgccgaaacgggtgatcgctctcgactgctgcctgaacatcaacaagcgcgccgacgccaagcacaagtacctgatcgccctctacaccaaggacgagtacttcgccgtggccgccgagaacgagcaggagcaggagggctggtaccgcgcgctcaccgacctggtcagcgagggccgcgcggccgccggagacgcgccccccgccgccgcgcccgccgcgtcctgcagcgcctccctgcccggcgccctgggcggctctgccggcgccgccggggccgaggacagctacgggctggtggctcccgccacggccgcctaccgtgaggtgtggcaggtgaacctgaagcccaagggtctgggccagagcaagaacctgacgggggtgtaccgtctgtgcctgtctgcgcgcaccatcggcttcgtgaagctcaactgcgagcagccgtcggtgacgctgcagctcatgaacatccgccgctgcggccactcggacagcttcttcttcatcgaggtgggccgctcggccgtcacaggccccggcgagctgtggatgcaggcggacgactcggtggtggcgcagaacatccacgagaccatcctggaggccatgaaggcgctcaaggagctcttcgagttccggccgcgcagtaagagccaatcgtcggggtcgtcggccacgcaccccatcagcgtccccggcgcgcgccgccaccaccacctggtcaacctgccccccagccagacgggcctggtgcgccgctcgcgcaccgacagcctggccgccaccccgccggcggccaagtgcagctcgtgccgggtgcgcaccgccagcgagggcgacggcggccgggctgcgggagcggcggccgcggcgcagaggctggtgtcggtggctgggagccccctgagccccgggccggtgcgcgcgcccctgagccgctcgcacaccctgagcggcggctgcggcggccgcgggagcaaggtggcgctgctgccggcagggggcgcgctgcaacacagccgctccatgtccatgcccgtggcgcactcgccgcccgccgccaccagccccggctccctgtcgtccagcagcggccacggctcgggctcctacccgccgccgcccggcccgcacccgcctctgccgcatccgctgcaccacggccccggccagcggccctccagcggcagcgcctccgcctcgggctcccccagcgaccccggcttcatgtccctggacgagtacggctccagcccaggcgacctgcgcgccttctgcagccaccgaagcaacacgcccgagtccatcgcggagacgcccccggcccgagacggcggcggcggcggtgagttctacgggtacatgaccatggacaggcccctgagccactgtggccgctcctaccgccgggtctcgggggacgcggcccaggacctggaccgagggctgcgcaagaggacctactccctgaccacgccagcccggcagcggccggtgccccagccctcctctgcctcgctggatgaatacaccctgatgcgggccaccttctcgggcagcgcgggccgcctctgcccgtcctgccccgcgtcctctcccaaggtggcctaccacccctacccagaggactacggagacatcgagatcggctcccacaggagctccagcagcaacctgggggcagacgacggctacatgcccatgacgcccggcgcggccttcgcgggcagtgggagcggcagctgcaggagcgacgactacatgcccatgagccccgccagcgtgtccgcccccaagcagatcttgcagcccagggccgccgccgccgccgccgccgccgtgccttctgcggggcctgcggggccagcacccacctctgcggcgggcaggacattcccggcgagcgggggcggctacaaggccagctcgcccgccgagagctcccccgaggacagtgggtacatgcgcatgtggtgcggttccaagctgtccatggagcatgcagatggcaagctgctgcccaacggggactacctcaacgtgtcccccagcgacgcggtcaccacgggcaccccgcccgacttcttctccgcagccctgcaccccggcggggagccgctcaggggcgttcccggctgctgctacagctccttgccccgctcctacaaggccccctacacctgtggcggggacagcgaccagtacgtgctcatgagctcccccgtggggcgcatcctggaggaggagcgtctggagcctcaggccacgccagggcccagccaggcggccagcgccttcggggccggccccacgcagccccctcaccctgtagtgccttcgcccgtgcggcgtagcggccgccggtcaggtttcttgggccagcgcggccgggcggtgaggcccacgcgcctgtccctggaggggctgcccagcctgcccagcatgcacgagtacccactgccaccggagcccaagagccccggcgagtacatcaacatcgactttggcgagcccggggcccgcctgtcgccgcccgcgcctcccctgctggcgtcggcggcctcgtcctcctcgctcttgtccgccagcagcccggcctcgtcgctgggctcaggcaccccgggcaccagcagcgacagccggcagcggtctccgctctccgactacatgaacctcgacttcagctcccccaagtctcctaagccgggcgccccgagcggccaccccgtgggctccttggacggcctcctgtcccccgaggcctcctccccgtatccgccgttgcccccgcgtccgtccgcgtccccgtcgtcgtctctgcagccgccgccaccgccgccggccccgggggagctgtaccgcctgccccccgcctcggccgttgccaccgcccagggcccgggcgccgcctcatcgttgtcctcggacaccggggacaatggtgactacaccgagatggcttttggtgtggccgccaccccgccgcaacctatcgcggcccccccgaagccagaagctgcccgcgtggccagcccgacgtcgggcgtgaagaggctgagcctcatggagcaggtgtcgggagtcgaggccttcctgcaggccagccagcccccggacccccaccgcggcgccaaggtcatccgcgcagacccgcaggggggccgccgccgccacagttccgagaccttctcctccaccacgacggtcacccccgtgtccccgtccttcgcccacaaccccaagcgccacaactcggcctccgtggaaaatgtctctctcaggaaaagcagcgagggcggcgtgggtgtcggccctggagggggcgacgagccgcccacctccccacgacagttgcagccggcgccccctttggcaccgcagggccggccgtggaccccgggtcagcccgggggcttggtcggttgtcctgggagcggtggatcgcccatgcgcagagagacctctgccggcttccagaatggtctcaactacatcgccatcgacgtgagggaggagcccgggctgccaccccagccgcagccgccgccgccgccgcttcctcagccgggagacaagagctcctggggccggacccgaagcctcgggggtctcatcagcgctgtgggcgtcggcagcaccggcggcgggtgcggggggccgggtcccggtgccctgccccctgccaacacctacgccagcattgacttcttgtcccaccacttgaaggaggccaccatcgtgaaagagtgaagatctgtctggctttatcaccaggatgtcacatgtcagagaatatcattaaaagaagacgctcagcgctgtttcagcccgaagctgcttgcagttttcttttggatctgagcaatgactgtgtttggaaacatctgtggactctgatagatggggcacaacaaggcaaggtcacctgcctctttcccttgttcccggatgggcattcatcattgtgctgtttgcgttttgttttgttttgttttaacaaaattagctgaagaagttattctcaagaaaattggatgttttcattggccttcttaaattgtggccagtgtcttttaatttcttcttcttttccttttggcaaagcagatataaccctcagcatgctaggagagtgcacccgtacctatggaagtggtaaaatctggtatttactggcttacactcaaaacgaccacagtcctacctcagttcaaggtaaagccggatttccgtggcgggggtccacaggacctcctgtagtagcccctgcgctgtgtgtctggagcgcgtcctcgccttatttaaatggtccagtagacagctgcttgttggattccagtgcaggtacctgcgatgtttacgtccacaccgagcccagtgtgggactgacatttctcaatggaagtgaaatttgggattggactttgaagacgattactaaataataattattatatgtaactgaagcaacctacttttgaaaatcaactgtattgggtagtgggaggtgggagggaagggctttgggaaggggatgaatatctctttttacctttaacagacttgtttaatcttctcgatgtagatgtttatgtaggtacttcacattgcaaacgccttttattctatttacaagctcagatgtctctgctctcctgaatcttgggcatgcctttctgtaaccaaaaatccctgtaggcgtgctagcaattccagggtggtccgggtttggcagatttgatttttaaaaaatgtattatctttaataaaaatgttattatgtcaaccagtgaggctgccctgaacaaaaaaaaacaaaaagaaaaaaaaaaaaaggaaagaaagaaactgataaaaagaggcatccagcccctatgttattgatggaaaaagaaaaagaagaaaagcaatctcgcagtacatgttacttgtcgaaaaaattccggacaagactacccttgttttatgttttcagtattctgaaaataccagtgtgtggcagttctcgcagatgttacctaaaactgctgaacttgaccggcagaatgttctgccgttttctgctccctcgacacttgattggagggctgtcgacctctcctcccgtgggggcttccccagtgcctatcttctctgatagtcatggagaggttacactaattcattggagatgtaagttgttggttttgttttgttttgtttttagaaaaatatatataaatatataatagatatctatcgctatagaataatgcattaataaaatgaggcttttttagaggaagaccaaaaaattcaatgtcttaaaaatatatttaatggcaatgcaaaagtcttcctgcttccgtgctgaactttagaacagaggattgtattgcaagacaaagttgaatgtaaagtgatctccctgaacatttttaaggttttacttttctgaaattatacatcacagcagtgcataggccatataatgttagctggaaggtcaatttcagtgtatgatatactttattaagatgtataaaacatcctgaagtttttatttagttttgggaataggcatcagtgggtggtatttgctttgtaactccccccaggtacgatagggactgaatatggaccctgctgaaagcagtgtattgacgcatatttaactcgccctctatccgtagagtagtcatgacactatacagatggttcgtgttcatactgcagcttaaaacaagcaaaatacacagatgataatatgctaaattttcctctatcctgtacatttcacaaaaaggcatatgcaatatttacatttttaatttagtttacagaatggaaccaaaatgtataaatgttatgtttgctaaaacttcacaatgtatattgggtctttgtacattttgcctgacttaccttaaatttaaaatattttttgctatataaactttaacagttattaaacagtgttttccttttgggtacgtattgtttctggatatcaagatgttaaatatatttcttgctattgtgatatgacaagagacttaacttatcttgctctgtcttccactgtacacgctgtatataggggtcaatgtgatgctgctggagacgagaataaactggactagaatagtgcattgtatttagtctgtattgatcatggatgccctccttaatagccatatgcaataaaataaagtacattatttatgaaatgaa

SEQ ID NO: 1821 - DNA, 825 bp, Homo Sapiens
acagcttcaaacaccgcctcagacacaaccaggccccagtcacgtgatgccctatgtattctccttcaaaatgcctcaagagcaaggacagatgtttcaatactatccagtttacatggtcctaccctgggaacaacctcagcaaacagttccaaggtcacctcaacaaacaagacagcaacagtatgaggagcagataccattctatgctcaatttggatacattccacaactagcagaacctgctatatcaggaggacagcagcaactagcttttgatccccaactaggcacagctcctgaaattgctgtgatgtcaacaggagaagagacaccatatttacaaaaagaagcgatcaactttagacatgacagtgcaggagttttcatgccctcaacttcaccaaaacccagcacaaccaatgttttcacttctgctgtagaccaaactattaccccagagctcccagaagagaaggacaagactgacagcctaagggaaccataagaagttgccctgatcattcagacattttgggaaaaagatgtggccatgccttggatataattttaggctattagcttcctcaatgctagtatcagttctttggaatacatgaaatatcttgactcttctcctaaatttgtttttacttatacatgttattaaactctttaaatatgtcatagaaaataatacaatcatgtaatgagtcttgtcttacaaaattatatgtctcttcaaatatcctatcattgtataatatggaatataataacacagaataaagctagtatcattaaatcaaaaaaaaaaaaaaaaaa

SEQ ID NO: 1822 - DNA, 1635 bp, Homo Sapiens
agtgcgcctgcgcggagctcgtggccgcgcctgctcccgccgggggctccttgctcggccgggccgcggccatgggagaggccgaggtgggcggcgggggcgccgcaggcgacaagggcccgggggaggcggccaccagcccggcggaggagacagtggtgtggagccccgaggtggaggtgtgcctcttccacgccatgctgggccacaagcccgtcggtgtgaaccgacacttccacatgatttgtattcgggacaagttcagccagaacatcgggcggcaggtcccatccaaggtcatctgggaccatctgagcaccatgtacgacatgcaggcgctgcatgagtctgagattcttccattcccgaatccagagaggaacttcgtccttccagaagagatcattcaggaggtccgagaaggaaaagtgatgatagaagaggagatgaaagaggagatgaaggaagacgtggacccccacaatggggctgacgatgttttttcatcttcagggagtttggggaaagcatcagaaaaatccagcaaagacaaagagaagaactcctcagacttggggtgcaaagaaggcgcagacaagcggaagcgcagccgggtcaccgacaaagtcctgaccgcaaacagcaacccttccagtcccagtgctgccaagcggcgccgcacgtagaccctcagccctggtggcggcagagaagcgggcgaggcactgtggtcgctgagggggttggctgggtctgagtgccaccccccaggccacagtgataccatcccagtgccatgagcccacactgcccgccctcaggctctcaggtgaacgtggccgtcagcggggaaacgtgtgtgtcagttggaccatgtgggaccccgatggacctgaaagaccaggatcggtccagctcagatattgagggctctgaagcctagttctgtcttctctggagcagctgtggcttccccgtggctgcttggtgacatggattagcgctacgtgggctgcagcatttgggatccaggctacctagaggggcatcgggccagggaaaacctcggattagcaagcaataaaaatatgacctcactcttcctcaaaggagcccctggtcttccctgtgtgactcagttctttccatctgtttgtcccgctgcaagcctctttctgcgctgactgtgacatcggaacgtggccttcctgtcaccccctccgtgccacgcactgaaggccacccccacccacctgggaaactaagaactggatattttgcctcattcacttgtactgtaacaatgtatataatttggttggtatttcactatttaatttttaagaagcctattttactagtgttttatatgaacaaagtactgcagaagttaaacctgtgttgtattttttctgagatgttttgctttaagagatactttttgctcagtttttatatgccagatacagagaatttgtagcggttattttttgtatgatctagtaacttgcaaacagaccaaatggatgagaggcggggaccgtgcagctgtcggctgatgaggaggcggccgccccagtgctgatggagatgccactttcgtgtgactgcgaacattaaagcacaaaaaaatcc

SEQ ID NO: 1823 - DNA, 507 bp, Homo Sapiens
  misc_feature (113)..(113): n is a, c, g, or t
  misc_feature (129)..(129): n is a, c, g, or t
  misc_feature (234)..(234): n is a, c, g, or t
  misc_feature (266)..(266): n is a, c, g, or t
  misc_feature (334)..(334): n is a, c, g, or t
  misc_feature (415)..(415): n is a, c, g, or t
ggccttccaaagtgctgggattacaggcgtgagtcaccgcgcccggccaaataaaataaaatgttaaagcaaattcaggactacccctcctccaagtcttctgttccctttgngcagcccaggtgagcnggggaggggctgggggagtaataacatcaaaagagcgccttttcctcccttattccgaggagacttccctgggcctgactcccggtcctgtccccagcgccccgngcactctggagccccttcagtgaccaagatanagagatcaggacgcctttgcgccgccccaaggtgcccgcccctaagctggctctgcttgggccgcganggaaaggtgaggtcgggggcggacggggagcgtgacagccggggtgtgtgtccgccgggcttggtgcctccggtggccctncaagcaccgtcccacctctggccaccctccgatggggccgctaactgtgttgcctgccaatcatgctgctcctgctacttgccgtcgctgct

SEQ ID NO: 1824 - DNA, 346 bp, Homo Sapiens
  misc_feature (29)..(29): n is a, c, g, or t
  misc_feature (49)..(50): n is a, c, g, or t
  misc_feature (276)..(276): n is a, c, g, or t
tttactggcccaacttgggagtggggaanttgcttaaaaaaaaagaaanngaaaaaaaaaaaagattattctaaataaaaggaaaaaggcttacactacctaaagctgtgctctctgcctcctgggagagggccgcaaagccaggcaccccgccaaccactgggggtcctaatccacctgctgggcatcacctctcctcctcctcagaattgggtgtttgctgaccatcaaaagcaatgactttttattctgtttgtactgaaccaaaacaaacanctgtgtatagacttctgttttcttttgtatttgaaatgaggcatttttggtgtttttcccctaccatacg

SEQ ID NO: 1825 - DNA, 1410 bp, Homo Sapiens
gagaaagccttgctgggggcatgtgactgcacccagattgtgaaacccagtggggtccacctcaagctggtgctgaggttctcggatttcgggaaggccatgttcaaacccatgagacagcagcgagatgaggagacaccagtggacttcttctacttcattgactttcagagacacaatgctgagatcgcagctttccatctggacaggattctggacttccgacgggtgccgccaacagtggggaggatagtaaatgtcaccaaggaaatcctagaggtcaccaagaatgaaatcctgcagagtgttttctttgtctctccagcgagcaacgtgtgcttcttcgccaagtgtccatacatgtgcaagacggagtatgctgtctgtggcaacccacacctgctggagggttccctctctgccttcctgccgtccctcaacctggcccccaggctgtctgtgcccaacccctggatccgctcctacacactggcaggaaaagaggagtgggaggtcaatcccctttactgtgacacagtgaaacagatctacccgtacaacaacagccagcggctcctcaatgtcatcgacatggccatcttcgacttcttgatagggaatatggaccggcaccattatgagatgttcaccaagttcggggatgatgggttccttattcaccttgacaacgccagagggttcggacgacactcccatgatgaaatctccatcctctcgcctctctcccagtgctgcatgataaaaaagaaaacacttttgcacctgcagctgctggcccaagctgactacagactcagcgatgtgatgcgagaatcactgctggaagaccagctcagccctgtcctcactgaaccccacctccttgccctggatcgaaggctccaaaccatcctaaggacagtggaggggtgcatagtggcccatggacagcagagtgtcatagtcgacggcccagtggaacagtcggccccagactctggccaggctaacttgacaagctaagggctggcagagtccagtttcagaaaatacgcctggagccagagcagtcgactcgagtgccgaccctgcgtcctcactcccacctgttactgctgggagtcaagtcagctaggaaggaagcaggacattttctcaaacagcaagtggggcccatggaactgaatctttactccttggtgcaccgcttctgtcgtgcgttgccttgctccgtttttcccaaaaagcactggcttcatcaaggccaccgacgatctcctgagtgcactgggaaatctgggtataggtcaggcttggcagccttgatcccaggagagtactaatggtaacaagtcaaataaaaggacatcaagtggaaaaaaaaaaaaaaaaaaaaaaaaaaaaaaaaaa

SEQ ID NO: 1826 - DNA, 364 bp, Homo Sapiens
ttttttttttttttttttttttttttttttttttttaccagggacaagggttttaccaacaaacacatgagtggggggaagttacatgggggggggggagggcgagggatagagaggtccccctggattggcctcagccaattacatcccgagtctgggacccagccccactgttttcccgctggaggctgcaacgattcattttcagctgagtcagctggatgtagcggagcacattggtgtctgggggttcccggctgggggcctcctgcaggaagcgcaacgcgcgtgcgtagtcccccagggggtaaaaggcaatgccggcacggtaggggggcctgaagttgccctgctgtttttccag

SEQ ID NO: 1827 - DNA, 378 bp, Homo Sapiens
agactgagtttcgctcttgtcgcccaggctggagtgcgatggcctgatctcagctcacggcaaactctacctcccaggagaatcgcttaaacccaggcggcagaggttgcagtgagccaggatcgcgccactgcactccagcctcagcaatagagtgagactgtctcaaaaaaaaaaaaaaaaaaaaaaacctgccaattttcaaacataccgtagagattattttcaggtgccattttatagtatagcagcagggcttttactctgtgtatgcacagatgcagtctggggcatggtttgtgtgctggactttctcatggccatcatcagtttgcttatggatttgatgacaggcatagcccgggcatatcaccctat

SEQ ID NO: 1828 - DNA, 231 bp, Homo Sapiens
  misc_feature (144)..(144): n is a, c, g, or t
tgacagccgccaacacagagccctggagaggtggggagctgctgaagggcgggagaagttgcggcgtggcgataggtctgggtgttctgggaggacccctaaaagggagcagctctgccaggtcagagcttgaggtagcatgtntgccgcttccaggaggccaggatggagacagcagttcgaggaatgcccttggaatgccctcctaggccggagcggctcaatgcctac

SEQ ID NO: 1829 - DNA, 424 bp, Homo Sapiens
gacagtgtagcacgaagcactttcccataaagtctctgaccacttagatggttcattgctagctgagcttgatttgcatccgccatctgaaccaaggcattttctttcttattaaacataatcttcactcgatgtacatcaccatagactccaaataggataaaaagcccatgtggtgtgataagatcaggattgagatttgtgacgagtagaacagaatttcctggtataccactagccccaggaatggccatccttccagtgacagcagaagaggtgattgtgagaggaccaagagctccaggaacagctggaactgatagacctgtagcttgaggaaatccaatggctggggcaaatccagcagcccctgcatatggtgaagaattatacccggtgcacaaaagcagagccatagggggtt

SEQ ID NO: 1830 - DNA, 293 bp, Homo Sapiens
  misc_feature (24)..(24): n is a, c, g, or t
  misc_feature (26)..(26): n is a, c, g, or t
  misc_feature (34)..(34): n is a, c, g, or t
  misc_feature (210)..(210): n is a, c, g, or t
  misc_feature (223)..(223): n is a, c, g, or t
ctctcaccattagcaaccttgcangngatgggtntttcttctatggccacatgtctctgtggctctttccttcccccttctcttccactgttaaggactcatgtgcttacttagtcctgaatggagacaccgtcatcatccacatgagcccactgtcctaatccatacaggctgctacaaggaaatgcattagaccaggtagcttataantaacagaactttntttctcacagtcctggaggctgagaagtgcaagatccaaggtgccggcagtcttgggtgtctggtgaagg

SEQ ID NO: 1831 - DNA, 673 bp, Homo Sapiens
ccgcgccgctgcggctgcaggcggcgacggctacaccatgggccggctgctgcgggccgcccggctgccgccgctgctttcgccgctgctgcttctgctggttgggggagcgttcctgggtgcctgtgtggctgggtctgatgatgcctggcccagagggcctcacctccacctccctgctagacctcctgctgcccactggcttggagccactggactcagaggagcctagtgagaccatgggcctgggagctgggctgggatgcccctgtgctcaggcttccccagcgaagagaatgaagagtctcggattctgcagccaccacagtacttctgggaagaggaggaagagctgaatgactcaagtctggacctgggacccactgcagattatgtttttcctgacttaactgagaaggcaggttccattgaagacaccagccaggctcaagagctgccaaacctcccctctcccttgcccaagatgaatctggttgagcctccctggcatatgcctcccagagaggaggaagaagaggaagaggaagaggaggagagggagaaggaccgaggtagagaaacaagaggaggcgggagaggaggagctgcccctgttgatggatcccagaagagccaagctcaggtccgtgactttctccaccaacagagcaaa

SEQ ID NO: 1832 - DNA, 221 bp, Homo Sapiens
  misc_feature (2)..(2): n is a, c, g, or t
  misc_feature (25)..(25): n is a, c, g, or t
  misc_feature (42)..(42): n is a, c, g, or t
  misc_feature (118)..(118): n is a, c, g, or t
  misc_feature (137)..(137): n is a, c, g, or t
  misc_feature (208)..(208): n is a, c, g, or t
anacagtggacctcacatcacctcncagattgtttccatttnatggattgaaactctgaggcctccagacatgaagaagcagccatagattcagtcaaatgccagccaagggtttgcnttgcctcagacaacctccncagccccatttgacccagagaccagctgtcagggagcgacctcagagccagaggggtgaaagatgagaggnaagaaggtagctc

SEQ ID NO: 1833 - DNA, 1645 bp, Homo Sapiens
gttccactctattggcgtgcaggtggaagaggacaagaggcgagcaaggttcaagcgctccaatagtgtgacggctggcgtgcaggcagacctggagctggagggcctggcaggcctggccacggtggccacagaagacaaggccctgcagtttggacgctccttccagaggcacgcctctgagccccagcctgggccccgggcccccacctactcagtcttccgcacggtccacacgcagggccagtgggcctaccgcgagggctacccactgccgtacgagccgccggccaccgatgggtcgcccggccctgcccccgcccccacccccggccctggggccggccgccgtgactcctggatagagcgcggttcacgtagcctccccgactcaggccgcgcatccccctgcccacgcgacggcgagtggttcatcaagatgctgcgggcagaggtggagaagctggagcactggtgccagcagatggagcgtgaggcggaggactatgagctacccgaggagatcctggagaagatcccgcagtgctgtgggcagcacacaacttctcctgtcccagaaggttcagcagttcttccggctgtgtcagcaaagcatggatcccactgcgttccctgtgcccaccttccaggacctggcgggtttctgggacctcctacagctctccatcgaggatgtgaccctcaagttcctggagctacagcaactcaaggccaacagctggaaactcctggagcctaaggaggagaagaaggtccctccgccgataccaaagaagcccctgcggggccggggcgtgccggtgaaggagcgctccctggactccgtggaccggcagcggcaggaagcgcgcaagcggctcctggcggccaagcgcgccgcttccttccgccacagctcggccaccgagagcgccgacagcatcgagatttacatccccgaggcccagaccaggctgtgaccggtccggcccgcccagcccggcccgggcccgcggttctccacccgtactgtacacccagcgtcgaggtcactgtgaacgcgggccgccccgtgcgcccgccccaccggcaccggacgccccggcccccgggcccgtcacactctcgtgggttttttaccttcctgatcccacgcgaaggcgcccgggctgggcagggggccgtgcctctccgccctgcgcccctcacctggatcccctgcccacctggtccgacgctttgtccccacctcctccccatgggcaccatctctgccattctttcccccacgggccaggccgggccgggtccctcatctgggctctgcgtccccccctcccccaccccgcggggctgggcttcgtggggatcaagcttcgtggctttttatgaagaatcccgaaccctgcctaggagcccgccccaccctcccaggggctccatcctcagccctctgcccactgggcccagggaccacagtggctggaccaacccaggaccagggcgcctgggcctctcccctttcccagcggctggggaggggagatgggggcttcccctcaccacacctgtggctgttcccacatccccttgaatatcccaggaaaaataaaacggcagaactgcaaaaaaaaaaaaaaaaaaa

SEQ ID NO: 1834 - DNA, 469 bp, Homo Sapiens
  misc_feature (409)..(409): n is a, c, g, or t
gaggggacgtcgtcgtagagggccggagcgggcgggcggcgacggacccggctcccgcgcaggacggagccgtggctcaggtcggcccctccccaacaccaccccgggcctccgccccttcctgggcctctcggtggagcagggacccgaaccggtgcccatccagtccggtgccatctgaagcccccttcccagaaaatgagccacagagcaagctgaccccagcgacacagccccccagccctactgtatttccgttcctatcaaaaaatggatgactcggagacaggtttcaatctgaaagtcgtcctggtcagtttcaagcagtgtctcgatgagaaggaagaggtcttgctggacccctacattgccagctggaagggcctggtcaggtttctgaacagcctgngcacatcttctcattcatctccaaggacgtggtctcaagctgcggatcatggagcgctca

SEQ ID NO: 1835 - DNA, 626 bp, Homo Sapiens
cggataggcgacatttcaacgtactaattcagctggaccagggggccgggagggcccgtgcccaaccccaggctcagggtctggccgagaagatccgagcctgctgctaccttgagtgctcagccttgacgcagaagaacttgaaggaagtatttgactcggctattctcagtgccattgagcacaaagcccggctggagaagaaactgaatgccaaaggtgtgcgcaccctctcccgctgccgctggaagaagttcttctgcttcgtttgagcagctatggctgcatagcaagtagtaggcaggaggccaaagacttctgagacctggggcacccgggcctttgcggcagctactggcagggcctggccacctcataggactcagttccccttctgaacactcggggggacatgggcctctaactgcccactctgatatgcctgggtgagcctaggagggaaggctctgatttggattctccagtcaaagctcacagaaaaaaacctggcactttgatttcatgggatggtcctaacaggtcagtccctccgagcagtttgggaaccagttcttgtctgggcctcaggtcagctggtgaataggacccttctggcaagggggaga

SEQ ID NO: 1836 - DNA, 683 bp, Homo Sapiens
gggctgcaggaattcggcacgagcttagctgaagatgactgacagtgttatttattccatgttagagttgcctacggcaacccaagcccagaatgactatggaccacagcaaaaatcttcctcttccaggccttcttgttcttgccttgtggcaatagctttggggcttctgactgcagttcttctgagtgtgctgctataccagtggatcctgtgccagggctccaactactccacttgtgccagctgtcctagctgcccagaccgctggatgaaatatggtaaccattgttattatttctcagtggaggaaaaggactggaattctagtctggaattctgcctagccagagactcacacctccttgtgataacggacaatcaggaaatgagcctgctccaagttttcctcagtgaggccttttgctggattggtctgaggaacaattctggctggaggtgggaagatggatcacctctaaacttctcaaggatttcttctaatagctttgtgcagacatgcggtgccatcaacaaaaatggtcttcaagcctcaagctgtgaagttcctttacactgggtgtgtaagaaggtcagactttgatagatgaccactctgtcctgaccctcagatctgtcatgtatccctaaaaggagggagctggccactggctgttgggaaa

SEQ ID NO: 1837 - DNA, 625 bp, Homo Sapiens
  misc_feature (3)..(3): n is a, c, g, or t
  misc_feature (13)..(13): n is a, c, g, or t
  misc_feature (215)..(215): n is a, c, g, or t
  misc_feature (233)..(233): n is a, c, g, or t
  misc_feature (336)..(336): n is a, c, g, or t
  misc_feature (397)..(397): n is a, c, g, or t
  misc_feature (413)..(413): n is a, c, g, or t
  misc_feature (419)..(419): n is a, c, g, or t
  misc_feature (423)..(423): n is a, c, g, or t
  misc_feature (443)..(443): n is a, c, g, or t
  misc_feature (457)..(457): n is a, c, g, or t
  misc_feature (463)..(463): n is a, c, g, or t
  misc_feature (467)..(467): n is a, c, g, or t
  misc_feature (469)..(470): n is a, c, g, or t
  misc_feature (478)..(478): n is a, c, g, or t
  misc_feature (480)..(480): n is a, c, g, or t
  misc_feature (484)..(484): n is a, c, g, or t
  misc_feature (488)..(488): n is a, c, g, or t
  misc_feature (492)..(492): n is a, c, g, or t
  misc_feature (508)..(508): n is a, c, g, or t
  misc_feature (520)..(521): n is a, c, g, or t
  misc_feature (536)..(536): n is a, c, g, or t
  misc_feature (540)..(540): n is a, c, g, or t
  misc_feature (559)..(559): n is a, c, g, or t
  misc_feature (563)..(564): n is a, c, g, or t
  misc_feature (568)..(569): n is a, c, g, or t
  misc_feature (575)..(576): n is a, c, g, or t
  misc_feature (578)..(580): n is a, c, g, or t
  misc_feature (584)..(584): n is a, c, g, or t
  misc_feature (586)..(596): n is a, c, g, or t
  misc_feature (599)..(599): n is a, c, g, or t
  misc_feature (601)..(601): n is a, c, g, or t
  misc_feature (603)..(607): n is a, c, g, or t
  misc_feature (610)..(612): n is a, c, g, or t
  misc_feature (615)..(615): n is a, c, g, or t
  misc_feature (621)..(623): n is a, c, g, or t
ttntactcaatgnggtgttatgttgcattttctcagctcctggggatggaaatggaggatcccagaacacacagccctggcccctttgattctagggcctgcacagatctctggttcaaatgcacaggccctcagaatagaggaacatgaagagagatcttagagcacacagtagaatgtgagagcctgggtgtctgagaccgggagggcccagnagtgaggggcaggctctnctggtcaccaggctgttcagtggactcagttcttcatcttgtaatgtcgatggctttgccacaccaggccaagcccatgccataccttgtcaagactgtcaangtggttgtggttaagtcaagctggttttgggttcttgatggttaggaagaaacaggtcagncctcaagatcactggnccgggncagntgaccccctagaaccctggntcttgccaattagnttaggncctncnnctctgccnanattngggncttntccttctccccattanaacatttggttnngggcttcaagaattnaaanagcgggttcccatttgggntttnncacnngtttanntnnntcanannnnnnnnnnnctntncnnnnnttnnnctngctccnnntt

SEQ ID NO: 1838 - DNA, 318 bp, Homo Sapiens
ggagagtgtgcggctccaggtgggctcacgcggtcgtgatgtctcgggagtcggatgttgaggctcaacagtctcatggcagcagtgcctgttcacagccccatggcagcgttacccagtcccaaggctcctcctcacagtcccagggcatatccagctcctctaccagcacgatgccaaactccagccagtcctctcactccagctcttggacactgagctccttagagacagtgtccactcaggaactctattctatttctgaggaccaagaaccttaggaccaagaacctcaggagcctacccctgccccctagg

SEQ ID NO: 1839 - DNA, 512 bp, Homo Sapiens
ggcacgagtacagcttgtacatggacattctgcaaacccagctgtcacatttttcttgcaactccttttgcaaaagcagactaaaatgttttaaaatgtgaaaaaacattattttttcaaagcaagaaaataatttactgccctcttacataatgtatttataaagtttttccagataaacctaatcaaataaattagaataatgtgacaacattacaaatttaatttgttagctgcattccttctgatgttaccacgatagaatgttactgatgattcagggctatttctgaagtctgtatgttgctgctgtccccagtgatggtggacttatctttgccttacctgatcacaaattatgttggggaaaataaagatttaatatttctttaaatagaaaaagaatttggttttgctcgtttaagagcaatgagaaaatgatggaatgttgactgtgtttggcacacaggacacggaccttcatggaagtccttgctctgcgtggcatctgg

SEQ ID NO: 1840 - DNA, 308 bp, Homo Sapiens
  misc_feature (266)..(266): n is a, c, g, or t
  misc_feature (275)..(275): n is a, c, g, or t
caagtgtcaatcacatgagcgccttgccttctcttaggctttgaagcatttttgtctgtgctccctgatcttcatgtcaccaccatgaagttcttagcagtcctggtactcttgggagtttccatctttctggtctctgcccagaatccgacaacagctgctccagctgacacgtatccagctactggtcctgctgatgatgaagcccctgatgctgaaaccactgctgctgcaaccactgcgaccactgctgctcctaccactgnaaccaccgntgcttctaccaccgctcatgtgattgacacttg

SEQ ID NO: 1841 - DNA, 700 bp, Homo Sapiens
ctcgcgtgccgcgctcacccacccgcggcatgagcagcgcccccgcgccgggcccggcgcccgccagcctcacgctctgggacgaggaggacttccagggccgtcgctgtcggctgctaagcgactgtgcgaacgtctgcgagcgcggaggcctgcccagggtgcgctcggtcaaggtggaaaacggcgtttgggtggcctttgagtaccccgacttccagggacagcagttcattctggagaagggagactatcctcgctggagcgcctggagtggcagcagcagccacaacagcaaccagctgctgtccttccggccagtgctctgcgcgaaccacaatgacagccgtgtgacactgtttgagggggacaacttccaaggctgcaagtttgacctcgttgatgactacccatccctgccctccatgggctgggccagcaaggatgtgggttccctcaaagtcagctccggagcgtgggtggcctaccagtacccaggctaccgaggctaccagtatgtgttggagcgggaccggcacagcggagagttctgtacttacggtgagctcggcacacaggcccacactgggcagctgcagtccatccggagagtccagcactaggctccacggccccagacaccttccctgaggacactcaataaaggttcctgaatcttcctgccaaaaaaaaaaaaaaa

SEQ ID NO: 1842 - DNA, 819 bp, Homo Sapiens
gctgtgctggcagagatgctgcccacagcctggtgatgagcagccggcctcccggccttcctgctctgcagcacgctgctggtcatcaagatgtacgtggtggccatcatcacgggccaagtgaggctgcggaagaaggcctttgccaaccccgaggatgccctgagacacggaggcccccagtattgcaggagcggacccgacgtggaacgctgctcagggcccaccggaacgacatggagaccatctaccccttccttttcctgggcttcgtctactcctttctgggtcctaaccctttttgtcgcctggatgcacttcctggtcttcctcgtgggccgtgtggcacacaccgtggctacctggggaagctgcggggcacccatccgtcctgtgactacaccctgtgcccagctcccctgctgcctccatggctctgcagatcctctgggaagcgggcccgccgactgtgaccagcagctgatgcctccttggccaccagacatgggccaagagcccgcgtggtatacctggggacttgatgttccttccagattgtggtgggccctgagtcctggtttcctggcagcctgctgcgcgtgtgggtctctgggcacagtgggcctgtgttgtgtgcccgtgtgtgtgtatgtcgtatgtcgtgtgtgtatgtttcttagccccttggattctgcacggcagtggctgatgggaaccatttcaagacagatttgtcgaagattgctagaacatccttccagtaagtaccgagctcaacaacttcatccctcttcctcctaaagtgacacagaacacggc

SEQ ID NO: 1843 - DNA, 309 bp, Homo Sapiens
gcttggttccgcgttccctgcacaaaatgcccggcgacgaccagaaaccgtccctgctacagagcaggagttgccgcagccccaggctgagacagggtctggaacagaatctgacagtgatgaatcagtaccagagcttgaagaacaggattccacccaggcaaccacacaacaggcccagctggcggcagagctgaaattgatgagaaccagtcagtaaagcaaacagagtcggagtgaaagaggcacgaaggctattccaactgggtcttcggcaggttacaggagttactagagtcactatccgaa

SEQ ID NO: 1844 - DNA, 540 bp, Homo Sapiens
  misc_feature (179)..(179): n is a, c, g, or t
  misc_feature (396)..(396): n is a, c, g, or t
  misc_feature (531)..(531): n is a, c, g, or t
ggagcacacccacacccaccataggtctctcttctccggtcttcccagaagggtaaaactcccagcctaccctgctccagcttcagcccaggtagttggtgtgtctcaatatgaatagggggtgagtagcttcatagaaagaatggggaactcccttggcctcaagccagtatagtttngaagttgggggtcggggatgttaagggtggggagtatcctgcctgtgacctctaggttatgaaaactatcttagaaggtgcttttagaaagaaccaggagaacaaccaaagcagcttacagacgcctgaacggagaatgaagtgtttcaagtaagcgagtctgcaagttctcagaagcagacagatatcccaatcttggactgcagccagggaagtnctctctctcgctctctctctctctctctctctctctcattgcttgtatgacttcacaagcaactcaggatccattctagccaggctttcccactgtcaaaccagagacttcattctaaaaaggggagtgataacnagagctcca

SEQ ID NO: 1845 - DNA, 347 bp, Homo Sapiens
ttgaagctcccaggagagacaactgcagtcatcactttccactgtgttcagtgatgtcagttcggcccagctggaggtattcacatcatggaaacagaccatcagatttggtgtgtgtgtgttttattttgctttttcagagagccagctgttaaacactagccaacaccccattgatgctgttccttctacctgaaacacctcgcattgccggtgagctctaaagacaaaaggacctgggtctgcatttcccaaaggcaagactctggtatcacctgcatattattttcccatatttgagcaccactgccttttgcattatttacttagcagttttgctcctgtca

SEQ ID NO: 1846 - DNA, 1585 bp, Homo Sapiens
acagcagttacactgcggcgggcgtctgttctagtgtttgagccgtcgtgcttcaccggtctacctcgctagcatgtcgggccgcggcaagactggcggcaaggcccgcgccaaggccaagtcgcgctcgtcgcgcgccggcctccagttcccagtgggccgtgtacaccggctgctgcggaagggccactacgccgagcgcgttggcgccggcgcgccagtgtacctggcggcagtgctggagtacctcaccgctgagatcctggagctggcgggcaatgcggcccgcgacaacaagaagacgcgaatcatcccccgccacctgcagctggccatccgcaacgacgaggagctcaacaagctgctgggcggcgtgacgatcgcccagggaggcgtcctgcccaacatccaggccgtgctgctgcccaagaagaccagcgccaccgtggggccgaaggcgccctcgggcggcaagaaggccacccaggcctcccaggagtactaagagggcccgcgccgcggccggccgccccagctccccatgccaccacaaaggcccttttaagggccaccaccgccctcatggaaagagctgagccgcttcagactgcggggcaagcgggccgcggctcccttcccctcccctcccctcgcccgccttcgccgcccggcctcgagtccccgcccgcccccgctcccgtcccgcaccgcctgccgcgtcggcctcgggcctgccctgtccgccgtccgccctccggtagggttcgggccttccggatgcggcttgggcgctcttcggggacctccgtggcgcggaagacccgagcctgccggggggaggccggcggcgccgcacctgcccgcctcggcgttcgtgactcagccgccccatcccgagtcgctaaggggctgcggggaggccgcagcaccttctggaagacttggccttccgctctgacgcagggccgaggtgggcagtccaggccgagagccggcggccctgaaggtgagtgaggccctcggcagctgcagccggggtgtctggtacccccccggcgtggtgcttagcccaggactttcagacggccgctggccgggaggctttggtgggagagacgcgatcgccgatttcggtctggcgccccttctgcggccgggacccaggcctttcacatcagctctccctccatcttcattcataggtctgcgctggggccgggacgaagcacttggtaacaggcacatcttcctcccgagtgactgcctcctaggaggacatttaggggagggcagaggcctgcagtttggcttcacggctggctatgtggacagcaagagtcgttttgcggaacgcgactggcagccaggcctgtcgggcccccgacgccgccccatttcccttccagcaaactcaactcggcaatccaagcacctagataccagcacaagtcggttaatccctgtctggactgagcctccgttggcttctgaactggaattctgcagctaacccttccacgactagaaccttaggcattggggagttttagatggactaattttattaaaggattgtttttttttt

SEQ ID NO: 1847 - DNA, 509 bp, Homo Sapiens
gtcgccatcttcagccttggattcatcatcctgggcagcctctgtgtcctcctgtccctcgggaagaagagggactaatctgctgcgacccgcgtccatgttctatgcctttgcaggtctctgcatcctcgtctcggtggaggtcatgcggcagtcggtgaagcgcatgattgacagtgaggacaccgtctggatcgagtactattactcctggtcctttgcctgcgcctgtgccgccttcatcctcctctttctcggcggtctccccctcctgctgttctccctgcctcgaatgccccggaacccatgggagtcctgcatggatgctgagcccgagcactaaccctcctgcggccctagcgaccctcaggcttcttccccaggaagcggggtcttggcctggaaccttccagagaggaggcgggacgaattttagccccaccctgctcccatctgcccccctgcaacagtcgcaggctgcttcctctctctgagttcctctgggctgc

SEQ ID NO: 1848 - DNA, 2350 bp, Homo Sapiens
ctggcggagcagaggtgcagaagcaactgagtccaagttgtctggccggcttcaggtggacccagaagacgtccccaactcagggagattcagcgatcactcactcactcgctgtacagaatgatattcctcacggcactgcctctgttctggattatgatttcagcctcccgagggggtcactggggtgcctggatgccctcgtccatctcggccttcgaaggcacgtgcgtctccatcccctgccgctttgacttcccggatgagctgcggcccgctgtggtgcatggtgtctggtacttcaatagcccctaccccaagaactaccccccggtggtcttcaagtcgcgcacccaagtagtccacgagagcttccagggccgcagccgcctcctgggggacctgggcctgcgaaactgcaccctcctgctcagcaacgtcagccccgagctgggcgggaagtactacttccgtggggacctgggcggctacaaccagtacaccttctcagagcacagtgtcctggatatcgtcaacacccccaacatcgtggtgcccccagaggtggtggcaggcacggaggtggaggtcagctgcatggtgccggacaactgcccagagctgcgccctgagctgagctggctgggccacgaggggctgggggagcccgctgtgctgggccggctgcgggaggacgagggcacctgggtgcaggtgtcactgctgcacttcgtgcccacgagggaggccaacggccacaggctgggctgccaggcctccttccccaacaccaccctgcagttcgagggctacgccagcatggacgtcaagtaccccccggtgattgtggagatgaactcctcggtggaggccatcgagggctcccacgtgagcctgctctgtggggctgacagcaaccccccgccgctgctgacctggatgcgggacgggacagtcctccgggaggcggtggccgagagcctgctcctggagctggaggaggtgacccccgccgaagacggcgtctatgcctgcctggccgagaatgcctatggccaggacaaccgcaccgtggggctcagtgtcatgtatgcaccctggaagccaacagtgaacgggacaatggtggccgtagagggggagacggtctctatcttgtgctccacacagagcaacccggaccctattctcaccatcttcaaggagaagcagatcctgtccacggtcatctacgagagcgagctgcagctggagctgcccgccgtgtcacccgaggatgatggagagtactggtgtgtggctgagaaccagtatggccagagggccaccgccttcaacctgtctgtggagttcgcccctgtgctcctcctggagtcccactgcgcggcagcccgagacacggtgcagtgcctgtgcgtggtgaagtccaacccggagccgtccgtggcctttgagctgccatcgcgcaatgtgaccgtgaacgagagcgagcgggagttcgtgtactcggagcgcagcggcctcgtgctcaccagcatcctcacgctgcgggggcaggcccaggccccgccccgcgtcatctgcaccgcgaggaacctctatggcgccaagagcctggagctgcccttccagggagcccatcgactgatgtgggccaagatcgggcctgtgggcgccgtggtcgcctttgccatcctgattgccatcgtctgctacattacccagacacgcaggaaaaagaacgtgacagagagccccagcttctcggcaggggacaaccctcccgtcctgttcagcagcgacttccgcatctctggggcaccagagaagtacgagagcgagaggcgcctgggatctgagaggaggctgctgggccttcggggtgagcccccagagctggacctgagctattctcactcggacctggggaaacggcccaccaaggacagctacacgctgacggaggagctagctgagtatgctgaaatccgggtcaagtgaaggagctgggggcagcctgcgtggctgacccccctcaggaccctcgctggcccccactggctgtgggctcccttcctcccaaaagtatcgggggctgggccaggagggagtgaggcaggtgacagtgaggtcctgggggcctgacctccccctccttcccagctgcccctccctgccagcacccccacgccctcattacggctcctctctaacctcctttaccctcatctgtctggaggggagctctgtctgtccgtgttatttattgctacttcctgcctggtctcctgcccccacacctggccctggggcctgtacaaaagggacatgaaataaatgccccaaagcc

SEQ ID NO: 1849 - DNA, 432 bp, Homo Sapiens
accgtcccatgactctcccgggctggcagccgggacgcgcggccgccgccgctgcagacgacgagtctgccctcgtcccgcgcccccggggctcgcggagccaggtctccacctctgggcaggagagttgccgaccacctcgggggtgctttctctgcgcttgaacatctatagctgcttctgaggggctgggagccgggcccctgggagagacgagccatgaaccccccacagcctctgcatttggggacctcaccttaggagagtgccatttacagcttccgccagggcaaaggagctgagcagccatcccaagcccagcccacctccctcccccggcccctggtaggcatggactagcagctgtgggcagccagagctgatgcccggcccccaggggggcagaggcgccgccaccatgagcctgggcaa

SEQ ID NO: 1850 - DNA, 538 bp, Homo Sapiens
  misc_feature (100)..(100): n is a, c, g, or t
gtgatgggggagaaaacacttcattgggttcaaagataatattccctatcataaatcagtggcataaacagccagtgggccaggtgggcccaccgtatgnctagctgacaagggcagtcacacaccggtaagtgctgatacaggatgaggggtgcggagctgaggatgttgttctctttgatgaaggcctgaaaacttcccctggcccctgctgcccacctcagggctcctcaggacgaagggcatgaggacaggttcccactctggcccttcgctgggggacatggtttggtttccccatcgccaggctggccagctggggcccaagcactgaccgtccttccccaccttatcccatcagctgccctgcacaggagcagaaaacccatgcctcagagctacttcctaaggacactgcctctagaaggccctaaagtggcagagccggggatggcaggtgcagccctggccactagcacagcagttgccctcagatctgttagctgtgacccatagattgggggagggaggaaagcca

SEQ ID NO: 1851 - DNA, 433 bp, Homo Sapiens
  misc_feature (225)..(225): n is a, c, g, or t
  misc_feature (309)..(309): n is a, c, g, or t
  misc_feature (344)..(344): n is a, c, g, or t
gaggacaaagatactcagagagaaaaagtaaaagaccgaagaaggaggctggagagaccaggatccttccagctgaacaaagtcagccacaaagcagactagccagccggctacaattggagtcagagtcccaaagacatgggcttgttagagtgctgtgcaagatgtctggtaggggccccctttgcttccctggtggccactggattgtgtttctttggggtngcactgttctgtggctgtggacatgaagccctcactggcacagaaaagctaattgagacctatttctccaaaaactaccaagantattgagtatctcatcaatgtgatcccatgccttnccagtatgtccatctattggaactgcctcttttcttttttccctttattgggggccctcctgcttggcttgagggttttttacaaccac

SEQ ID NO: 1852 - DNA, 3713 bp, Homo Sapiens
attaacaggccgtggttaggaaggacggagaaggggcgttcgctcctttgggacttttcatgcctcgtttttttttcagatgtggcttggtctgggcgcaaggtcccagcagccagcttaagcttactcttctgtgaaaggggaaagtatcccctgtggaaagcggttaaacttgtggagggggtgcgggacgtgagttcttccccatgccaggcgaatggtgtggccttgagctggtccaggagccggctcgacgtgtctgagggaggcccggagggggcggggaggtggcccacagaacgcgggttctgtaaagagacgttgggaagattcgattccgagaagaggaagaaccggattgaaagagagccaggccgctgagggggagggggctgctaagatggcgtcggcctcctccgggccgtcgtcttcggtcggtttttcatcctttgatcccgcggtcccttcctgtaccttgtcctcagcatctggaatcaagagacccatggcatctgaggtgccttatgcctctggcatgcccatcaagaaaataggccatagaagtgttgattcctcaggagagacaacatataaaaagacaacctcatcagccttgaaaggtgccatccagttaggcattacccacactgtggggagcctgagtaccaaaccagagcgtgatgtcctcatgcaagatttctacgtggttgagagtatcttctttcccagtgaagggagcaacctgacccctgctcatcactacaatgactttcgtttcaagacctatgcacctgttgccttccgctacttccgggagctatttggtatccggcccgatgattacttgtattccctctgcagtgagccgctgattgaactctgtagctctggagctagtggttccctattctatgtgtccagcgacgatgagttcattattaagacagtccaacataaagaggcggaatttctgcagaagctgcttccaggatactacatgaacctcaaccagaaccctcggactttgctgcctaaattctatggactgtactgtgtgcaggcaggtggcaagaacattcggattgtggtgatgaacaatcttttaccaagatcggtaaaaatgcatatcaaatatgacctcaaaggctcaacctacaaacggcgggcttcccagaaagagcgagagaagcctcttcccacatttaaagacctagacttcttacaagacatccctgatggtctttttttggatgctgacatgtacaacgctctctgtaagaccctgcagcgtgactgtttggtgctgcagagcttcaagataatggattacagcctcttgatgtcaatccataatatagatcatgcacaacgagagcccttaagcagtgaaacacagtactcagttgatactcgaagaccggccccccaaaaggctctgtattccacagccatggaatccatccagggagaggctcgacggggtggtaccatggagactgatgaccatatgggtggcatccctgcccggaatagtaaaggggaaaggcttctgctttatattggcatcattgacattctacagtcttacaggtttgttaagaagttggagcactcttggaaagccctggtacatgacggagacactgtctcagtgcatcgcccaggcttctacgctgaacggttccagcgcttcatgtgcaacacagtatttaagaagattcccttgaagccttctccttccaaaaagtttcggtctggctcatctttctctcggcgagcaggctccagtggcaactcctgcattacttaccagccatcggtctctggggaacacaaggcacaagtgacaacaaaggcagaagtggagccaggcgttcaccttggtcgtcctgatgttttacctcagactccacctttggaggaaatcagtgagggctcgcctattcctgaccccagtttctcacctctagttggagagactttgcaaatgctaactacaagtacaaccttggaaaagcttgaagttgcagagtcagagttcacccattaagcgcaaagcctcagaagacctggaacaagattctgccatctctgtgatcccaagatgtcagcccttgccccagcaatgctgaattttcttctacttggtcatcaaaaaaggagtgtaatagaagtgaggggagctgctcctccatcttcttcctgaagaagaaccttctctccttcctcttcctcatgaatgggccttagtgcctcagagagttgaggaccgcagcatcccctccactccagagttgggtggtacggattttcaactggccaaccctttgcctccactattgaatttttttcagacccccattcttcatgctggaaatgggattgctggacttggcagctttctttcccctcgtctttgactaggaaccggactcttaatttcctcaggacagactagctggcacattatccctaccttagttctttctctctgactcctggaagaatactcctgtaatctctgtaaaggtttttgggggataagggtgtttaaccacctcccagctttcttcttcttttttttttctgaaaaaaggaaaaagcacacagcacacaatttcaagccattttcagatcagaactccagaagtgttgacaagatgcctattcgtagagttccctcagaagagccatggtgtttatgaagagaagagtagtgattgctctgccagaagcagctcctctttaaactcctcctctcttgatgaatttcttaaggctgaaggaatgaagagagtgggacatggggtaatctttatcccttttgttaaaacaggaggcagccatgggctgggagatcatagcccttcctaggcagaatcctgttcactgccaggctatagtaattattactattttgcaatttgaaatatattctggttgtttttctaaatgtgaagacttaccaaatgaattttagatcattctccagaggagattttttttgctcttctcatcttttccaacagtgttctcctgtttgtggagctaaggtaaagaggggacacttctgtctgtttaacagacagtccatatctgtgaggccagcaaatattttcttaaactcatggggagacagcagattcttgccttggtgaggtcattgctgtgccatatgtcctacccccctgtcttcatgcagggaagttggaaatgggggctacatatgccctctcctccccgtctacaagagttgtggttttccatctgatccttccactcttgtcaggggaagaagggggcctggtatctcaggcagattgttgaattcctgttctatcccttctctatcccaccctgccttgataatatgttagcccataccccaaataactgtctatattagacacccccagccagtttctggctgcctgtctttgctgccatgttttttacaagaaggaaagaattcttgctatttttttttcataatttactatttatgatgtatttaagtgttttattaaggacagagttctgttaggggtgggagggaatatttgagggagggctgggtcttagggaaaggaatggggaagcaacatttttattaagtgttactatttgcctctactttgtattgttcagaaatggcaaatacaatataaaagtgatatatggttttaatgtaataaactttaatgagttattta

SEQ ID NO: 1853 - DNA, 360 bp, Homo Sapiens
tttaagtttttcttttttgagaggctcatgaaattcaaaagggaccactagccaaatttcaacaagctttacaaaacaataatggctattttatattgcagttaccaatgtaatgcaattagtgctttaaaataatctacactcaaaaaaagagagagaaagagagagacctttggaggaaatatgcttattcaaaagcttcttggaaaagaaaatttacctgaatatcaagtcatgactgatctcaagtgtaatgtttaagagcttcacagacatgaatattacaatcttcaggtctcaggacttttaatctgagaaagtttagagtttggtttgttttttaaattcactttctaacca

SEQ ID NO: 1854 - DNA, 372 bp, Homo Sapiens
ttttgtatttttagtagagacgggacttcaccatgccggccaggctggtcttgaacgcctgacctcaggtgatctgcctgcctcagcctcccaaagtgctggtttgattacaggtgtgagccaccacatctggccatttgccagatcttattctttgaaactatacaagcaatttttaaaaaattaaaataagatttcctaattacatatttctgagaggtttaaggcaatgattctctgacgaggattaactcttacatctgggttgcactcatagggtaggtaaagaaaagaaaaagtgtactgttgagagttgatccataaagcagatggggaaatatgaaaaggcagcagaggctgggtgtaatccca

SEQ ID NO: 1855 - DNA, 378 bp, Homo Sapiens
tttttttttttttgtttagcgctttaccccttatttcttagaggtcacggtctaatacagggtaactctcatattggagaacttgagaaggattagtacttcaaattgagtcctaatggtagaatttttttctgagaaaaaaagggactttgtagtgctgttaggaggtaacatatgacctttaggaccagtcttaggatcaattcatggttcattaaaaggaatgtaactggaattcttgattatagacatgagaacactcttctgtcagcgttcatagtgagctgggaggttgcctacgcattaagacctagcttcataaaatgactcaaaggcctagggagtttctgggaaggagtgggagtattactctcctgg

SEQ ID NO: 1856 - DNA, 6371 bp, Homo Sapiens
caggaagatactgtgttttttcacttgccacccagaaatggaaatggagccacagtatttggtatctcttgctatcgacaaattgaagccaaggcactgaaagtaaggcaagcagatatcaccagagagactgttcagaaaagtgtctgtgttctaagcaagctgcctctgtatggtttacttcaagcaaaacttcaactcattacacatgcatattttgaagagaaggatttttcccaaatttctattctaaaggagctttatgaacatatgaatagttccttgggaggtgcttcattagaaggatcccaagtatatcttggtctgtcacctcgagatcttgtccttcattttcgacacaaggtcttaatcctatttaagctaattcttcttgaaaaaaaggttcttttttatatttctccagtgaataaattggtgggtgcactgatgactgtgttatccctttttccaggcatgattgaacatggtctcagtgactgttctcagtatagaccccggaaaagtatgtctgaagatggtgggcttcaggaaagtaacccatgtgcagatgattttgtttctgcatccactgctgatgtttcacataccaacttgggaactatcaggaaagtcatggcaggaaaccatggagaagatgctgccatgaagactgaggagcctttgttccaagtggaagacagcagcaaagggcaggaacccaatgataccaatcaatatttgaaacctccatctcgcccatctccagattcttcagaaagtgactgggaaactttggatcctagtgtcttagaggaccccaacttgaaagaaagggaacagctgggatcagaccagacaaatttgtttccaaaggactctgtcccctcagagagtcttccaattactgtacaacctcaagctaatacgggacaggtagtcctgataccagggctcatttcgggtttggaagaggatcagtatggcatgcccctggccatcttcacaaagggatatctgtgtttgccttacatggcattgcagcagcatcatcttctctccgatgtcaccgttcgggggtttgttgctggagctactaacatcctttttcgacaacagaaacacctcagtgatgccattgtggaagtagaagaagctctgatccagatccatgatccagaactcaggaagctgcttaacccaaccactgcagacctaaggttcgcagactacctagtgaggcacgtgactgagaatcgggatgacgtcttcctagatggcacgggctgggagggaggtgacgaatggatccgggcccagtttgcggtctacattcatgccctgctggctgccacgctgcaattagttctgttcagaatagtgaacgtggcaaaaaaaattggaaacgtcatggtcacaactagccggaatgttgtacaaacaggaaaagctgttggccagtcagttggaggagctttttccagtgcaaagacagctatgtcttcatggctttccactttcaccacttccacctcccaaagtctcactgagccaccagatgagaagccttgagcaaggcgtcagaggctgctattgctttctgaggtttaagtgtcccctgtctgtctgctgctcccaggctgttactagccacagatccacagcaggggaccatatgtcgaactgtttacatggatgttgctctaagtgaatgtttcgggatgccgaaatgatgaaatcacagccatagcagggatggctttccaggttggggtttcaattgactacttttatttcagtctgagcctgattaaaacatacagtgaaccttctaatgaattttgagttttgatattgtacattggtttactttagaagagtttttacttatgtaaattttgttctgttttggtgtttgaatatctagatggtcactgtaatttatacttgctaaaattaatttatattaccattttctctaaagttggccttaaaacgtgcttataaagtgaaggggtcatacagttgggccttcattattttgctgaattatgtgatgatttttttgctttctacccacaaaacatttattaattcacttcctcccagaaacatgaaagttagaggtggtagttctgaggattgggtgttttgttttacgtttttagtttgttctttccacatccttaaaaacttggtttcagacatcaaggagtatcactgtgctttcctcctctttataactgtgcaggtgggtgtgcagagaaatagcagagtgatggttcgatgatactgaagcagtttaacatgaatgtgtctgtagggcaatactttcaaagaagacctatgtgtttatttttcaaccgcagtcatgttgcagtcttacaagcactttttttttattccagagtttgtgccatctgtttctctttttttttgggggggggggggggcggggtctcactctatcgcccaggctggagtgcagtggtgccatctcggctcactgcaacctccatctcccgggttcaagcaattcttgtacctcagcctcccaagtagctgggattatggacatgcgccaccatgcccagctaattattgtatttttagtagagacggggttttgccatgttggccaggctggtcttgatctcctggcctcaagtgatctgcccgcctcagcctctcaaagtgctgggactacaggcatgagccactgcgcctggcctgtttcttttttaaacagttttctattgggtgtttgcagacctacagcttttctcgtagtcttattcataaagcttttcaaagcacttagtcttctacttccctaactgaaagtcctcctataatcaatccctacccccttctagaagtatcttaaaagaaaagcaaggtgattgtaagtattaaatagaaatctcatcttagtttatattcagcaaagtaagaggcaagagaagaaaactgcagccttgacatctgtcatctgagaaaggacatctggtttcatgttaggcacatacatgcatgtgtgtgccatctactgatgatttgtacacagctggacctcgtgtgtttgccatgctcagctctcatttgcttttcaaggatacctgggatggctgttctcagagagtacttacggggaacagactgccttttagtaacaagggatacttgggaaatacattgtgagtatgatctatcccagattgctggggaaataaaggagggccctgattatatttggtttattcctcactaaatgtttaagaagtaaatgctcccaaggcatttgaaatgaacatagaaacataatctaaatgtctctaaattttccactttgtgttttctaaacacaaattgtattactcatttgagcataactcaagaattcagcgatgataaattgaagggctgaatgtgagaactccattaattccacttcttccaagaaagttaacctcaggaaatactgtttgaagagaagaaagtagtaccaaacaaaaaccttaaacagtacttgaatcttttttgcgctgagactataaagaattcattctaacatcttgtttcataagggccacatcattcgttggagcatgatagtgtgatttgtgtacaattgttacctctcagctgctgaagttcacacttcaaggatctaggagctctgtgaggggtcgtccagcaagatgctgatttgtctttcagttggtatggtttctgtgatcggggtaaactcccgtctcccactattcaaaagcagcccaactcatgctttggaatccactgaaataaaaatagttacatgaagtttaactttgctttaatatcacttgttcctcattgaatatacactttgatcagactttctattaacatttctagctaagagtttgactcttagtggtcactttactgactttccaacataaaacaagtatctcagaagatacagctttcatcatagaaatggtcaaaagaccatagctatatttccttcaggttctgggaggtggagtttttcaaggaacactggccgttgtattgttggcaggggccccaaggcagctcgcacaatcaaaggcaggaagcctcacccctggtcctgtgaccccccccaccccacacacacacatacttcaggcttggattctaggctccaagtggccagcatagaagcagcagcctctctccaaaccctggctctgtgagccataggaaccagcactaggtcatcttctgacatagccctggtgaaggtgtgtgtgtgttggtggccacacttgctaaggcttttgtgtctaagaattgagtatttgtacctaggtgtgagggaaccagggtcagccagcctttttcagatggcgccaggcacacacactacatcaatggcttgctggtggcttcaccactatccaggtgacttaaaagagtgtttggaaaatgtccctggtatacttcaattcctactagacattgtaatgacaatggtgtaggtaaggaagagagagttaaaactaccagttgtggaatagaaatagttgcatgtccaaagaaggcttagaatgattgtgcatatgcagttggctcacataaccagcatgaacagtctctccccaaatccattagtgattcactaccccccgccaagcacagccctaaaacaattctcgtccactttcctgttaagaaacacagcagcaatatactttggcagcaaaccagagcatatgatgtaacttgctcaaccttatcttcctttccaaattctatactaagcatctgatgttttttagaataatttcctttggaaagccaatgagaaaacaaattaggaagagagagaagtgagaaattgttgcatggctgaggaacaagatgcttaaaatctgaatggaagtattttgagagcagtatttcatgtgctaagggttataagaattcttttagaaagggattagaattttactctgctagttacaagttttaaagtcacgctacggcattatcaccctggcaggtaggttttgttattgttttacattttgtgaaaaaaagttttgtagaagttacagctagtggtcttttccctccagagccagtgatgagtgtgggagcacttcagctctgtaaggggccagcgttctgacctttaaccacatgaactaacctgcgtcagcagttgcagaaagtagcctgttaggacagcagctgctaagcgttgcctggtattttagtggggagaaggctgggactcttcatggcatcaacacttgcatgctctgaatctttgatcagagatgaggtgccatttttggcatttccaccccgtctcgtggtagcctttaaaagtggtagaagatgctgccctaattccccgaggatgattgtcattccatgcagcataatgtgccgtgaggagttttctcattccagttctttggacttcgtaacattggaattgtttttccataatttccggcattccataaatatttgtcaaggacaaagaaaaggaatgtggatgtttattcttttcatatgaatgactttgtacacatgacttcctgctttcattatgaaggaggggaaactagttcccttgtatggtaactccaaagttaaaaaattgtgcatgtctgaggggttgaatatattttgtaaaactctaaatacatttgtatttctgtgctgttctaaagtttacctttttacttatatgaaagataactatatatttaaatcatgtaagtggaacacagtgtagggggtttttccaatcttatttttcatcaggttctcacacccacgtagtatgctgctcaaattttttcgtgtgtgcaaatgtgaacatttgaacatttcagttaggtactgagccagaaaaggtaattgaagttttcagaaagcttctgtgcttagaaaatattttgttgttttcttaaaatattagtattttgtagctggaagaataagatcaaggcttacatgtttcaggccacttggtcactggttcctgaatttagaaaacattggattaatgagttggtgaaggcatttagtggttacaaaaacagtttaaatatttatgattaaaggcttttcacaaacctttttaaagaaaatttagctgagaaaacttaaaaagttttctaaggaagtttaactgtggcacatgttttgatcagaaaggtagttctctttgctctggtagttttaaagtttgtactagttctttatttctgttgtttttttaaattgttaaaattataaatcacgtctaatcatactgaattgtaaaacttgaattgtatctttattttaagcataaatgagaataaaatgatcctgttcaccctgcc

SEQ ID NO: 1857 - DNA, 2085 bp, Homo Sapiens
gaagcgaatagcgttttcagagatattgggcggctcaagggtcttactctgtcgcccagtctgtaatgcagtgctgtgaccatagcccactgcagcctccacctcccaggctcaagcagtccttcccccctcgccctcatgaatagctgggactacagcctggagcattggtaagcgtcacactgccaaagtgagagctgctggagaactcataatcccaggaacgcctcttctactctccgagtaccccagtgaccagagtgagagaagctctgaacgagggcacgcggcttgaaggactgtgggcagatgtgaccaagagcctgcattaagttgtacaatggtagatggagtgatgattcttcctgtgcttatcatgattgctctcccctcccctagtatggaagatgagaagcccaaggtcaaccccaaactctacatgtgtgtgtgtgaaggtctctcctgcggtaatgaggaccactgtgaaggccagcagtgcttttcctcactgagcatcaacgatggcttccacgtctaccagaaaggctgcttccaggtttatgagcagggaaagatgacctgtaagaccccgccgtcccctggccaagccgtggagtgctgccaaggggactggtgtaacaggaacatcacggcccagctgcccactaaaggaaaatccttccctggaacacagaatttccacttggaggttggcctcattattctctctgtagtgttcgcagtatgtcttttagcctgcctgctgggagttgctctccgaaaatttaaaaggcgcaaccaagaacgcctcaatccccgagacgtggagtatggcactatcgaagggctcatcaccaccaatgttggagacagcactttagcagatttattggatcattcgtgtacatcaggaagtggctctggtcttccttttctggtacaaagaacagtggctcgccagattacactgttggagtgtgtcgggaaaggcaggtatggtgaggtgtggaggggcagctggcaaggggaaaatgttgccgtgaagatcttctcctcccgtgatgagaagtcatggttcagggaaacggaattgtacaacactgtgatgctgaggcatgaaaatatcttaggtttcattgcttcagacatgacatcaagacactccagtacccagctgtggttaattacacattatcatgaaatgggatcgttgtacgactatcttcagcttactactctggatacagttagctgccttcgaatagtgctgtccatagctagtggtcttgcacatttgcacatagagatatttgggacccaagggaaaccagccattgcccatcgagatttaaagagcaaaaatattctggttaagaagaatggacagtgttgcatagcagatttgggcctggcagtcatgcattcccagagcaccaatcagcttgatgtggggaacaatccccgtgtgggcaccaagcgctacatggcccccgaagttctagatgaaaccatccaggtggattgtttcgattcttataaaagggtcgatatttgggcctttggacttgttttgtgggaagtggccaggcggatggtgagcaatggtatagtggaggattacaagccaccgttctacgatgtggttcccaatgacccaagttttgaagatatgaggaaggtagtctgtgtggatcaacaaaggccaaacatacccaacagatggttctcagacccgacattaacctctctggccaagctaatgaaagaatgctggtatcaaaatccatccgcaagactcacagcactgcgtatcaaaaagactttgaccaaaattgataattccctcgacaaattgaaaactgactgttgacattttcatagtgtcaagaaggaagatttgacgttgttgtcattgtccagctgggacctaatgctggcctgactggttgtcagaatggaatccatctgtctccctccccaaatggctgctttgacaaggcagacgtcgtacccagccatgtgttggggagacatcaaaaccaccctaacctcgctcgatgactgtgaactgggcatttcacgaac

SEQ ID NO: 1858 - DNA, 1929 bp, Homo Sapiens
ccccaaagttggagaatcccataaggagagtagccctgtaaggaattcgaatttccagcatttttcacctctgacagagcccagacaccatgaacgcaagtgaattccgaaggagagggaaggagatggtggattacgtggccaactacatggaaggcattgagggacgccaggtctaccctgacgtggagcccgggtacctgcggccgctgatccctgccgctgcccctcaggagccagacacgtttgaggacatcatcaacgacgttgagaagataatcatgcctggggtgacgcactggcacagcccctacttcttcgcctacttccccactgccagctcgtacccggccatgcttgcggacatgctgtgcggggccattggctgcatcggcttctcctgggcggcaagcccagcatgcacagagctggagactgtgatgatggactggctcgggaagatgctggaactaccaaaggcatttttgaatgagaaagctggagaagggggaggagtgatccagggaagtgccagtgaagccaccctggtggccctgctggccgctcggaccaaagtgatccatcggctgcaggcagcgtccccagagctcacacaggccgctatcatggagaagctggtggcttactcatccgatcaggcacactcctcagtggaaagagctgggttaattggtggagtgaaattaaaagccatcccctcagatggcaacttcgccatgcgtgcgtctgccctgcaggaagccctggagagagacaaagcggctggcctgattcctttctttatggttgccaccctggggaccacaacatgctgctcctttgacaatctcttagaagtcggtcctatctgcaacaaggaagacatatggctgcacgttgatgcagcctacgcaggcagtgcattcatctgccctgagttccggcaccttctgaatggagtggagtttgcagattcattcaactttaatccccacaaatggctattggtgaattttgactgttctgccatgtgggtgaaaaagagaacagacttaacgggagcctttagactggaccccacttacctgaagcacagccatcaggattcagggcttatcactgactaccggcattggcagataccactgggcagaagatttcgctctttgaaaatgtggtttgtatttaggatgtatggagtcaaaggactgcaggcttatatccgcaagcatgtccagctgtcccatgagtttgagtcactggtgcgccaggatccccgctttgaaatctgtgtggaagtcattctggggcttgtctgctttcggctaaagggttccaacaaagtgaatgaagctcttctgcaaagaataaacagtgccaaaaaaatccacttggttccatgtcacctcagggacaagtttgtcctgcgctttgccatctgttctcgcacggtggaatctgcccatgtgcagcgggcctgggaacacatcaaagagctggcggccgacgtgctgcgagcagagagggagtaggagtgaagccagctgcaggaatcaaaaattgaagagagatatatctgaaaactggaataagaagcaaataaatatcatcctgccttcatggaactcagctgtctgtggcttcccatgtctttctccaaagttatccagagggttgtgattttgtctgcttagtatctcatcaacaaagaaatattatttgctaattaaaaagttaatcttcatggccatagcttttattcattagctgtgatttttgttgattaaaacattatagattttcatgttcttgcagtcatcagaagtggtaggaaagcctcactgatatattttccagggcaatcaatgaacacgcaacttgaaattatatctgtggtcttcaaattgtcttttgtcatgtggctaaatg

SEQ ID NO: 1859 - DNA, 1762 bp, Homo Sapiens
cttcttccgcaagatgtcatcctcaggggccaaggacaagcctgagctgcagtttcccttccttcaggatgaggacacagtggccacgctgctagagtgcaagacgctcttcatcttgcgcggcctgccaggaagcggcaagtccacgctggcacgggtcatcgtggacaagtaccgtgatggcaccaagatggtgtcggctgacgcttacaagatcacccccggcgctcgaggagccttctccgaggagtacaagcggctcgatgaggacctggctgcctactgccgccgccgggacatcagaattcttgtgcttgatgacaccaaccacgaacgggaacggctggagcagctctttgaaatggccgaccagtaccagtaccaggtggtgctggtggagcccaagacggcgtggcggctggactgtgcccagctcaaggagaagaaccagtggcagctgtcggctgatgacctgaagaagctgaagcctgggctggagaaggacttcctgccgctctacttcggctggttcctgaccaagaagagctctgagaccctccgcaaagccggccaggtcttcctggaagagctggggaaccacaaggccttcaagaaggagctgcgacaattcgtccctggggatgagcccagggagaagatggacttggtcacctactttggaaagagacccccaggcgtgctgcattgcacaaccaagttttgtgactacgggaaggctcccggggcagaggagtacgctcaacaagatgtgttaaagaaatcttactccaaggccttcacgctgaccatctctgccctctttgtgacacccaagacgactggggcccgggtggagttaagcgagcagcaactgcagttgtggccgagtgatgtggacaagctgtcacccactgacaacctgccgcgggggagccgcgcccacatcaccctcggctgtgcagctgacgtagaggccgtgcagacgggccttgacctcttagagattctgcggcaggagaaggggggcagccgaggcgaggaggtgggcgagctaagccggggcaagctctattccttgggcaatgggcgctggatgctgaccctggccaagaacatggaggtcagggccatcttcacggggtactacgggaaaggcaaacctgtgcccacgcaaggtagccggaaggggggcgccttgcagtcctgcaccatcatatgagtgttctcaccaccacttatgcccctagaagggaaggggagagggaaacgtgccctctgtttgatccttgttttgtgacatttttttttttttttttttttactcaaagttaacctacctgtaactttttaaaaacttgtaaaataactgaccctcccttcctgtccgccctcttcccctctaatgctcacgctcccaacacaaggtgggcagggaggcaccattcaggaacctggaccaaagctgacgaggctgggccaagccagggatggggccacagccagaaccccgagccctacttccaggttctggttagctcagccccagcccagcccagctgctctgcccagagctgggtgagtggggagacacctcagagccccgcaaaacccactgaccggaggcaaaaggcagtggggctgggggtagttttccatggtcacagagaactagtggtggctctgagaaggggaggacctctgggctttgattccatctccttgtcttttttctttgtttttagagacagggtcctgctatttc

SEQ ID NO: 1860 - DNA, 601 bp, Homo Sapiens
  misc_feature (308)..(308): n is a, c, g, or t
gtgagaggcctcttccctctccacagagactggattgtcattgttccttcatttatatcgtagggcttaacatttcactcaaaaaaaagcccctctttttctaatccttagtctttgtttcaaggaaagccagtttttcttctaccacattttccaggatcgactttaagaaaaatgcaacatctattgaaaaaaagtggggtgtatgcatgtggtttaattccagattgcttttgggtttaagtggtatcaaatttcagtatatttctgtcttatgtgaaagaaatatattactaaaacgtcagtangcaataatgtcagctgtcaagcactagatttatttttgcaggatatggagtgcaatgaactgagtcaatacggcaaggtgtatgtgatctgtgggagttatgccatttaacataggaagtgcatgggactttccctctctgcactccagctcttactgtaccattagaagatgcagaattctgttggtgtgcaaaaagtatagccttacattcaagcagaatggatctgaagaaagcagcaatatctgttactagagaacattcccatgtgtttaaactcttcacttcttaga

SEQ ID NO: 1861 - DNA, 262 bp, Homo Sapiens
ccgcacctcggccagaggcggctgcagcagctgctmccttttccctgccgccgcctctccagtcccttttttaattaccactccamctgctgggaacgggcgagaaagaggaggaggcgagaaactcccaccgacccacagagggagcatgatttcggcaacttcacctatcattctgaaatgggaccccaaaattttggaaatccggacgctaacagtggaaaggctgttggagccacttgttacacaggtgactacactt

SEQ ID NO: 1862 - DNA, 548 bp, Homo Sapiens
gaatacagctgtgagaggcaacaccagataatttttgaagccattcgaggagtatcaataagaagtgatattgccattgatgatgttaaatttcaggcaggaccctgtggagaaatggaagatacaactcaacaatcatcaggatattctgaggacttaaatgaaattgagtattaagaaatgatctgcattggatttactagacgaaaaccatacctctcttcaatcaaaatgaaaacaaagcaaatgaatactggacagtcttaacaattttataagttataaaatgactttagagcaccctccttcattacttttgcaaaaacatactgactcagggctctttttttctttttgcatatgacaactgttactagaaatacaggctactggttttgcatagatcattcatcttaattttggtaccagttaaaaatacaaatgtactatattgtagtcattttaaagtacacaaagggcacaatcaaaatgagatgcactcatttaaatctgcattcagtgaatgtattgggagaaaaataggtcta

SEQ ID NO: 1863 - DNA, 2719 bp, Homo Sapiens
aaaaaaaaaaaaaagcgcttccgcccggagagagctggccgggttgaggcgccggctttcccgggtcttctccagctgccaccgctttactgcaaaactgacgggcgcaaaaacatgagtgactccgcgggagggcgcgctggtctccggcgttaccccaagctcccagtgtgggtggtggaggatcatcaggaggttctaccctttatataccgggccataggctcaaagcatcttcctgccagtaatgtaagttttttacatttcgactcacatccagacctccttattcctgtgaatatgccagcagacaccgtgtttgataaggaaacactctttggagaattaagtattgaaaattggattatgcctgcagtttatgctggccatttttcacatgtaatatggtttcatcccacgtgggctcagcagatcagagagggcagacaccactttttagtaggcaaagacacttctaccacaacaatcagggttacaagtacagatcattatttcctaagtgatggtctgtatgtacctgaagaccagctagagaaccaaaaacctttacaattggatgtaattatggtaaaaccttataagctctgtaacaatcaagaagaaaacgatgcagtgtcttctgctaagaaaccaaagctagccctggaagattcggaaaacactgcctctactaactgtgactcttctccagaaggactggaaaaggacacagcaacacagagaagtgaccagacttgcctagaaccatcatgttcatgttcttctgaaaatcaggaatgccagactgctgccagcactggggaaattctggaaattttgaagaaagggaaggcatttgttttagatattgacttggattttttttcagtcaagaatcccttcaaagaaatgttcactcaggaagagtacaaaatcttacaagagctgtaccaatttaagaaacctggcaccaacctaacagaggaagatttggtagatattgttgatactcgaattcatcaattagaggatttagaagccactttcgctgatttgtgtgatggtgatgatgaagaaacggtacagagatgggcttcaaaccctggaatggaatcactagttccccttgtacagagtttgaaaaaacggatggaagtaccagactatgaaatggttcaccaggctggtttaacctgcgattattcagaacttcctcaccatatcagcacagaacaagaaatagagtgtcttattcaatctgtgcattatttgctgaaaaatttaccaaatcctactcttgtgacaattgcaaggtcaagtctggatgattactgtccttctgaccaagttgacactattcaagaaaaggtcctcaatatgctacgtgccctctatggaaatctagacctccaagtgtatgcagcagagtctcctccatcttgaaacaaacaaaacattaggctcctgttgtatcttggtttagtaacaggcccttaattaacttatttgtacatgagtcttccagagaacactgttttatattaactttcagttgaaatctttcagatattttgaatctctgaacaaccattgtcagttgtgaatgatggtaaattttttggcatcaagtctcataaccccaactgatagaactgttgcttatctgtcttccttaagtattttttagggttttgtttttttttttgtttgtttgtttgtttgtcttcacttttcccccaggtctgttgagctgtatgagattcattcatacttcatttattcattcaactaatatttgttgaacacttacatgtaccagacattattaagtgctgggtatatggtaatgaacagaatagacaaggcccctgcccttttaggggagacagatgagaagtaaattacgggttatgagaaatgttatgaaggaaaggacaacaacagacatgtcttagtacttagggtatcatggctttataggaaagtaacattctctatcttttttttttttttaattttataaaaatagagatggggtctcaccatgttacccaggctggtctcaaactcctgggcacaagcaatccacctgccttcgcctcccgaagtgctgggattacagatgtaagtcactaccccagccagaaactaacattctcaaaagctactaccaaaaaaaccccacaaatttgccaatccatgaaagtatcataggaagtctacctttccaaggaatttggcattgtggccctgctcttgccaaatgctctccagcattgttggtatcaaggtggtctggttgagtaaacttgaccaaacaaaaattaactgttttttgcttttctgtttttgttttgctgatcaaaaaagcccttcagggtctcttgtgcatccaggaggtcattgtagatatcaataatatagtgcctaagtgccactttattgccaagtctagattgatacttttttcagataaaccagctttttatgtaaagagtaagggaaaaagttaaatctttaattctgacctgccataaatacccaaagatataaactgtcttccaccgcccccctcataactaagacatccttcctgagtcactcttaatcatgaaacttgattttctcaattggccagtcttctgatctttagtatctctttagttcagtaatttttacctacctacttgatttattttcctttaaaaggtgaaatgac

SEQ ID NO: 1864 - DNA, 5471 bp, Homo Sapiens
acagcttgcaacactcggcatcttttctggaggcgcctccttcagcagccgcagatggcatccggctgcgggctcggggctcgcaattgattctcccccttgcccacctcgagtccacggacgcacctctcccttcccctcctcccttcgcgcttctgggtctgagcccagctcgcgaccgccgggcagaggatcagtcgcggcggccgaggctgagcagcagcgctctcgctccctgacctggggagaagcgcccacccgggagagctgatccccggctgcctccagcgccccccaccttttgcactccaagccgggggctccagagaccccgctccccaggcgccactatgctggacccttcgtccagcgaagaagaatcggatgagatcgtggaggaggagagcggcaaggaggtgctcggctcggccccgtccggcgcgcgcctgtctcccagccgtaccagcgagggctcggccggcagcgccgggctggggggcggcggcgccggcgccggagccggggtgggtgcaggcggcggcgggggcagcggcgcgagcagcggcggcggggccggggggctgcaacccagcagccgcgctggcggcggccggccctccagccccagcccgtcggtggtgagcgagaaggagaaggaagagttggagcggctgcagaaagaggaggaggagaggaagaagaggctgcagctgtatgtgttcgtgatgcgctgcatcgcctacccctttaatgccaagcagcccaccgacatggctcgccggcagcagaagatcagcaaacagcagctgcagacagtcaaggaccggtttcaggctttcctcaatggggaaacccagatcatggctgacgaagccttcatgaacgctgtgcagagttactatgaggtgttcctgaagagcgaccgtgtggcccgcatggttcagagtggaggctgttccgccaacgactcccgggaggtcttcaagaagcacattgagaagagagtgcgcagcctgcctgagattgacggcctcagcaaggagactgtgctgagctcctggatggccaaatttgatgccatctaccgtggagaagaggacccgcggaagcagcaggcccggatgacagccagcgcagcctccgagctgattctgagcaaggagcaactctatgagatgttccagaacattcttgggatcaagaagttcgaacatcagctcctttacaatgcctgccagctggacaatccagatgagcaagcagcccagatcagacgagagctggatggacgtctacaaatggcagaccaaatagccagggaacgcaaatttcccaagtttgtatccaaagaaatggaaaacatgtacattgaggagctgaagtcatctgtcaacctgctcatggccaacttggagagcatgccggtatccaaaggcggggagttcaagctccagaaactcaaacgcagccacaatgcttccatcatcgacatgggcgaggagagtgagaaccagctctccaagtcagatgtcgtgctgtctttctcattggaggtggtaattatggaagtccaaggcctcaaatctttggctccaaatcgcatcgtatattgcacaatggaggtggaaggaggagagaaactacagactgatcaggccgaggcttctaaaccaacctggggcacccagggtgacttctccacaacccatgcactgccagctgtgaaggtgaagctgttcacagagagcacaggcgtcctggcgttggaggacaaggagcttgggcgggttattctccatcccaccccgaacagccccaaacagtcagagtggcacaaaatgacagtctccaaaaactgccccgaccaagatctcaaaatcaaacttgctgtccgaatggataagcctcaaaacatgaagcattctgggtatttatgggccatcggtaagaatgtctggaagagatggaagaaaaggttttttgtattggtgcaggtcagtcagtacacgtttgccatgtgcagttatcgggagaagaaagcggagcctcaggaacttctacaattggatggctacactgtggattacaccgacccccagccaggtttggagggtggccgagccttcttcaatgctgtcaaggagggagacaccgtgatatttgccagtgacgatgaacaagaccgcatcctgtgggtccaggccatgtatcgggccacggggcagtcacacaagcctgtgcccccgacccaagtccagaaactcaacgccaagggaggaaatgtacctcagctggatgcccctatctctcaattttacgcagatagagctcaaaaacatggcatggatgaatttatctcttccaacccctgtaactttgaccacgcttccctctttgagatggtacaacgccttactttggatcacagacttaatgattcctattcttgcctgggctggttcagtcctggccaggtgtttgtactagacgagtattgcgcccgaaatggagtccgggggtgtcaccgacatctctgctacctcagagacttgcttgaacgggcagaaaatggcgccatgatcgaccccacccttcttcactacagctttgccttctgtgcatcccatgtccatgggaacaggcctgatggaattggaactgtgactgttgaagaaaaggaacgttttgaagaaatcaaagagaggctccgagttctgctagaaaatcagattacacattttaggtattgctttccatttggtcgacctgaaggtgctttgaaagctactctctcactcttggaaagggttttgatgaaagatattgttaccccagtgccacaagaggaggtaaaaacagttatccgtaaatgtctggaacaggctgcgttagtcaactattctcggctctcagagtatgccaaaatcgaagagaatcaaaaggatgcagaaaatgtaggccggttaatcactcctgccaaaaagcttgaagatacaatacgtcttgctgaactagtcattgaagttcttcagcaaaatgaggagcaccacgcagagccacatgttgataaaggagaagcctttgcgtggtggtcagatttaatggtggagcatgcggagacgttcctgtcactctttgcagtagacatggatgcagccttagaggtgcaacctccagacacatgggacagttttccactatttcagctgctgaatgattttctccgtactgactataatttgtgcaatggaaaatttcacaaacacctgcaagacctgtttgccccacttgttgttagatatgtggatctgatggagtcctcaattgcacaatccattcacaggggctttgagcgggagtcatgggaaccagtcaagagtttaaccagtaacctacccaatgtgaacctacccaatgtgaaccttcccaaagtaccaaatctaccagttaacatccctctaggcatcccacaaatgcctactttttcggcaccgtcatggatggctgctatatatgatgcggataatgggtcaggcacctcagaagatctgttttggaaacttgacgcccttcagaccttcattcgggacctgcactggcctgaagaagagtttggaaagcacctggaacaacggctgaagttgatggcaagtgacatgatcgaatcttgtgtcaaaagaaccaggattgcatttgaagttaagctgcaaaaaaccagtcgatcaacagattttcgagtcccacagtcaatatgcaccatgtttaatgttatggttgatgccaaagctcaatcaacaaaactttgcagcatggaaatgggccaagagcatcaataccattcaaaaatagacgaactaattgaagaaactgttaaagaaatgataacactcttggttgcaaagttcgttactatcttggaaggagtgctggcaaaattatccagatatgacgaagggactttgttttcttcttttctgtcatttaccgtgaaggcagcttccaaatatgtggatgtacctaaacccgggatggacgtggccgacgcctacgtgactttcgtccgccattctcaggatgtcctgcgtgataaggtcaatgaggagatgtacatagaaaggttatttgatcaatggtacaacagctccatgaacgtgatctgcacctggttgacggaccggatggacttacagcttcatatttatcagttgaaaacactaattagggtggtaaagaaaacctacagagatttccgattgcaaggggtcctggactccaccttaaacagcaagacctatgaaacgatccggaaccgtctcactgtggaggaagccacagcatcagtgagtgaaggtgggggactgcagggcatcagcatgaaggacagcgatgaggaagacgaagaagacgattagaccatttggtcctagagtctgctgggacagagtcctgtaatcagtgcatgtccttagtctgttagttaaacccattaggaattttctgtcaactaccatgcccatgagatgtttatcaatacaactgccattttagctatgtggtaccaagattagcaaatgaccttcatatccactgatttcctgatgtccatgtctatatgtttacaagcaatatggagcaccattctttaaatactgttcatggagaatacatagtctaaccactaggcgtgtccctgttatcagcaaagatcaatgatgcttcattcatgtactatgtatgcattggtggtaaatggatgtgagggcaagtacatcaagtacattcactctgtttcacgtatgtggatgccagttaattaaatgagtacgtaaataaattaattaaaacacatagatctgctttgtgtttttatttttattttttgaaaaacaaaaggcaagtctccaacaattaacttttgatgctttctgttcccctaaaaccaaaaaatgaaccccttgtgtcgttgttaacccatcctttcatttactcatataattagccaaaaaaaaaaggatggctacataccaatggattgattctcttaattgccacggcaagggggcgatcctatcatgacttaacatcaagcgcgcagttcaaaactactgtcttctgtcaaagttttctcctcttaaatgttattttgcttttacgtctcaactgtgtatgtaaaaaaaacgaatatttaaattacaaccctagactaaaaatgtgtttataataagatgtggatatttccttcagtagattgtaaccataatttaaattattttgttccacactgttttttatatctgtcatgtacattgcattttgatctgtaactgcacaaccctggggtttgctgcagagctatttctttccatgtaaagtagtggatccatcttgcttttgccttatataaagcctacagttatggaagtgtggaaaactgtggcttctcaataaatattcagatgtcctaagaatat

SEQ ID NO: 1865 - DNA, 2634 bp, Homo Sapiens
ggcacgaggctgagtgtccgtctcgcgcccggaagcgggcgaccgccgtcagcccggaggaggaggaggaggaggaggaggagggggcggccatggggctgctgtcccagggctcgccgctgagctgggaggaaaccaagcgccatgccgaccacgtgcggcggcacgggatcctccagttcctgcacatctaccacgccgtcaaggaccggcacaaggacgttctcaagtggggcgatgaggtggaatacatgttggtatcttttgatcatgaaaataaaaaagtccggttggtcctgtctggggagaaagttcttgaaactctgcaagagaagggggaaaggacaaacccaaaccatcctaccctttggagaccagagtatgggagttacatgattgaagggacaccaggacagccctacggaggaacaatgtccgagttcaatacagttgaggccaacatgcgaaaacgccggaaggaggctacttctatattagaagaaaatcaggctctttgcacaataacttcatttcccagattaggctgtcctgggttcacactgcccgaggtcaaacccaacccagtggaaggaggagcttccaagtccctcttctttccagatgaagcaataaacaagcaccctcgcttcagtaccttaacaagaaatatccgacataggagaggagaaaaggttgtcatcaatgtaccaatatttaaggacaagaatacaccatctccatttatagaaacatttactgaggatgatgaagcttcaagggcttctaagccggatcatatttacatggatgccatgggatttggaatgggcaattgctgtctccaggtgacattccaagcctgcagtatatctgaggccagatacctttatgatcagttggctactatctgtccaattgttatggctttgagtgctgcatctcccttttaccgaggctatgtgtcagacattgattgtcgctggggagtgatttctgcatctgtagatgatagaactcgggaggagcgaggactggagccattgaagaacaataactataggatcagtaaatcccgatatgactcaatagacagctatttatctaagtgtggtgagaaatataatgacatcgacttgacgatagataaagagatctacgaacagctgttgcaggaaggcattgatcatctcctggcccagcatgttgctcatctctttattagagacccactgacactgtttgaagagaaaatacacctggatgatgctaatgagtctgaccattttgagaatattcagtccacaaattggcagacaatgagatttaagccccctcctccaaactcagacattggatggagagtagaatttcgacccatggaggtgcaattaacagactttgagaactctgcctatgtggtgtttgtggtactgctcaccagagtgatcctttcctacaaattggattttctcattccactgtcaaaggttgatgagaacatgaaggtagcacagaaaagagatgctgtcttgcagggaatgttttatttcaggaaagatatttgcaaaggtggcaatgcagtggtggatggttgtggcaaggcccagaacagcacggagctcgctgcagaggagtacaccctcatgagcatagacaccatcatcaatgggaaggaaggtgtgtttcctggactgatcccaattctgaactcttaccttgaaaacatggaagtggatgtggacaccagatgtagtattctgaactacctaaagctaattaagaagagagcatctggagaactaatgacagttgccagatggatgagggagtttatcgcaaaccatcctgactacaagcaagacagtgtcataactgatgaaatgaattatagccttattttgaagtgtaaccaaattgcaaatgaattatgtgaatgcccagagttacttggatcagcatttaggaaagtaaaatatagtggaagtaaaactgactcatccaactagacattctacagaaagaaaaatgcattattgacgaactggctacagtaccatgcctctcagcccgtgtgtataatatgaagaccaaatgatagaactgtactgttttctgggccagtgagccagaaattgattaaggctttctttggtaggtaaatctagagtttatacagtgtacatgtacatagtaaagtatttttgattaacaatgtattttaataacatatctaaagtcatcatgaactggcttgtacatttttaaattcttactctggagcaacctactgtctaagcagttttgtaaatgtactggtaattgtacaatacttgcattccagagttaaaatgtttactgtaaatttttgttcttttaaagactacctgggacctgatttattgaaatttttctctttaaaaacattttctctcgttaattttcctttgtcatttcctttgttgtctacattaaatcacttgaatccattgaaagtgcttcaagggtaatcttgggtttctagcaccttatctatgatgtttcttttgcaattggaataatcacttggtcaccttgccccaagctttcccctctgaataaatacccattgaactctgaaaaaaaaaaaaaaaaaaa

SEQ ID NO: 1866 - DNA, 4175 bp, Homo Sapiens
tgaggagtcctgctcaagacacggtcactggatctgagaaacttcccaggggaccgcattccagagtcagtgactctgtgaagcacccacatctacctcttgccacgttcccacgggcttgggggaaagatggtggggaccaaggcctgggtgttctccttcctggtcctggaagtcacatctgtgttggggagacagacgatgctcacccagtcagtaagaagagtccagcctgggaagaagaaccccagcatctttgccaagcctgccgacaccctggagagccctggtgagtggacaacattgttcaacatcgactacccaggcgggaagggcgactatgagcggctggacgccattcgcttctactatggggaccgtgtatgtgcccgtcccctgcggctagaggctcggaccactgactggacacctgcgggcagcactggccaggtggtccatggtagtccccgtgagggtttctggtgcctcaacagggagcagcggcctggccagaactgctctaattacaccgtacgcttcctctgcccaccaggatccctgcgccgagacacagagcgcatctggagcccatggtctccctggagcaagtgctcagctgcctgtggtcagactggggtccagactcgcacacgcatttgcttggcagagatggtgtcgctgtgcagtgaggccagcgaagagggtcagcactgcatgggccaggactgtacagcctgtgacctgacctgcccaatgggccaggtgaatgctgactgtgatgcctgcatgtgccaggacttcatgcttcatggggctgtctcccttcccggaggtgccccagcctcaggggctgctatctacctcctgaccaagacgccgaagctgctgacccagacagacagtgatgggagattccgaatccctggcttgtgccctgatggcaaaagcatcctgaagatcacaaaggtcaagtttgcccccattgtactcacaatgcccaagactagcctgaaggcagccaccatcaaggcagagtttgtgagggcagagactccatacatggtgatgaaccctgagacaaaagcacggagagctgggcagagcgtgtctctgtgctgtaaggccacagggaagcccaggccagacaagtatttttggtatcataatgacacattgctggatccttccctctacaagcatgagagcaagctggtgctgaggaaactgcagcagcaccaggctggggagtacttttgcaaggcccagagtgatgctggggctgtgaagtccaaggttgcccagctgattgtcacagcatctgatgagactccttgcaacccagttcctgagagctatcttatccggctgccccatgattgctttcagaatgccaccaactccttctactatgacgtgggacgctgccctgttaagacttgtgcagggcagcaggataatgggatcaggtgccgtgatgctgtgcagaactgctgtggcatctccaagacagaggaaagggagatccagtgcagtggctacacgctacccaccaaggtggccaaggagtgcagctgccagcggtgtacggaaactcggagcatcgtgcggggccgtgtcagtgctgctgacaatggggagcccatgcgctttggccatgtgtacatggggaacagccgtgtaagcatgactggctacaagggcactttcaccctccatgtcccccaggacactgagaggctggtgctcacatttgtggacaggctgcagaagtttgtcaacaccaccaaagtgctacctttcaacaagaaggggagtgccgtgttccatgaaatcaagatgcttcgtcggaaagagcccatcactttggaagccatggagaccaacatcatccccctgggggaagtggttggtgaagaccccatggctgaactggagattccatccaggagtttctacaggcagaatggggagccctacataggaaaagtgaaggccagtgtgaccttcctggatccccggaatatttccacagccacagctgcccagactgacctgaacttcatcaatgacgaaggagacactttcccccttcggacgtatggcatgttctctgtggacttcagagatgaggtcacctcagagccacttaatgctggcaaagtgaaggtccaccttgactcgacccaggtcaagatgccagagcacatatccacagtgaaactctggtcactcaatccagacacagggctgtgggaggaggaaggtgatttcaaatttgaaaatcaaaggaggaacaaaagagaagacagaaccttcctggtgggcaacctggagattcgtgagaggaggctctttaacctggatgttcctgaaagcaggcggtgctttgttaaggtgagggcctaccggagtgagaggttcttgcctagtgagcagatccagggggttgtgatctccgtgattaacctggagcctagaactggcttcttgtccaaccctagggcctggggccgctttgacagtgtcatcacaggccccaacggggcctgtgtgcctgccttctgtgatgaccagtcccctgatgcctactctgcctatgtcttggcaagcctggctggggaggaactgcaagcagtggagtcttctcctaaattcaacccaaatgcaattggcgtccctcagccctatctcaacaagctcaactaccgtcggacggaccatgaggatccacgggttaaaaagacagctttccagattagcatggccaagccaaggcccaactcagctgaggagagcaatgggcccatctatgcctttgagaacctccgggcatgtgaagaggcaccacccagtgcagcccacttccggttctaccagattgagggggatcgatatgactacaacacagtccccttcaacgaagatgaccctatgagctggactgaagactatctggcatggtggccaaagccgatggaattcagggcctgctatatcaaggtgaagattgtggggccactggaagtgaatgtgcgatcccgcaacatggggggcactcatcggcggacagtggggaagctgtatggaatccgagatgtgaggagcactcgggacagggaccagcccaatgtctcagctgcctgtctggagttcaagtgcagtgggatgctctatgatcaggaccgtgtggaccgcaccctggtgaaggtcatcccccagggcagctgccgtcgagccagtgtgaaccccatgctgcatgagtacctggtcaaccacttgccacttgcagtcaacaacgacaccagtgagtacaccatgctggcacccttggacccactgggccacaactatggcatctacactgtcactgaccaggaccctcgcacggccaaggagatcgcgctcggccggtgctttgatggcacatccgatggctcctccagaatcatgaagagcaatgtgggagtagccctcaccttcaactgtgtagagaggcaagtaggccgccagagtgccttccagtacctccaaagcaccccagcccagtcccctgctgcaggcactgtccaaggaagagtgccctcgaggaggcagcagcgagcgagcaggggtggccagcgccagagtggagtggtggcctctctgagatttcctagagttgctcaacagcccctgatcaactaagttttgtggtacttcaccctcttctgccctcatttcatgtgacagccattgtgagactgatgcacaaactgtcacttggttaatttaagcacttctgttttcgtgaatttgcttgtttgtttcttcatgcctttacttactttgtcccatgctactgattggcacgtggcccccacaatggcacaataaagcccctttgtgaaactgttctttaaatgaaacacaagaaattggccactggtaaaactctgcagcttcaactgtacttcatttaatgccattaatgcaaatatacttcctcttctttttgcatggttttgcccacctctgcaatagtgataatctgatgctgaagatcaaataaccaatataaagcatatttcttggccttgctccacaggacataggcaagccttgatcatagttcatacatataaatggtggtgaaataaagaaataaaacacaatacttttactggaaaaaaaaaaaa

SEQ ID NO: 1867 - DNA, 164 bp, Homo Sapiens
aagaggcgaaactcaaagggatgctccctcacccccttcctccttccaaagacgtttcagccgcaattggcccgttccttcgatctccgacccgctgctagggtgctgatgtctgtggaatgggctacaccaccaatgtcccaggaaacggttgaagatacaag

SEQ ID NO: 1868 - DNA, 472 bp, Homo Sapiens
gccatatattggaaaaaacttcttaacttacaaataatacaaaaatagacaatgacttttgggtggaaattaaaaaaactgaagcatggtttataacaatactaaaaataactataaatgaaatgtttaaaaatcacattgaaacagctaatacaagtgtaggtgaccaaacaaatacgcacttttcacgtagcaaacatacacaataaaataaattgggggtggaaggaagaggaagaagggaaaagcaatgtacaaattcgaaagataaatacattatttatatggatattttacaaaatcccctttaaaacaaaaagccttttaattaactttgcaagtatgtgcaagctaaaggtagtgagctttttttctttgcaaaatacgcagtaaaatctttttgtgatattgaaaaaatgtcttaagacattaaaatgtataaatagaacaacaactttggcaaaaaatcaca

SEQ ID NO: 1869 - DNA, 2999 bp, Homo Sapiens
agttacccgggcagcctcgggaccggtcaccggccggcaaccgtccagcggcctcgaccaccgcctctagcctccgttcccggtcctttctcccgggccgagagacagcgtcgccgacaggggctcattcccctccggttctcctcggtgactcacctcgggcgggccgttttgtctttaggggccgccttggtggggcgaggtttccgtgacgaatctcctggggccgtccgtgccggctcgggccgtcgtggcgactcgagctcctggaacttgctcaggctccggaggtccgaggccctcgaagttatgcgtcgcctccaggcggttgcggcgggcgcgggctcctaaagggcgtcacacccggactccgccgactaggcaacctccattcatctttccactgcgcctccagcgcccccgccttctccggtcccctcctcggagtcattttttcctgttccccctctgccgccctttcctcacgccccgggtgaggcaattctcttggaagcgaaggtgtcggctatgagccggagcctccttccttgaatttctccgtggaggacccgccgcgccccccggcatgggggtgaacgccgtgcactggttccgaaaggggctccggctccacgacaaccccgccctgaaggagtgcattcagggcgccgacaccatccgctgcgtctacatcctggacccctggttcgccggctcctccaatgtgggcatcaacaggtggcgatttttgcttcagtgtcttgaggatcttgatgccaatctacgaaaattaaactcccgtctgtttgtgattcgtggacaaccagcagatgtgtttcccaggcttttcaaggaatggaacattactaaactttcaattgagtatgattctgagccctttggaaaggaacgagacgcagctattaagaaactggcgactgaagctggagtagaagtcattgtaagaatttcacatacattatatgacctagacaagatcatagaactcaatggtggacaaccgcctctaacttataaaagattccagactctcatcagcaaaatggaaccactagagataccagtagagacaattacttcagaagtgatagaaaagtgcacaactcctctgtctgatgaccatgatgagaaatatggagtcccttcactggaagagctaggttttgatacagatggcttatcctctgcagtgtggccaggcggagaaactgaagcacttactcgtttggaaaggcatttggaaagaaaagcttgggtggcaaattttgaaagacctcgaatgaatgcgaattctctgcttgcaagccctactggacttagtccttatctccgatttggttgtttgtcatgtcgactgttttacttcaaactaacagatctctacaaaaaggtaaagaagaacagttcccctcccctttccctttatgggcaactgttatggcgtgaatttttctatacagcagcaacaaataatccacgctttgataaaatggaaggaaaccctatctgtgttcagattccttgggataaaaatcctgaggctttagccaaatgggcggaaggccggacaggctttccatggattgatgccatcatgacacagcttcgtcaggagggttggattcatcatctagccaggcatgcagttgcttgcttcctgacacgaggggacctgtggattagttgggaagaaggaatgaaggtatttgaagaattattgcttgatgcagattggagcataaatgctggaagttggatgtggctgtcttgtagttccttttttcaacagttttttcactgctattgccctgttggttttggtaggagaacagatcccaatggagactatatcaggcgttatttgcctgtcctaagaggcttccctgcaaaatatatctatgatccctggaatgcaccagaaggtatccaaaaggtagccaaatgtttgataggagttaattatcctaaaccaatggtgaaccatgctgaggcaagccgtttgaatatcgaaaggatgaaacagatctatcagcagctttcacgatatagaggactaggtcttctggcatcagtaccttctaatcctaatgggaatggaggcttcatgggatattctgcagaaaatatcccaggttgtagcagcagtggaagttgctctcaagggagtggtattttacactatgctcatggcgacagtcagcaaactcacctgttgaagcaaggaagaagctccatgggcactggtctcagtggtgggaaacgtcctagtcaggaagaggacacacagagtattggtcctaaagtccagagacagagcactaattagaaaacattcaggaggaatactgttgcagctgaaattggtggggagttcaatagcttttcaattaagttatttaaaaatattcttcattgatggaaagcagttacatattgaaatatgttgtttctaatgacatttctgtggtttttaactttttaatgaatttcacagaggacaattggtaatttgtatataaagaacttggcaagagaatttgcttaatgtaaatataaacagtcacaattagtatagacccatcgatatatttttgataatttttcatgtatggtaaagttaaaatgacaaattgatattctgatataaaactcaaagtttgaagtcagtgggaaaaaaggaggtttttagactttcttaaaagacgttaaaattttaggacagaattttcttgatgttgtttaatctaactttgcactctttgataataatgttttagataatgtcgtaatccaaattggtattgtagcctctgttaacacagacagtatatgttttaaactttgatgtaaacctttttagacccaaacttgtggaagtatcatgtgttaagttctctgtctctgtttctttgttcatttattactaaaatgaacttgttattaaagtatatgcaaatatgaaaaaaaaaaaaaaaaaa

SEQ ID NO: 1870 - DNA, 1869 bp, Homo Sapiens
atgaggctcctccgcagacgccacatgcccctgcgcctggccatggtgggctgcgcctttgtgctcttcctcttcctcctgcatagggatgtgagcagcagagaggaggccacagagaagccgtggctgaagtccctggtgagccggaaggatcacgtcctggacctcatgctggaggccatgaacaaccttagagattcaatgcccaagctccaaatcagggctccagaagcccagcagactctgttctccataaaccagtcctgcctccctgggttctataccccagctgaactgaagcccttctgggaacggccaccacaggaccccaatgcccctggggcagatggaaaagcatttcagaagagcaagtggacccccctggagacccaggaaaaggaagaaggctataagaagcactgtttcaatgcctttgccagcgaccggatctccctgcagaggtccctggggccagacacccgaccacctgagtgtgtggaccagaagttccggcgctgccccccactggccaccaccagcgtgatcattgtgttccacaacgaagcctggtccacactgctgcgaacagtgtacagcgtcctacacaccacccctgccatcttgctcaaggagatcatactggtggatgatgccagcacagaggagcacctaaaggagaagctggagcagtacgtgaagcagctgcaggtggtgagggtggtgcggcaggaggagcggaaggggttgatcaccgcccggctgctgggggccagcgtggcacaggcggaggtgctcacgttcctggatgcccactgtgagtgcttccacggctggctggagcccctcctggctcgaatcgctgaggacaagacagtggtggtgagcccagacatcgtcaccatcgaccttaatacttttgagttcgccaagcccgtccagaggggcagagtccatagccgaggcaactttgactggagcctgaccttcggctgggaaacacttcctccacatgagaagcagaggcgcaaggatgaaacataccccatcaaatccccgacgtttgctggtggcctcttctccatccccaagtcctactttgagcacatcggtacctatgataatcagatggagatctggggaggggagaacgtggaaatgtccttccgggtgtggcagtgtgggggccagctggagatcatcccctgctctgtcgtaggccatgtgttccggaccaagagcccccacaccttccccaagggcactagtgtcattgctcgcaatcaagtgcgcctggcagaggtctggatggacagctacaagaagattttctataggagaaatctgcaggcagcaaagatggcccaagagaaatccttcggtgacatttcggaacgactgcagctgagggaacaactgcactgtcacaacttttcctggtacctgcacaatgtctacccagagatgtttgttcctgacctgacgcccaccttctatggtgccatcaagaacctcggcaccaaccaatgcctggatgtgggtgagaacaaccgcggggggaagcccctcatcatgtactcctgccacggccttggcggcaaccagtactttgagtacacaactcagagggaccttcgccacaacatcgcaaagcagctgtgtctacatgtcagcaagggtgctctgggccttgggagctgtcacttcactggcaagaatagccaggtccccaaggacgaggaatgggaattggcccaggatcagctcatcaggaactcaggatctggtacctgcctgacatcccaggacaaaaagccagccatggccccctgcaatcccagtgacccccatcagttgtggctctttgtctag

SEQ ID NO: 1871 - DNA, 2553 bp, Homo Sapiens
ctaaaggccttgcacaacatcagagagttcatactggagagaaccttacacatttcacgagtatggaaagacctttgctcaaaattcagcccttgtaatgcataaggcaattcatactggaaagaaaccttacacatgtaatgaatgtggcaaggtttttagtagaaaagcacaccttgcatgtcatcatagacttcatactgtctaaggtttctaatcaacaatcaaaccttgcacaacatcagagagtttatactggagagaaaccttacaagtgtaatgagtggggcaaagccttaagtgggaagtcgtcacttttttatcatcaagcaatccatggtgtagggaaactttgcaaatgtaatgattgtcacaaagtcttcagtaatgctacaaccattgcaaatcactggagaatccataatgaagacagatcttacaagtgtaataaatgtggtaaaattttcagacatcgatcatatcttgcagtttatcagcgaactcatactggagagaaaccttacaaatatcatgactgtggcaaggtcttcagtcaagcttcatcctatgcaaaacataggagaattcatacaggagagaaacctcacaagtgtgatgattgtggcaaagtcttgacttcacgttcacacctcattagacatcagagaatccatactggacagaaatcttacaaatgtcttaagtgtggcaaggtcttcagtctgtgggcactccatgcagaacatcagaaaattcatttttgagataactgttccaaatacagtgactatagaagatcataaagctttaattgacattagagccaaataggcattgacttgagattgagttgacttaaccttgagtttaagaattaatttacattaaagtgtttatgttaagaagattgggccaggtgggattacaggcgcgagcaccgcgcccggcccctaagttaatatttcaaacaatcgaaggtaaaacaacatattgtgttgggccacctgtactgaacgctgaatcgtttttcctcttaagttgaaaatggttttaatgcaaagcgcctttttttgagcaggtagagtcacgcatccggcaggcggggcgagctcccctctgtctggggcagggtgggggagaggggcagggacctcggtaaaggggtggagtggcgcgctggttgccgcgggcactggcaattagaagggattattaaactaagcaaggtcctgggttgtttgagtggataatggaaactgaaaggtgacgtgcaaaactgcctattactcccaggagtggaggataatttcatatttcatggaaataaactcagggcccggagcggtggctcacacctgtaatcccagcactttgagaggccaaggagggaggatcgcttaagcccaggaattcgaaatcagcctaggcaacatagtaagacctcatctctactaaaaataaaaaaaaacagccaggtgtgttagtccacacctgtggtcccagctgcctcagcttcccgagtagctgggattacaggtatgaaccactatgcccggctaactttgttttttttttttagaaattaaaccttttttcagcttaatgacccaggggtgtatttttgaaggacttgggagctctctttgaaaggcaaacaacaagggaaacagtacctttatctcagtaggaaattaaataattcaaacatcaaataacttcaatttaaggctatggactttgagataattctgagccttgagaggaatgtggtcaggcaacctgagtccagtggaatgcaggtgcaacttctaagagttttcctgtaagtaattaagaagactaagtagccccagagataagacctcctcggatcattgtcccttcttatgtagtgataaagtaaccttccttgaagtgtatctatccgtaatcaatcaagttgctgcagcctatgcactggcccagaataaaaaacgtggtgattctgctaaagcttctctgtctttccctgtgtgtgaaatcttaacgtctctacttgggaacgctgatcccattcatttagagttgatgtttccacgtggctatttccaagctttgccttcaaataaattctgtacttaatcatatattctaaattttattatttactgctgacatcagtttctgtcggattgtaggagcctcaccagagagggcccctgtcgccatgttgtaaaactcacacttgccaaaagttgtgggttagggtttctccccctccctcaggatgacgctagttagctgacacagatggtcacctccattaccaagtagagtcaggatgaactatgtgtgactgttcaactatgtgtcctcttccctgaggactgattagtgtttatcttgaaaacatgtccttaatgggttgtatagaacactgaagcatctgatttcaaactcttagctcttttcctctatttcccatcacattctggtctaaggcttatttattaataaaatgatttttatttctttaaacaaaaaaaactttagagcacactggggtaccggatc

SEQ ID NO: 1872 - DNA, 268 bp, Homo Sapiens
  misc_feature (12)..(12): n is a, c, g, or t
  misc_feature (22)..(23): n is a, c, g, or t
  misc_feature (27)..(28): n is a, c, g, or t
  misc_feature (30)..(31): n is a, c, g, or t
  misc_feature (38)..(38): n is a, c, g, or t
  misc_feature (42)..(42): n is a, c, g, or t
  misc_feature (60)..(60): n is a, c, g, or t
  misc_feature (62)..(64): n is a, c, g, or t
  misc_feature (66)..(66): n is a, c, g, or t
  misc_feature (68)..(69): n is a, c, g, or t
  misc_feature (224)..(224): n is a, c, g, or t
  misc_feature (231)..(231): n is a, c, g, or t
  misc_feature (237)..(237): n is a, c, g, or t
  misc_feature (242)..(242): n is a, c, g, or t
atgtcggcacgngggcgaaggnnggcnngnnggaaggnacantcggccgcagaccggggnannntntnngctgccgctgccgccatcgtgccagcccctcgggtctccgtgagccgggtgacgctccagaatgggagacaagccactttggaactcagattggatccagcttcattcaacattaactaccagttatttgataatgatagaacccaactaggcgnaatttanattgangcgtnatgccttacgtgggaaggacaagagt

SEQ ID NO: 1873 - DNA, 306 bp, Homo Sapiens
  misc_feature (11)..(11): n is a, c, g, or t
  misc_feature (15)..(15): n is a, c, g, or t
  misc_feature (18)..(18): n is a, c, g, or t
  misc_feature (26)..(26): n is a, c, g, or t
  misc_feature (29)..(29): n is a, c, g, or t
  misc_feature (52)..(52): n is a, c, g, or t
  misc_feature (83)..(83): n is a, c, g, or t
  misc_feature (199)..(199): n is a, c, g, or t
cacagactgantttnagntccctgtnttngccagggcacatcctgtctaatnactcatgttcacccagctttgcaccctcttnagcctccccacgtttaagcgaggcagctggcggtgcaggaagaatattcatccatctcctaggagctcaggagtcagaccctgggcccagactcctgcagcaagtcggggcttctntcacaagcgcctcaccttactggctttggcgccatctagtggacgcatctgggtctgcgggggaccgaacccctttcctgtgacccagaagcaaaaccagcaattta

SEQ ID NO: 1874 - DNA, 7047 bp, Homo Sapiens
cgcgatgggcacctgcagcatcggtctggggagaacagcattcgagctgccgggtggcttgtggtccggttggccaccaagtggtgtcagcggaagctgcaggcggagctaaagattggctccttccgctttttttggatccagaatgtcagtcttaagtttcagcaacaccagcaaacagtggaaattgataacctgtggatttccagcaaactccttagccatgatcttccacactatgtggcattgtgctttggagaagtgcgtatcagaacggacctacagaaagtttctgacctgtctgccccattctcccagagcgctggggtggatcaaaaggaactgtccttcagcccatccttattgaagatcttctgccaactattctccattcatgtagatgctataaacatcatggttctcaaggtggatacctctgagtccttatggcatattcagatcagtagaagcagatttcttttggatagtgatgggaaaaggctaatctgtgaggtgagcttatgtaagatcaacagcaaagttctaaagagtggtcagctggaggacacctgcctagtggagctttcactggccctggacctgtgtctaaaggtgggcattagcagtcggcatctcactgctatcactgtggatgtgtggacactccatgctgaactgcatgagggcctcttccagagccaactgctgtgccagggcccaagcctagcatctaagcctgttccctgttcagaggtgacagaaaacttagttgagccaactctgcctggcctattccttctccagcagctgccagaccaggtcaaggttaagatggagaacacaagcgtggtattgtccatgaatagtcaaaagaggcacctgacttggactctgaagctgctgcagttcctgtaccaccgtgatgaggatcagctgccccttcgaagcttcacagcaaactctgatatggcacagatgagcactgaactgctgctggaagatgggttgttgttgtcccagagtcgccaacgcattgtctgcctcaactccctcaaggctagtgtgcaggtgaccaccattgacctctcagcctccctagttctgaacacttgcatcattcactaccggcaccaggaattctctcactggctgcacctgctagcactggaaacccaagggtctagttcacctgttctaaagcaaaggaaaaaaagaaccttcccccaaatcctggctcccatcatctttagcacctccatctccaatgtcaacatttccattcaacttggagatacaccaccttttgccttgggattcaattctatctctctggattaccagcacctcaggccacaaagcatccatcagcggggcgtcctaactgtggaccacctctgctggcgtgtgggcagtgactcccacattcagcgggcgccacacccacccaatatgcatgtttggggtgaggcacttgttctggactccttcacactacagggtagctataaccagcctctgggcctgtccagcacccagtcagataccctttttcttgattgtaccattcgaggacttcaggtggaagcatcagatacctgtgcccaatgtctgtctcgtatcttatccctgatgggtccacaatctgggaagtcagctgtctctaggcactcttcatttggggaatctgtgtcattactgtggaaggtggacttgaaggtcgaagacatgaacttgtttaccctttctgccttggttggtgcttcagaggtacgactggacaccctaactatcctgggcagtgcagagacgtccactgtggggattcaaggacttgtgttagcgctggtgaaatcagtcacggagaagatgcaaccctgttgcaaggcccctgacatccctaccccagtgctcagcctttccatgctctccatcacctatcacagcagcatccgctctctggaggttcagtgtggtgcagggctgaccttactttggagccccccagatcacatgtacctgtaccagcatgtcctggccactctacagtgccgagacctactaagagccactgtgtttcctgagactgtaccatcccttgcactagagacttcaggaactacttctgagctagaaggccgtgcccctgagccattacccccaaagcggctgctaaacctaaccctggaggtgagcacagccaagctcacagcttttgtagctgaggacaagttcattaccctggctgcagagagtgtgtcactgagccggcatggaggttccctgcaggcatactgtccagagctggctgctggctttgatggcaatagtatcttcaacttcaaggaggtggaggtgcagctgctacctgagctggaagagatgatcctccaccggaaccccttccctgcgctgcagaccctccggaaccgtgtttggctcctctctttcggctcagtctcggtggagtttccttatcagtatgacttttctcgaactctagatgaggctgtgggagttcagaagtggctgaagggactacatcaagggactcgtgcttgggcctctccaagccctgtcccactcccacctgatctactcttaaaggttgagcacttctcatgggttttcttggatgatgtttttgaggtgaaacttcatgataactacgagctgatgaaggatgaaagtaaggagagtgccaaaagactacagctactggatgctaaagtggccgcccttcggaagcagcatggggagttgttgcctgcccgcaaaattgaggagctctatgcctctttggaacgcaaaaacattgaaatctacatccagcgttcccgtcgtctctatggcaacacacccatgcgccgggcactgcttacttggagcttagcagggctagaactggtagctctggcagatgcctccttccatggtcctgagcatgtggtagaacaggttcaagagcttgatccaggcagcccttttccccctgagggattagatcttgtcattcagtggtgtcgaatgctcaagtgcaatgtcaagagctttctggttcggatcagggactatccacggtacctgtttgagatccgtgactggcggctaatgggtcgacttgtgggcaccgagcagagtggtcagccttgctcccgtcggcgtcagatcttgcacttggggcttccgtggggtaacgtggcagtggagaggaacatgcccccactcaaattctaccatgactttcactcggaaatattccagtacacagtggtgtggggcccatgctgggatccagcctggacactaattggccagtgtgtggacctcttgaccaagccctcagctgaccccagcccacctttgccctggtgggacaagagccgtcttctgttccatggagactggcacatggacattgaacaggcgaacctgcaccagctggccactgaggatccatacaacacaactgaaaatatgcactgggagtggagccacctgtcttttcattggaaacctggtcagtttgtgttcaagggtgacttggatatcaacgtgagaacagcctctaagtatgacgactgctgcttccttcacctgcctgacctctgcatgacactggacctgcagtggctgtgccatgggaacccccatgatcaccatagtgtcactctgcgggccccagagttcctgcctgaggtgcccttgggccagcttcatgactcctaccgggcctttcgctcggagaacctcaatctctccatcaagatggatctgactcggcacagtggaacaatatcccagccccgaattctgctatatagtagtaccctgcgctggatgcaaaacttctgggcaacttggacaagtgtcacaaggcctatctgcaggggaaagctcttcaataacctgaaacccagcaagaagaaacttggtcagcactacaagcaactttcctatacagccctctttccccagctgcaggtacattattgggcctcatttgcccagcaacggggcatccagattgagtgcagtcagggccatgtcttcactcgggggactcagcggcttatacctcaagcaggcacagtgatgcggcgccttatctctgattggagtgttacccagatggtgagtgacctaagtcaggtgaccgttcacctgatggcctcacccactgaagagaatgctgatcactgtcttgatcccttggtaacaaagacccacctgctgagcttgtcctccctcacctaccaacggcatagcaatcgcacagctgaggaggagctctctgctcgtgatggggatcctacctttcatacacatcagctgcacttagtagatttacggatttcctggacaactaccaatcgagacattgcctttgggttatatgatgggtacaaaaaggcagctgtactcaaacgtaatctttctactgaggccctgaaggggttaaagattgatccacagatgccagccaaaaagccaaagcggggtgtcccaactagtgcctcagccccacctcgtgttaacactcccagcttcagtggacaacctgataaggggtcatcaggaggtgcttacatgttgcagaagctaattgaagagacagataggtttgtagtgttcacagaagaggaatcaggcatgagtgaccagttgtgtggcattgctgcctgccagacggatgacatatacaaccgaaactgccttattgaattggtcaactgtcagatggttcttcgtggagcagagacagaaggctgtgtcattgtgtcagctgccaaagcccaactgctgcagtgccagcaccatccagcctggtatggtgatacattgaagcaaaagacatcctggacttgcctcttggatggcatgcagtactttgccaccactgaaagcagccccacagagcaggatggccgacagctctggttagaggtgaagaatatcgaggagcaccggcagcgtagtctggactctgtgcaggagctgatggagagtgggcaggcagtgggcggcatggttaccacaaccacagattggaaccagccagctgaggcacagcaagcccagcaagtccagcggatcatttcgcgttgcaactgccgaatgtactatattagttacagccatgacattgatcctgaactagcaactcagattaagccacctgaagttcttgagaaccaggaaaaggaagatctcctaaagaagcaggaaggggctgtggataccttcacccttatccaccatgagctggaaatttccaccaacccagctcagtatgccatgatcctggacattgtcaacaacctgctgctccatgtagaacctaagcggaaggaacatagtgagaagaagcaacgggtcaggttccagcttgagatctctagcaatccagaggagcaacgcagcagcatactgcatttgcaggaggctgtgcggcagcatgtggcccaaatacgacagctggagaagcagatgtattctatcatgaagtctttgcaggatgacagcaagaatgagaatctgcttgacctgaaccagaagcttcagttgcagctaaaccaggagaaggccaacctgcagctggaaagtgaagaactgaatatcctcatcaggtgttttaaggatttccaactgcagcgggctaacaagatggagctgcgaaagcagcaagaagatgtgagtgtggtccgtcgcactgagttttactttgctcaggcacggtggcgcctgacagaggaagatggacagctgggaattgctgaattagaactgcagaggttcctctacagcaaggtgaataagtctgatgacacagcagaacatcttctggagttgggctggtttaccatgaacaacctcctccccaatgctgtctataaggtagtactgcggccccagagctcctgccagtctgggcgacagctagctctccgcctcttcagcaaagttcggccccctgttgggggtatctctgttaaggagcattttgaggtaaatgtggtgcctctcaccatccagctgacacaccagttcttccacagaatgatgggctttttctttcctggccgaagtgtggaagatgatgaagttggtgatgaagaggataagtccaaactggtgactactggaataccagtggtgaagcctcggcagctgattgcaacagatgatgcagtaccactgggccctgggaagggtgtggcacagggtttgactcggagttctggggtcagaaggtcatttcgcaaatcgccagagcaccctgtggatgacattgacaagatgaaagagcgagctgccatgaacaactccttcatctacataaagattccacaggttccactgtgtgtcagctacaagggtgagaagaacagtgtggactggggtgaccttaacctggtgctgccctgtctggagtaccacaacaacacatggacatggctagactttgccatggctgtcaaaagggacagccgcaaagccctggttgcccaggtaatcaaagagaagctaaggctgaagtctgcaacaggctctgaggtccggggaaagctagaaactaaatcggacctgaacatgcaacagcaggaagaggaggagaaagcccggctcctcattggtttaagtgtgggcgacaagaaccctggcaagaagtccatctttggcaggcgcaaatgatttggcgattcgagtggctgcagtacaggatctgactctggctcaggctccagggacttgtggggtgggaggggcttcccgttatccacgaggatttgtgggtgtcagagcccataggcatcactcttcagcacctggtctgttcgctgcagggcatggtggacagtaatgctgagttctgtctcacactgatcaggctcagggccagagaggcaacaagagagcaagacccagggaatgggcccagggcaggaccctattcccttggggtcaagtgaaagggtagggggatagtcctgatcaagtgtgataaatttttatagacatatataaatatatatatattatatatat

SEQ ID NO: 1875 - DNA, 494 bp, Homo Sapiens
  misc_feature (7)..(7): n is a, c, g, or t
  misc_feature (14)..(14): n is a, c, g, or t
  misc_feature (212)..(212): n is a, c, g, or t
  misc_feature (426)..(426): n is a, c, g, or t
  misc_feature (479)..(479): n is a, c, g, or t
ctcggantcggcgntgctgcgctccgcggcatgcccatgcgccagaattcggttccctcaaaattataaaagcaggaaagctcaagacaaagaaatccaacaaggctagtgatttcagtgatatggagaattggccaacaccaagtgaattagtgaacacgtggatttcagagcgtcctcagccaaggaaataaaaagccacaaaatagaanagaaaaagaagagaaggttgaaaagagaagtaacagtgacagcaaagaaaaccgggaaacaaaattaaatggtcctggtgaaaaccgtcagtgacggatgaggctcagtcaagtaatcaacgtaagagagctaataagcacaagtgggtaccactccacttagatgttgtaagatcagagagtcaagaaagacctggatcccggaacagctcangatgtcaacctgaagccaataaaccaacacattacattaggagaaatgatacncgagttggaagcgag

SEQ ID NO: 1876 - DNA, 2984 bp, Homo Sapiens
gaacaacctctctctctccagcagagagtgtcacctcctgctttaggaccatcaagctctgctaactgaatctcatcctaattgcaggatcacattgcaaagctttcactctttcccaccttgcttgtgggtaaatctcttctgcggaatctcagaaagtaaagttccatcctgagaatatttcacaaagaatttccttaagagctggactgggtcttgacccctgaatttaagaaattcttaaagacaatgtcaaatatgatccaagagaaaatgtgatttgagtctggagacaattgtgcatatcgtctaataataaaaacccatactagcctatagaaaacaatatttgaaagattgctaccactaaaaagaaaactactacaacttgacaagactgctgcaaacttcaatttgtcaaccacaacttgacaaggttgctataaaacaagattgctacaacttctagtttatgttatacagcatatttcattttggcttaatgatggagaaaaagtgtaccctgtattttctggttctcttgcctttttttatgattcttgttacagcagaattagaagagagtcctgaggactcaattcagttgggagttactagaaataaaatcatgacagctcaatatgaatgttaccaaaagattatgcaagaccccattcaacaagcagaaggcgtttactgcaacagaacctgggatggatggctctgctggaacgatgttgcagcaggaactgaatcaatgcagctctgccctgattactttcaggactttgatccatcagaaaaagttacaaagatctgtgaccaagatggaaactggtttagacatccagcaagcaacagaacatggacaaattatacccagtgtaatgttaacacccacgagaaagtgaagactgcactaaatttgttttacctgaccataattggacacggattgtctattgcatcactgcttatctcgcttggcatattcttttatttcaagagcctaagttgccaaaggattaccttacacaaaaatctgttcttctcatttgtttgtaactctgttgtaacaatcattcacctcactgcagtggccaacaaccaggccttagtagccacaaatcctgttagttgcaaagtgtcccagttcattcatctttacctgatgggctgtaattacttttggatgctctgtgaaggcatttacctacacacactcattgtggtggccgtgtttgcagagaagcaacatttaatgtggtattattttcttggctggggatttccactgattcctgcttgtatacatgccattgctagaagcttatattacaatgacaattgctggatcagttctgatacccatctcctctacattatccatggcccaatttgtgctgctttactggtgaatctttttttcttgttaaatattgtacgcgttctcatcaccaagttaaaagttacacaccaagcggaatccaatctgtacatgaaagctgtgagagctactcttatcttggtgccattgcttggcattgaatttgtgctgattccatggcgacctgaaggaaagattgcagaggaggtatatgactacatcatgcacatccttatgcacttccagggtcttttggtctctaccattttctgcttctttaatggagaggttcaagcaattctgagaagaaactggaatcaatacaaaatccaatttggaaacagcttttccaactcagaagctcttcgtagtgcgtcttacacagtgtcaacaatcagtgatggtccaggttatagtcatgactgtcctagtgaacacttaaatggaaaaagcatccatgatattgaaaatgttctcttaaaaccagaaaatttatataattgaaaatagaaggatggttgtctcactgttttgtgcttctcctaactcaaggacttggacccatgactctgtagccagaagacttcaatattaaatgactttttgaatgtcataaagaagagccttcacatgaaattagtagtgtgttgataagagtgtaacatccagctctatgtgggaaaaaagaaatcctggtttgtaatgtttgtcagtaaatactcccactatgcctgatgtgacgctactaacctgacatcaccaagtgtggaattggagaaaagcacaatcaacttttctgagctggtgtaagccagttccagcacaccattgcatgaattcacaaacaaatggctgtaaaactaaacatacatgttgggcatgattctacccttattgccccaagagacctagctaaggtctataaacatgaagggaaaattagcttttagttttaaaactctttatcccatcttgattggggcagttgactttttttttgcccagagtgccgtagtcctttttgtaactaccctctcaaatggacaataccagaagtgaattatccctgctggctttcttttctctatgaaaagcaactgagtacaattgttatgatctactcatttgctgacacatcagttatatcttgtggcatatccattgtggaaactggatgaacaggatgtataatatgcaatcctacttctatatcattaggaaaacatcttagttgatgctacaaaacaccttgtcaacctcttcctgtcttaccaaacagtgggagggaattcctagctgtaaatataaattttgtcccttccatttctactgtataaacaaattagcaatcattttatataaagaaaatcaatgaaggatttcttattttcttggaattttgtaaaaagaaattgtgaaaaatgagcttgtaaatactccattattttattttatagtctcaaatcaaatacatacaacctatgtaatttttaaagcaaatatataatgcaacaatgtgtgtatgttaatatctgatactgtatctgggctgattttttaaataaaatagagtctggaatgctaaaaaaaaaaaaaa

SEQ ID NO: 1877 - DNA, 2730 bp, Homo Sapiens
aaaattcactatgatcaagtgggattcatcctaggaatgtaagactggttccacatatgcaaattaataagcattatagatcacattagcagaaccaagaacaaagaccatatgatcttttcaatagacattgaaaaagtgtttgataaaattcaatattcctttattttaaaaaccctcaaaaactcagtatacatggagtataataataataaaggccataaatttacagcaaacttcatactgaatggagaaaaattgaaagcctttcccctaaaatctggaaaaaaccaagaatgctcactttcaccatttttatgcaacataatctgctccatctagctctttccagtgcagccactgccgccgcccaggagccctcgtcccctgccttgtccccctactcgttcccgctcccacggcatggagcaggacactgccgcagtggcagccaccgtggcagccgcggatgcgaccgccactatcgtggtcatagaggacgagcagcccgggccgtccacctctcaggaggagggagcggccgccgcggccaccgaagccaccgcggccacggagaagggcgagaagaagaaggagaaaaacgtttcttcatttcaactcaaacttgctgctaaagcgcctaaatctgaaaaggaaatggacccagaatatgaagagaaaatgaaagccgaccgagcaaagagatttgaatttttactgaagcagacagaactttttgcacatttcattcagccttcagcacagaaatctccaacatctccactgaacatgaaattgggacgtccccgaataaagaaagatgaaaagcagagcttaatttctgctggagactaccgccataggcgcacagagcaagaagaagatgaagagctactgtctgagagtcggaaaacatctaatgtgtgtattagatttgaggtgtcaccttcatatgtgaaaggggggccactgagagattatcagattcgaggactgaattggttgatctctttatatgaaaatggagtcaatggcattttggctgatgaaatgggccttgggaaaactttacaaacaattgctttgcttggttacctgaaacactaccgaaatattcctggacctcacatggttttagttccaaagtctactttacacaactggatgaatgaatttaaacgatgggtcccatctctccgtgtcatttgttttgtcggagacaaggatgccagagctgcttttattcgtgatgaaatgatgccaggagagtgggatgtttgcgttacttcttatgagatggtaattaaagaaaaatctgtattcaaaaagtttcactggcgatacctggtcattgatgaagctcacagaataaagaatgaaaaatctaagctttcagagattgttcgtgagttcaagtcgactaaccgcttgctcctaactggaacacctttgcagaataacctgcatgaactgtgggccttactcaactttttattgcctgatgtctttaattctgcagatgactttgattcttggtttgacactaaaaattgtcttggtgatcaaaaactcgtggaaagacttcatgcagttttaaaaccatttttgttacgccgtataaaaactgatgtagagaagagtctgccacctaaaaaggaaataaagatttacttggggctgagtaagatgcaacgagaatggtatacaaaaatcctgatgaaagatattgatgttttaaactcttctggcaagatggacaagatgcgactcttaaacattctgatgcagcttcgaaagtgttgtaatcatccatatctgtttgatggtgctgaacctggtccaccttataccactgatgagcatattgtcagcaacagtggtaaaatggtagttctggataaactattggccaaactcaaagaacagggttcaagggttctcattttcagccagatgactcgcttgctggatattttggaagattattgcatgtggcgtggttatgagtattgtcgactggatggacaaaccccgcatgaagaaagagaggataaattcctagaagtggaatttctgggtcaaagggaagcaatagaggcttttaatgctcctaatagtagcaaattcatctttatgctaagtaccagggctggaggtctcggaattaacctggcaagtgctgatgtggttatactatatgattcagactggaacccacaggttgatctacaagctatggatcgagcacatcgtattggtcagaagaaaccagtacgtgtattccgtctcatcactgacaacactgttgaagagaggattgtagaaagagctgagataaaactgagactcgattcaattgttatacaacaaggaagactcattgaccaacagtctaacaagctggcaaaagaggaaatgttacaaatgatacggcatggagccacccatgtttttgcttctaaagagagtgagttgacagatgaagacattacaactattctggaaagaggggaaaagaagactgcagagatgaatgaacgcctgcaaaaaatgggagagtcttctctaagaaattttagaatggacattgaacaaagtttatacaaatttgagggagaagattatagagaaaaacagaagcttggcatggtggaatggattgaacctcctaaacgagaacgcaaagcaaactacgcagtggatgcctactttagagaggctttgcgtgtc

SEQ ID NO: 1878 - DNA, 684 bp, Homo Sapiens
ttcccggcccccagacaggccgggctctcgagggcaccacagacatgtgctcgattagcgtcaggcgctaccggcggccggggcgctgtggagaatgaggaggacctgccagaactgtcggacagcggggacgaggccgctgggaggatgaggacgatgcagatctcccccacggcaagcagcagaccccctgcctgttctgtaacaggttattcacatctgctgaagaaacattttcacactgtaagtctgagcatcagtttaatattgacagcatggttcataaacatggacttgaattttatggatacattaagctaataaattttattagacttaagaatcctacagttgagtacatgaattccatatacaacccagtgccttgggagaaagaagagtatttgaagccagtattagaagatgaccttttacttcaatttgatgtagaagatctttatgaaccggtgtcagtacccttctcataccccaatggactcagtgaaaatacatctgttgttgaagaaattgaaacatatggaagccagggcaactgtctgctgaagccgcattggcagagcacgtgaggatctgcaaaaaaatgaaacaatttgtcaggattatgtgatgcaacagatgtcagaactgctcgtatctactagtgtctttgggactcagagatta

SEQ ID NO: 1879 - DNA, 1442 bp, Homo Sapiens
ggttcccttccacgctgtgaagctttgttcttttggtcttcatgataaatcttgctgctgctcactcgttgggtccgtgccacctttaagagctgtaacactcaccgcgaaggtctgcaacttcactcctggggccagcaagaccacgaatgcaccgagaggaatgaacaactctggacacaccatctttaagaaccgtaatactcaccgcaagggtctgcaacttcattcttgaagtcagtgaggccaagaacccatcaattccgtacacattttggtgactttgaagagactgtcacctatcaccaagtggtgagactattgccaagcagtgagactattgccaagtggtgagaccatcaccaagcggtgagactatcacctatcgccaagtggcctgattcagcaggaagcatctcagacaccaaccactatgctgtcagcagttgcccggggctaccagggctggtttcatccctgtgctaggctttctgtgaggatgagcagcaccgggatagacaggaagggcgtcctggctaaccgggtagccgtggtcacggggtccaccagtgggatcggctttgccatcgcccgacgtctggcccgggacggggcccacgtggtcatcagcagccggaagcagcagaacgtggaccgggccatggccaagctgcagggggaggggctgagtgtggcgggcattgtgtgccacgtggggaaggctgaggaccgggagcagctggtggccaaggccctggagcactgtgggggcgtcgacttcctggtgtgcagcgcaggggtcaaccctctggtagggagcactctggggaccagtgagcagatctgggacaagatcctaagtgtgaacgtgaagtccccagccctgctgctgagccagttgctgccctacatggagaacaggaggggtgctgtcatcctggtctcttccattgcagcttataatccagtagtggcgctgggtgtctacaatgtcagcaagacagcgctgctgggtctcactagaacactggcattggagctggcccccaaggacatccgggtaaactgcgtggttccaggaattataaaaactgacttcagcaaagtgtttcatgggaatgagtctctctggaagaacttcaaggaacatcatcagctgcagaggattggggagtcagaggactgtgcaggaatcgtgtccttcctgtgctctccagatgccagctacgtcaacggggagaacattgcggtggcaggctactccactcggctctgagaggagtgggggcggctgcgtagctgtggtcccagcccaggagcctgagggggtgtctaggtgatcatttggatctggagcagagtctgccattctgccagactagcaatttgggggcttactcatgctaggcttgaggaagaagaaaaacgcttcggcattctcc

SEQ ID NO: 1880 - DNA, 1878 bp, Homo Sapiens
atgaacgcggcggtggtgaggcggacgcaggaggcgctggggaaagtgattcggaggccgccgctgaccgagaagctgctgagcaagcccccgttccgctacctgcacgacatcatcacggaggtgattagaatgactggtttcatgaagggcctctacacagacgccgagatgaagtctgataatgtgaaggataaagatgcaaaaattagcttcctacaaaaggccatagacgtggttgtaatggtgtcgggagagccactgttggccaaaccagcccgaatcgtggcggggcatgagcctgaaagaacaaacgagctgctccagataattggaaaatgctgtctcaacaagctctctagtgacgatgcggtgcggagggttttagctggagagaagggagaagtgaaaggccgggcctcactgacctcaagatctcaggaattggataataagaatgtgcgagaagaagagtccagagttcacaaaaatacagaggatagaggagacgctgaaataaaagagagaagtacaagcagagatcgaaaacagaaggaagaattgaaagaagaccgcaagccaagagaaaaggacaaggacaaggagaaggccaaggagaatggcggaaacagacacagagaaggggagagagagagagccaaagcccgggccaggccagacaacgagcgacagaaagacagaggcaacagggagcgggacagagactccgagcgcaagaaggagacagagagaaagagtgagggggggaaagagaaggagagactgagagacagggaccgagagcgcgaccgggacaaagggaaggacagggacagacggagagtgaaaaacggggagcactcctgggacctggacagggagaagaacagagagcatgacaaacctgagaaaaagtcagcaagctcaggggagatgtctaaaaagttatcagatggaacttttaaagactccaaggctgaaacagagactgagatttccactagagcttccaagtcattgacaacaaaaacatcaaaacggcgatccaaaaattcagtggaaggtgactccaccagtgatgcagaaggagatgctggacctgctggccaagataagtctgaggtgccagagactccagaaattcctaatgagctttcatccaacatcagaagaattcctcggcctgggagtgcaagaccagcccctccccgggtcaaacggcaagacagcatggaggcgctacaaatggataggtcagggagtggtaaaaccgtttcaaatgtgattacagagtcacacaattctgacaatgaagaggatgatcaatttgtggtggaagctgcccctcagctctctgaaatgtcagaaattgaaatggtaacagcagtggaactagaagaagaggagaagcatggtggacttgtgaaaaaaattttggagacgaagaaagattatgagaaattgcagcagtcacccaaacctggggagaaggagcgatctctctttgagtcggcatggaagaaggagaaggacatcgtttccaaggagatagagaagctccgcacgtccatccagaccctgtgcaagagcgcacttcccctggggaagatcatggactacatccaggaagacgtggatgccatgcagaatgagctgcagatgtggcacagcgagaacaggcagcacgccgaggccctgcagcaggagcagaggatcacagactgtgccgtggagcccttaaaggctgagctcgcggagctggagcagctgatcaaagaccagcaagacaagatctgtgctgtgaaggccaacatcctcaagaatgaagaaaaaatccagaaaatggtatatagtatcaatttgacttcgagaaggtga

SEQ ID NO: 1881 - DNA, 615 bp, Homo Sapiens
ctgaggatccccggcaagcctccttccctggcatgtgcggtgaggctcgcggccggagtgcggcgctgggcggaacctaccatggcggccgagagaaagacaaagttgtccaagagtctgctgcgcatgaagtttatgcaaaggggactggactcagaaaccaagaaacaactagaagaagaagaaaagaaaatcattagtgaagagcactggtacttggatttgccagagcttaaagagaaagagagtttcataatagaagagcagagtttcttactatgtgaagatcttctctatggaagaatgtcattcagaggatttaatcctgaggttgagaaattgatgcttcagatgaatgctaagcacaaagcagaagaagttgaagatgaaacagtagagcttgatgtgtcagatgaagagatggctagaagatatgagaccttggtggggacaattgggaaaaagtttgccagaaagagagaccatgccaattatgaagaagatgaaaatggagacataacaccaattaaagcaaagaagatgttcttaaagccccaggattaagatggatgccttaagcgatggcccaggggtgcttggtggaagtcagcaggg

SEQ ID NO: 1882 - DNA, 5231 bp, Homo Sapiens
tataaattgctttttaacttcgttgaacaaaacatgaaaatagagagactggttgaagtaaagccttccttagttattgactatttaaagacagaaaagaagctattctggccaaagataaagaaggtaaatgtgcaggtaagtttcaatcctgagaacaaacaaaaaggcattttactaactggctcaaagaccgaagtactgaaggcagtggacattgtcaagcaagtctgggattcagtctgtgttaaaagtgtccatactgataagccaggagccaagcagttcttccaggataaagcacggttttatcaaagtgagatcaaacggttgtttggttgttacattgaactacaggagaatgaagtaatgaaggagggaggcagccccgctgggcagaagtgcttctctcggacagtcttggcccctggcgttgtgctgattgtgcagcagggtgacttggcacggcttcctgtcgatgtggtggtgaatgcatctaatgaggaccttaagcattatggtggcctggccgctgcgctctcaaaagcagctggccctgagctccaggccgactgtgaccagatagtgaagagagagggcagactcctaccgggcaatgccaccatctccaaggcaggaaagctgccctaccaccacgtgatccatgcagtggggccccgctggagcggatatgaggccccgaggtgtgtgtacctattaaggagagctgtgcaactcagtctctgtctagccgaaaaatacaagtaccgatccatagccatcccagctattagttctggagtctttggctttcccttaggccgatgcgtggagaccattgtttctgccatcaaggaaaacttccaattcaagaaggatggacactgcttgaaagaaatctaccttgtggatgtatctgagaagactgttgaggcctttgcagaagctgtgaaaactgtatttaaagccaccctgccagatacagctgccccgccaggtttaccaccagcagcagcggggcctgggaaaacatcatgggaaaaaggaagcctggtgtccccgggaggcctgcagatgctgttggtgaaagagggtgtgcagaatgctaagaccgatgttgttgtcaactccgttcccttggatctcgtgcttagtagagggcctctttctaagtccctcttggaaaaagctggaccagagctccaggaggaattggacacagttggacaaggggtggctgtcagcatgggcacagtgctcaaaaccagcagctggaatctggactgtcgctatgtgcttcacgtggtagctccggagtggagaaatggtagcacatcttcactcaagataatggaagacataatcagagaatgtatggagatcactgagagcttgtccttaaaatcaattgcatttccagcaataggaacaggaaacttgggatttcctaaaaacatattcgctgaattaatcatttcagaggtgttcaaatttagtagcaagaatcagctgaaaactttacaagaggttcactttctgctgcacccgagtgatcatgaaaatattcaggcattttcagatgaatttgccagaagggctaatggaaatctcgtcagtgacaaaattccgaaggctaaagatacacaaggtttttatgggactgtttctagccctgattcaggtgtgtatgaaatgaagattggctccatcatcttccaggtggcttctggagatatcacgaaagaagaggcagatgtgattgtaaattcaacatcaaactcattcaatctcaaagcaggggtctccaaagcaattttagaatgtgctggacaaaatgtagaaagggaatgttctcagcaagctcagcagcgcaaaaatgattatataatcaccggaggtggatttttgaggtgcaagaatatcattcatgtaattggtggaaatgatgtcaagagttcagtttcctctgttttgcaggagtgtgaaaaaaaaaattactcatccatttgcctcccagccattgggacaggaaatgccaaacaacacccagataaggttgctgaagccataattgatgccattgaagactttgtccagaaaggatcagcccagtctgtgaaaaaagttaaagttgttatctttctgcctcaagtactggatgtgttttatgccaacatgaagaaaagagaagggactcagctttcttcccaacagtctgtgatgtctaaacttgcatcatttttgggcttttcaaagcaatctccccaaaaaaagaatcatttggttttggaaaagaaaacagaatcagcaacttttcgggtgtgtggtgaaaatgtcacgtgtgtggaatacgctatctcctggctacaagacctgattgaaaaagaacagtgtccttacaccagtgaagatgagtgcatcaaagactttgatgaaaaggagtatcaggagttgaatgagctgcagaagaagttaaatattaacatttccctggaccataagagacctttgattaaggttttgggaattagcagagatgtgatgcaggctagagatgaaattgaggcgatgatcaagagagttcgattggccaaagaacaggaatcccgggcagattgtatcagtgagtttatagaatggcagtataatgacaataacacttctcattgttttaacaaaatgaccaatctgaaattagaggatgcaaggagagaaaagaaaaaaacagttgatgtcaaaattaatcatcggcactacacagtgaacttgaacacatacactgccacagacacaaagggccacagtttatctgttcagcgcctcacgaaatccaaagttgacatccctgcacactggagtgatatgaagcagcagaatttctgtgtggtggagctgctgcctagtgatcctgagtacaacacggtggcaagcaagtttaatcagacctgctcacacttcagaatagagaaggtaagccttctgctagaatgcagtttctggatggtggaaataagttctgtcatggtcctatataaaatccattttcattcacttcctatcacatttttttaaacccagaattagaatttgtatggtaattagtagttctagattctactcatgtgaccataattactgaggcattaagattcttgtgtcagtgattacaatatttgattgtaatatgatagaacactaaagacatatatttactttgtgaagcaagctaatacaaattcaaagatatggctttaaaattggatttgatagctagcaaattccacagagagccatgcagaggctccttagatcaggaccatgttactctgccccattattcacagatcaacagtgcttccttgataaagccagcaggccttttctcgtttatcataattattttgggcaggtgaatgtgatgattcgtgcctgtagtcccagctattgggaggctgaggtggaaggattgcatgagcccaggagtttgacgccagtctgggtaacatagtgagatcctgctctcaaataaaaacaaccaattattttggcatcttcttccatttttaaacatttttgatattgctgtttgaaattatattttccttgacttctctagcaaaattattatgattttttttttccttgactaattttcttttcatttttgcaggcacgctgtttctcttccaaacccctaattctagctttattcacgccatttatgcttaaacggtcttttgtctctgtacctcaccagggaatatatttacccttcttggattcaactattagttcaatgtcgatagctcccaaatcaacattaccaacctgggtctttgactcaagctctagaacatactcccagtggcctaaaaaaatctccacttgaggctgggcacagtggctcacgcctgtaatcccagcactttgggaggccgaggtgggtggatcacgaggtcaggggttcaagaccatcctggtgaagatggtgaaaccacgtctctactaaaactacaaaaattagccgggcatgttggcaggtgcctataatcccacctacttgggaggctgaggcaggataattgcttgaacatgggcggcagagattgcagtgagccaagatcacgccactgcactccagcctggtcgacagagtgagactccgtctcaaaaaaaaaaatctccacttgaatatctaactgcaaaatcaacttctctaaaatctaatgcatcatacgtaagtaattctctttccctttccttcctcatttctgtttttggttctaccactttctgagtaaagccggagatctttgatccaccataagtctgccagtaagacctacattttctttgcaaatttttcttactctctatttgaactgccaacactgtttattcatgttgttaagtacatcataatttaaaaagattcaaagtgccctacaaagatataaactataccttcagataaaataaatatacaaagaaaaatggttaaagagaaaagaatggcagggaaaataagataatacagacgaactgctagttctcaaaaatatataacatgaggttaccaatttgtccctgagcttcctagtagacaaagcaagaagtaaacattcaggtacaagactcataatgtccgtaaatcaaaaagcaaaccatttgataaggaggctcacagctcctcacaatactgagactgactcctgagagatttctcttgtggatcaagtactagagaatatcctcaacgtcatcctcacaataaattaaatatcaacttttatatcactgtttttttttaatgtaaaactggttgaacaaaaccgatgcctgattgaatgaaaacaattctatgaggcaccaagacaatatgattcaagtatgcagctctatgatggtctatttctgagataacaagtaagtctcactccaagtaccaattactactaactggtagtggctgattggcacattgtgatgagatgctaagtttagattgagcaggaatgaatgttctgcttgaccagcaatatctacagtgggccctgtggatgcctgctgtgtattggcagaccctggccagagaattgatttcaacacttttttgcagtgaaaccttttttttcaataaaatcttatgtgaaatcccagtgtatgaaccagataaaagcagaggtgtgggtagtacttaaggtgcctccatggaggtccctagaattgtg

SEQ ID NO: 1883 - DNA, 257 bp, Homo Sapiens
tttaacaaaaaaaaggaaaaacaaaagcctaaaatctgagttctagaaccagagagatttgggaaccataagatctagaatcagaaggagttgagggtggtaagatctaaaaccagagaaatgtataaggcaaagtctaaaatcagaagatatttgaaggctgaattctagacccagggtaatttggagtcagatcttgagtgaggaggagctggaaatgatgaagtctagagccaagggaacttacggaatgaggt

SEQ ID NO: 1884 - DNA, 275 bp, Homo Sapiens
  misc_feature (51)..(51): n is a, c, g, or t
aacactaccgtagaagcatacctacagggagaggaaaacattgtgcttggntcgaggtcgtggtgttgcgagagagtcagcaggcagcaggctccgtgcgggcgggcggacggcacagagggagggagcgagcgagcagtgagtagccagcaagggcggtcgggtcccgaggtcagccgagatttctcaggtcctccggccccctcccttgagtcacagcgcctcggtgtcagaggatcggacacggcccggcctggccatggcctcgttgctga

SEQ ID NO: 1885 - DNA, 355 bp, Homo Sapiens
ttttttttaaaaaaaattattggaggaatttattgcctgcctccatgtctataaacgttccatggacacaaaatacaatcattcaaattccctggaaaccacctatatttttcgaagaattcattctggccaacagttgggaaccaataacaggtctagagctcctaatttaggcagctgtcccaacataaaagcacaagagccagaggtgagttctccaaagctgcacctgtgtctgcaaacgtttacacaagacccttgaatggagaacatgccttgtagggcaaattcaacttttccaaatgacactgctataagttactacatctcatcctctacatctctgtgagggatg

SEQ ID NO: 1886 - DNA, 602 bp, Homo Sapiens
cagagcaaccaggaacactaggcttcaggaactttactctcaatcctaaatacaatcccaaaccctaaagcgtgcttatatagtcaaccacagggaacataaggctgacagtgatagaatatatcatacagtctggaagtatcttatggccaggggatgcatgaagctggaaaattagaggaaagggaaagccactgacattttccaaaagtagaattaacaagctcagatacattagaaggaggaccagttaggagacttcctgtaatccaggagagggtgagagctagaccagcatggtagcagcgggagtatggggagaagtggttggattctggatatattttgaaggtcgagtcaaagggatttgccaatggattagacatgcagtgtgagaggagagaggggagtagggtttttggcctgagaaatgagaagaatggagttgctgtttactaatacagatggggtaaaggtagctgtggggggcatatcaggagctcagttttggaacgtttattttttatttttgttttttgagacggagtctcgctctgtcgcccaggctggaatgcagtggcgccacctcgggtcactgcaac

SEQ ID NO: 1887 - DNA, 541 bp, Homo Sapiens
tttttttttttttttttgagagtacaggaggatgtttattttaaggtgtgcaccggctgagtggattcaaatccaaaaagctgagcattaaacaaagacagagcagggtttttataagtggacttacaaaagtaaaacaaaagcagttaatcatatagtgcataacttgtggccttgcatagctggtggccttggagctgtgtcaaaagaaaatcaagaactggctaaatacagacatttgtaaaacataatcatgcttaagaagccagggaaaggagtaacagtaaaggaatttgtcttcctcctttttttttttttttccttcaaccttgttctagaggggagggatgtctggaacccattcctttggacttggcttctcaaacaacattatcttataactgtccttgaagtgagcttgctaggccgaggaaaacttgttcttttctttttaacccttgccttgcctgttaacttttcttggagtgaatgaatgcatatttatttttaaatttctgcctcagtttcccccctttgatgc

SEQ ID NO: 1888 - DNA, 110665 bp, Homo Sapiens
gatcattgggtgagaatgggacggcagtaaagtcataagagcactggaccaggagtcgagagaccccactgtgcctctcactggctgtgtggctgggcaggtctctgctttgttcagcctcagtttccatatctgtgaatctggatcatctgtgggattccctccaaagcgaaccttctacaaatctttgccaaaggcaccggggaggaagaaaaaggaagagaaagcaaggggtggtgggggtgggttgttaggggtgtttgggagatgctgcagtccgcagaattgagctttagctaaagactggtcctggtgaagcaaccaggaagtttttcttgggacagccatagccactatatattgagcactggaccagtgtcacctggtcagggggttgttgagaacgtgggctctggggccaggctatgtggcttgcacagctctgccacttaacactgtgtgagcctcggcaagctgcttaaccccactgtgcctcagtttccacacctaaaaagtgagggttcttgcagcacccacctactagtgctgtcgtgagggctgagtatgccgatattgatgcacatgtagtacttagaatagcgcctaatgaactgttatgactcagtgagttatttatttctcattcttaagtgaggaaatagaggcatggagagctctagggaaggaataaagacctatgggttgcaaacaggcctctccatgtgtctaatgttctctgatgtaatgctttacgtggggcttcccaccactctctgtcccaccacaccagcctcctctccttgttgaataagacggtgcagggggcttggcaatgcctgaggcatctctaccacccctgccctgccacttgggtttccctgggtagcatctggcctggccactgaccatgcactcctagctgtggctgtcccctgctctcctatcatctgtccctcctccacactgcaccagagatacagatccccttggctgtgatgtcattggggacagagataaaatcgcagtgatagggtaggatctgggacttatcatgcccacaggaaatgctttgctgtgaaatggcaaagccgtgggtgagagccaagaggagcagaggcaacaggcagggtcatcaccagctttccttcctggctcttaagtgtgggcttaaggaggaaaaatgaggtctggccacccatcttttgtccagctttcttatggggagagccacctggccccataagatccagcacctgcttgccaggccatgcaggccacctggttggctcttatgcattcagcagtggtcccagagtaagatgcggtgctgtagggattaatccagggattccaccagactctccatccagaaacccatggctcatattccctcctcgtagcccttcctcactccttccctataagcaaatctttccctccatcagggcacacatttcagagagaccggggcactgttccatcttactgcagcctggctgggtattatgatcacctgcggaactcttagacaacaccattgcatctgaatctcttggggaggggcctaggcatctttatttaatttttttttttctgggatgattccaatgccctttctctagggcagtggttctcaaatttgggcatgcatgagaactccctggaggaattgtttaaacacagatgctgggcccctcccggtgtttctgcaaattccatgtggtctagaatttgaatttctgacaagtcctctagtgatgctaatgctgctggtccccagagcacacctggaaaaccactgccttcgggtcctgccgctttgcagctacccaggtgagagccgtccttctcctgggttctgtgtctctgactttgggcctggtaggcctgtccccttttgaaggcaggtcgccaggggcatggaccacttctgagaaaatttggtgtcccctctacagtcagtccttcccatttctccacctgtccccacctcccctgaaactatccactgttcggccttgcagctcttggtcccactctctgggacaagtgcttaaaactgtgcactggttgatgaaggcaggatgaggcggacaaacaaggatggcactagctgaggggcctcagaacatgcgtcagggtctgaagctgctgtgaaggtgcttggagctaaagtagcattattgcaataattggggaggtgttcagagaggaccctcactttgttgaagggaggctcttaaaatacttcctgttatttcactttcccaccctatggagggcaagtatttgattccagcttgaatcgtagttgttgttaacaataaaaatgatacagacacacacagaaataagctgttcccttttcctttcctctcccagaccagagatgtagggagggtagggggagggtccctgctggaggtagtggagtctctgtcatcttctaggtggtcctgggccttgagagagtggatggttgggagagcctgggggctggcccctgggggcaggggtgtggagttgtttgtggaaactggagggagttggggtgaagcctggtaggaggtgagaagaggtggcaggtcccacagccctgctgcaggggaggcgaggcggggccgggagtgggggcgagattggtgtctgagcccgccagtcctcaggtgactgggcacaggggtttgctgtgttttggtccgtgccgtacccctagcacctagaagagagcctcatatatagtggctgctcaataaatctttgtggaatggatgagagaatgggattgagcccccattgtgtgcccagaaatgcagacaccaaaaaaatgctctgtctaccgtctctaccctgcaggtgcttcaccagctgacacccaggggcctcgcccacaggtccacaaggcgctgagccctctgcctctgccctgtctccctccccgcacagtgatccaggcccagcctcctcctggtgtagggctcacagtctgttcctccccacagagagtctgccagcacctcccccaaccccccctccccgagttctaccagtgggtctgtggggtggggctccggtttgttttctcctgtttgccaagggaagtcacagcctgtcctttgccttgtttataattgctttgaggacagcacctgccgcggccccccacagtccctgaggggtgcagagtggccaggaggtgacacactatactgtccaccccctgccgcctcttgtcccctcccagctctagccaggtgcactttctgctgccttgccaggacggtgctggctggccttgctttggggctaattggaaccgtagagctgggggtgtcagagggcagctggcgctgcccccatgttgtcaagaggaggggatcgaggcccagggattcagcagcacaaggccttcagtgtcaacaggcatgtactgagcacatcagaggtacctggcactgggctggccaagcagggcgggtgggaacaagatcacagcttctcccgcaaggtgccgatgtcctagccagggaatcttagtaaccacagagggcagagaggagcagaatgcgagaagctagtgtagactaatgtactaaacaacataagcgcggtgatacctgccctttgccctgaagagcattctccttgggcctcttgctggcacagagaccttgactcagcgtggtttaggccctcagccctttccaccttctgggccccaggaagggctactctactgctccctgggccttctcacctgggggtcacctctgcaggctacgttctggacaagtccttccttccaggaggactagaggctgctggagcctttgaaaggaggctctgagccacccacctgccacttggaagctctggggccaaggggagatgtggtgctggatcagggccgacagctcaggcctccttggacctgcctgtgactgagcctccatgcttgggcctggaacctgggggcagtgcctctgttcctcccacctccagaaccttcttttttgtttgtttgcagacagggtctctctgtgttgcccaggctggagtgcagtggcacaatcatggctcactatagcctcaaccttctgggctcaagcaatcctcttaccttagcttcccaagtagctgggaccagaggcacgtgccactacacctggctaatttttaaaattttctgtagagatgggatctcaccatgttgcccaggctggtctcaaactcctgggctcaagtgatccagccgcctcggcctcccaaagtgttaagattacaggcgtgagccaccttgcctggccacaagccttttttctcccctccaccctccgccaccctctgagcctccatctagttccacagcatctgcagccttggactatctctctctctcctgctctttgtctccccttctctccttcctctttatttccttctctgccaccttccttcttttgatgtgttcaaaggatgaccagggcccaccccaccagtacctttctcacagtcagcctccaagtcctgctgtcaggggcccagaggaatggtccacggtagggtgaggtggctgcgaaggtgcccagcctgacgcaaccccctacccatggccaggaaggggtgtgtggtggctgggacatcctgggcggggtggcgggtgaaagaggctatggtagtcggctcctgtgggttgaggggcagccagcagcctgggccaactgggggaagggaccctccctagacagccccaagcattatcactactccagacctgtgcctaactataggttgtcatccacttctttggatctaattatagtgttttgcgaaactaggtatgggaagaaaatactgtatctatttacttatatctcattcttttctttcttttaaaattgtgaaatatagcatagttgcttaaaaagcataaacatacacatataatgtagtaaataattataaaagtgaacccctggctgggtgcggtggctcacgcctgtaatcccagcactttgtgaggctaaggcaggcagatcacgaggtcaggggtttgagaccagcctggccaacatggtgaaaccccatctctactaaaaatacaaaaattatccaggtgttgtggcacgcacctgtaattccagcttgggaggctaaggcaggagaatcgcttgaacctgggaggtggaggttgcagtgagccaagatcgtatcaatgcactccagcctgggtgacagagcaagactccatctaaagaaaaaaaaaagtgaacccctaggcaaccatcacccaggtgaataaacaacagaatgtagcttgtacgccaaaatcaactcatgtgccctccacccccagaggtaatcactatcctgactgtacgataatcagctccttgcctcttttattatgtaaccacctatgtctgcatcccttagctgagtttagttttgcctgactctgaatttaatacagatggaatggcgctggacatgttcttttacgtcaggcttttcccacccaacagtgtatttgtgagagtcacttatgttgtgtatagccgtagtctgttaattttctttcttttctttttattatttatttatttttgagatggagtctgctctgttgcccaggctggagtgcagtggcgcgatctcagctcactgcaacctccacctccccagctcaagcgattctcctacctcggcctcccaaagtgccaggattgcaggcgtgagccgccgggcctggcctttaatgtatatttcaacttcagtaaatattttattaagtggttgtactactttactccttgctagtggcccacagagttcctgttgctccttagccttatcaacacttggtcttgttagtttaatttctgccatgatggtgagtgtgtaacatgtctcatcctggtgtattgcattttcattctcattttaaaaatatataattttggggtatgtttgctgacatctataatatattcatgcatcggggtatatataagcaatttacaaggaaagaagcatatattgagagtgctcaaaagtttttactgataggaatatatgatcaaaacggttgaaagatcagggtaatattgaatgccaggaagggggttggcatgtagcttgggagttggaaggtgatattggtcttgtggggagaccccctaagtggcagtgcctgctggggctaagaagcctcttcccagagggtactgaaccacagagtacccatcacccttcaggccctcttgcctagcacatctggtgggggagagggggagactctcaggctagagccctcagcaggtgtaccgttcaatttggaattggcaggtgcccatcttttaggtgcttctagggcagtagttctccactaggggtgattttgtccccctaggggacatttgccaatgtctgatgatattggccagggataccactaaacatcttaaaatgcacaggacagcccctgtaactaattacctggccctgagtgtctggtgttgaggttgagaaactctgatctaggaaaagagccaggaaacagatttgccataaacttgctgcatggcctcgaggaagtcacttaagtgatttgagcctcagcctccttggaatctgaaaaacggatagcaagcgttgctgcccttccccttcatggggctcttgtcaggatgggggagatggtgaatgtgcaggcattttgggggaggcgtccctgcaaaggggccttgtggctgttgcgttccagtagagccaggccttttcagcactggcccttcttccttgactgtgttccctgtccaccaagctggaggcatcaggtgaccgctgtgaacctcagtcctggttcgtgctgctgcaggggctgtgaggcgcttcccccacagtccctgcgggccccagccttttgatgagggctgcagaaatgaggggttctctgggagccttggggcccaggacaaaaacatttccaactttgtccttagctggatgggagtccaaggttgtgggggtgataagaggtatttatcatgttccttatctgaggccccattgcaggtctcgggcggcaaggggcgggagccagaggtcctccctgggggctctgcacacccaggcctggctcctactcatcctttgtgtccttccagaatttgccagcccagggaggcccagggttggaccagagtctgggtccatcctccctgggcctctctggcctcactgttctgggcttccctcacattgctggcatctcctgccttctccaggagccacggcctgcctcatctcctctctgctgcccgcttccttcctgaaacctgcactcacgaaagggcccagtaaactcatccaccctgagacgcagacgaccgataatagcttaacctttcttaatacagggtatttgcttatcaacgatgggaatcccttggccaccagaaagaagcactaagtgaaatctctgcccagtctctttggcaggctgctaaaaaagtgctggggggctgaggaaccactgaacttgcatgtgtatcaagaacagtttctgcacaagtgaaaagtgtgcggtggtgtggatcttcccggagctgcccagggctctgcttgatctcaggctccatttcaaggtgggctgtagtacggcctcgacctgggtgtctggaggccctgggaaggcccaaggccaagactgcaggtgtatggccagtcaggaagatggtgagctgtggggcttctggctagaaggacacatgtctctaggaagcggggctggggttagggttaggcccaccctggacctggtgggattgggactctggcgaaattcttgctgctctgtgtctctccatctgcctagggccctctgaggtcaggctggggtcagggcggccatgagaggcctcctgtgggaggaccaaggagcgctgtgggcgcctggagccgggcgggtgagattgaagcagtctgtgttgggtaggctgcggtgtgggactgtgccgtcggggcgcagttccctctgtgctgtgagtaatcctcggccgcatttgcagctcccaggggattgtgcaacttcctctccagctgaggtgcagggggctgggtgagaaacagcagccgccggggaaatgaggaaactgagcccggccctggggctggggtgcggccctgggctccggcccctggaggagctgagcattccaggggcctccttccagggggctgccctctcgaaggtatgagagcacacgcgtgcatgtgtgtgagtgtgtgcatgtgtgtgagcatgtgtgtgaatgtgtgtccatgtgtgttagcctgtgtgcatctgtgtgagtgtatgtgcatgcgtgtggtgtctttggggaggtgggtgggtagggatgaggcccctcaggctgcactggcattgggatgtctttggggaggggtgggggtctctgagcatggccaaggctggggtgagggaaagaatggggaagaaggtggccaagctctggagtgcaggttggacagcgtgggaaatcaggagtcagccagagttgtgcttcagtttcctcatctctccaggcttatttcaagggtcgagtgagaaggtcatgggcaggatgggcttagcatgtcactggccaggccacagtgaatacccatttacattaggggctgggagcatatgctctacatccacctgcttgaatcctggccctgtcgttttgcagtttcatgatgctggcaagttatcctcctctgcttcctcatctgtaacatggagatgacagttatagtgcccaccttgtgagttctgaagagtaaaagactttactcacataaagtgctcagaatagagccagcctcccactaagtgcctgcacaggttaacacttcaccaggacatagcatgtttgtgtgcagatggcaaaaaactgcccagggctcctgacgatcatttttgatggtggaagtttgagctggaactgagattgatagtaagagctcatgtttacctggccttattccatgtcaggtactgtgcccagtgattcatctgtaccagccccttcaccctcagtcaccccatgagggggatgctgctatcattcccattttgcagatggggacatgtaggcccaggggctagagtgacttgctccagggcagctatatcagtgagggagaatggcagaatggtccactcagcccacaggtgggcccctcacccacacccctgccccttttctgggttccaatagaagtatgggagaggaggaggatggagggtctgctgggaggggtgtgagggctggccttgcagcctgtgggctctggccagggagccctttcttttctctgtgccatccccaattaagtaatcaaagtaacccacagctataaagagttaaattaatatagcgaatggagccaggtgcggtggctcacgcctgtaatcccagcactttgggaggccgaggtgggcgggtcccctgaggtcaggagtttgagaccagcctggccaacatggtgaaaccccgtccctactaaaatacaaaaaattagctgggcatggtggcatgtgcctgtaatcccagctacttgggtggctgaagcaggagaatcgcttgaacccaggaggcgaaggggttcaatgagcctacattgcaccactgcactccagcctgaacgacggagggagactctgccttaataataataataataatataaggaatggtttattagtagttggagttggaagagacttcctaggagagtgagctccctgccagggtgtagtcttgagagagcagttgaaggccactcatctgtgggcatgagggtgcagtggttctgaatctggcttcagattcacacaggcctggttttcagctctgtctgagccagttactgtttggcctcaggcctcagtttcaccacatttaaaatgggggtgatagcagttcctatctcctagggtgatggtgaggatgaaataagacaccatagtaaaatgcttagcacaggtctggcctggagtaagtgtctgacagatggatgccattattaggcgcctgttgtagagagggccacgcgccaggcagatagttgggctgcacagatacttttggagggaggtttttcaaattgtggatcagggccactaattggaccctaattcagccatgaaatcagtttggtgggtctccatgaatttttttttaatgaaaaagaagagactagaaaatattcaagtgtattgctcagtatcagtaagcattgttgtgtagaacatgtttcgtgtgtgtgtgtgtgtgtgtgtgtgtgtgtgtatgtgtgcctagtgtcaaataaagtatatttttctgtgagccatggtccaaaactttggtgccactgcattagagattctgtccctcctgtgccatgtttatagagcacctactgaatataaggcgcagcagcagtgctatggccagggtgcctgtcctcagcaaacctcatggtctgactggagaatcagggcccagttcttagcaaggtggttaccaagactgtgggtcagcagaggagggagcagagtggtcagagagggattcctgggtgatgaccctgtgtcaggtggggacgatgagagggggtgatgcctggggtgaatggttggcctgggtcctgggggctggggctgggggctggagagctacctggaaaggtgggaggctgccgtcagtggaaggctgcagggtcaggcctggcaggagctgcccatgcttgctggagcagggggttgggtggaggttggggtctcaggattattcaagaacattacatttattgtgtactttatttctatgattattacattgtaatatatgatggaataattatatatgggtgagggctgtgccagtctccctggctggggtggggtggggtagagaaggactcggccttactgatgccccctcccccagcttgcaggatctgtagtcactatgggtgagacccacgtgggcctggcctgcaacctggctctcagcttgagccctatccagaagccagaagacttcccactatttagatccctgccctgggaagtgcttggcctagtcaggacctcagtttctccatctgtaaaggaggcacactgtctcctgagcggccagcctcctgggtggtgatgcccatcttgtgacctattgtggatgaaccggctgcaggaagtatgaagagctctgggtgggttatgattgtcgtctttaaggctgggaggactggggaaggtcatgaggacatcagctgcctgtctggagagcccctggcctccctaccctgtgacctagggcagtgggaggagaagcctgtgacccatggcaggctggggatatccccagctttgagtgcaggcagcccagtaggggcctcagatgatgagacccagatctggcctaaatctgggaacccccaacctctaaagctccactcttcattgagtaccccaggagtcccagcttaaggggctgtggtggcaggtggagaggcagtaacctaggactgattggcaggggccagttttcaggaggctgtgggtggcttccaacccactgagcacagagcccagaggctcaggcatgagctcccacagtagaatgtggtgtttaatgacaggtcacatatattggcactcctgtgtgccagcgctgtgctaagcacttttatatatttgcaaactttatacaacaaccgaatgcaggtctttttattatcccattttacagggataataaaatgggcctcaggaagctgaggcccagagaggttaaatctctcacccaaggttacctagctagtaaatgggagagctggcctgagggcctgagttctggattcgggatactagagttcaaatctgggtagtgccactttctagctgtgggtcctcaaacagtgactgaatctctctgaccattggtttcttcctctgtgccttcctcaaagggttgttgtgagagctatgtgagataaagactgagaagtacatagtacacaataagggccgaataaatgggacctgccacatgacctgcatgccagtaactgccgtgtgaccctgggccgggtgtctggcctcctaggtctcagtctcctcagttgtgtgacacagggcactgaccccttccttgctcctctcaatagggttgttgaagatgttggatgggtcctgaaggagaccttcagtgaaatagaagtggtagaccagcggtccccaacctttttggcaccagggactggtttcgtggaagacagtttttccatggatggatggcaggggagggtttcaggatcattcaagagcattacatttattgtgcactttatttctattattattacattgtaatatatgatgaaataattatacaactcaccataatgtacaattggtgggagccctgagcttgttttcctgccactagacggtcccatctgggggtgatgggagacagtgacaggtcatcaggcattagattctcctaaggagcatgcaacctagatccctcacatgcacaatgcacaatagggtttgcactcctataagaatccagtgccactgctgatctgacaggaggtggagctcaggtggtaatgtgagcaatggggagtggctgcaaatatagatgaagcttcgctcacctgcctgcctgcccaccactcacctcctgctgtgtggtctggttcctaaccggccatggattagtatgggtctgtggcctggggactggggacccctgtgctagactacttgaatctccagagctgtcaggaattctttagggtttgcagccaaccgcaggtcccaacggattgtgtttgggcctgcttcaggctttcatgtttcctgttggcccctgcaggcatttgagttggtggctccaaatctattccagggtttcccaagatgttttctgtggaaaggtttagaggtcaagcaggcacaggagactgtaagtcaaagaaaaaaaaaaaaagaaaaataggggttgggggaatggggagatgatagtcaaagggtacaaaacctcaaacagggggcataagttttttccttgagatgtattgtacggcatggtgaatatagtaaatagtaattattgtatatttcaaaatcatttaagagttaattttaaatgttctaggctgggtgtggtggctcatgcttgtaataccaacactttgggagactgaggcgggagacttcagcctaggagttcaagaccagcctgggcaacatggtgaaacctgttactacaaacaaaaaaatacaaaaattatccgggtgtgatgatgcatgcctgtagtcccagctatgggagaggctgaggtgggacgatcaattgagcctgggaggttgaggctgcagtgcgctgtgatcattccactgcactctagcctgggtgacagagcgagaccctgtctccaaaaacaaacaaacaaacaaaataaaacaacaaaaaaaaacacccccaaaattcaaatgttcttaccacccaaaatgacaagtatttgaggtgatgtatatgttaattaacttgatttaattattccacatggtgctcataaatcatagcatcaccttgtactccataaatatatacaactacacaaaaccccaaatggttttctttgctgtagggcttgtcagagcctgtgatatgctaatttttgttgtacatctccaatatgtggtcatgatatatactctagggtatctcaaaggcctggtgtttaaagccccattttccagatagagaaactaagacctggaatgaaacttaggaagggattttcccaggttatgcagttacctgttacagagctagggccagactccttgctcctgactccatggccagtgctctgcccaggatacctcttcctcttccttcttcctttgtcctcagagaagtgttgtgtgtgctgctgtttcctcctgagagctccttacctttttctggccccctcctgcttgctcccagcattagagggtgtctgtttccttctgggcattgctatgagatggagctatgcctagtttatggctgctgggagatccttctcagactaatagatggcaataaggcttcatcccagctgcagggcccctagcaagttaattccatttcctgagcctcattctcctcagttgtgtaatgaaactcatcatcttgtctgtcttctggagtttttgagaagttcagctctgatatcatacatgaacgtgctctactaattttcaatccatatgcagatatccatgagtctgacagttcttataatttctgggggcagtgaggacatgggaaaaggaggccctggctgtgggagctagcatggttggggccctaaagttctgatcccctcccccggccacagttgatgtctgcttttcagtgtactgctgcctctctctgctctcagttcccctgaacatgtctgaagtgggccggtctagctgactcgagggacccatgtcacaggtgagacatgaaatgaagcacgattttcgagctggggggccctattttcctagtttcctgctgggagttggtgttagagtggggaaacaactcaagtgacttggtgcctcagtacagctctgcctggagcagggagttcccaccagcttctgcccagtcctttgatgcccccacccttcatggagggtggccggtcacctggcttgtgatgtagggtgcacgcgggcatgccgatgcctccatcaacacagcagttaggttcgaaatgctccaggtcctctgctagctgtgggggactctgagtgatgggccagggggtaggccaggctgggttgtgaggtgggaggaggtggtggctccctgtcagagagtgtcctctcctggagggctgtttgcccaagttattcttagcacagactcattatagagtctatttttagccctgtttctaagtgttgccaacatctggtgcagccagcactaaagggggtgggggtggcaggggctactcctttggacatttctggggactggagcctctggcaggagagcaaggacagaatcttctacttcctgcacctgccacagcttgaagcttggcatgcagtaggtgtcctattcatgcttgtgcgttgattgctctcccaggatctcatccttccagctctagctcctgtgagtgggtgggtggtggggatggtgttaccacagctggagaggatgagctgaaggtgctcatcagataggtttcccacatccacccctcaggggtccagttggcctcagacccctgcagagaggcctcagaggagggaggcaagccccaaactatggtgcttgtgacagctaccgctgaaggaggagccagcagacattatagggagggggtgtaccactggggtgagactgcctggggttgaatcctagctcggctctttcctagctgtgtaaacttgggcaactcatcaacctctgtatgcctcagtttcctcctctgtgagatggagatgggagtgtagtgttgtgaggattaagtaagataatactgtatgaactgcctaaatagaaagtgctgtataatagagaggtggtggtattagtagcagtggtagtgctatattactgagaagctccgtatgtgacatcctgttggggtgagttgggtaggagacctctcagcttttctttgagtgagatgaggcttgcagtggggctcagaggaagttgttatagccaggcaccacgacagtggtgatgtctgcaaggctgcagtgggggtcaagagctatgtgctgggttggaatctgggctttgccactcacaggttgggtgaccttggatgagtcacttaatcttcctgaacgcccacttctttatatacaagaaagaaatgataatacctgggtcataggcgtgatgtacgtggagctttttgccctgtactgggagcatgggaggacctgaatccgtgagactttttttttttttttcttaattgagacagattctcgctctgtcgcccaggctggagtgcagtagcgtgatctcggctcactgcaagctccgcctcctgggttcaagcgattctcctgcctcagtctcccgagtagctgggattacaggcatccgccaccacacccggctaatttttgtaattttagtagagatggggtttcaccatgttggtcaagctggtctcgaactcccgacctcaggtgatccacccgcctcagcctcccaaagtgctaggatgacaggtgtcagccactgcgcccggctcatgagacttttttgggagtgggggtgttgctgtgtccctttcccatgtggaggatggggtcctgttgtcttgagagtcttgggaaacagcttggcctggaagttgggagggccagggctgtggtcctagctctccctaagctgtgtggtccgcacatactccctgcttcctccagacttccgcaacatggagaggccagagaaaactgtggttttcagattcttcgtcacagtcccagaaggtgccttgggtactatctgggagcgtgggggaggccctggttggaggccaggtggggtggtcctcccactccccatgctgctctcctgctcctcacactgactcctggtgctccatggagcggcttcatcctcatgttttacatatcaagggtccaggccgactttgtctgaaaatgggagtgctgctgctaacatcaacctgggactttctggtaggtgactcccaggctccttgtcgtctgacattttgtgccctctgacttggcatggactcccggaggagtgccaacctgtatatcagggtctggagtgctgtggtcactggattccctgagggctggagtcccttggggtgtggagggcagaggaggctgcctccagggcctctctggggccgggccgccactcaagggtagagcttccagcgctgccccagtctccccgcaccctcgggatgggggtcccctgaagacaatagtccgtctcagaagcagtgtctcacaggagggaggggtgatatgggcagaaaggccctgccagagtgctggcatgtagtaagtgctcaagaaatatttgaaatgaatgaatggaatgataccatcaaggccgcacctctgatctggtgatgaattttccctcgcctcccttttcttccttctcgcccctgctccctcttccccatcctctgctttgtctgactagccataagctaccccagcctgggttccagattcagccttattcataatctagaacaaagacacttccccaatgtgagttacagtttgttcatctggaaaacaaacacgatgggctcaggttccgaaggccctttggttctcaccgtctcttttctcagggcatgggagtgatttctcagagtaggggtggtagaagcacatgcatacacacacgcacacacacagacacgcacgcacatgcacgcacatgcatgcacatgcacacacacgcacacatgcacacgcatgcacatgcacacacacgcacacatgcacacgcacacacacacacacgtgcacacacacacgcacacacaggactcagtgcagtggtcttggctgggaaaggtccttgccctctgaccaggaaggagccctcggagctgaggtgctcccagactcagcactgtttggggcctacaggatgtggtgtggcccactctagctcaggctggggggttcctgtgggtgtcaggggatgggtggccatccaactgtgtccactgggctgggctgccacagtgactttgtgtatgaccttcagggagtgtgggtggcatgcatcaggacgcctatctgtgtcgttatgactgggcgtgagggagggtgccacatgtctagccagccagggagcagggccagttagctcctgttcctgggtgcctcctggctctggggagaatagaaaatgattcatgcaaaggggccctccctgttttggccacagcctgaggagtaaggtggcctggctgtctgcctttccctgctgcccaccaggtgcctgagttctcccctccttcctcgcctcagaccgcgtttctccctgggggtaggtggctgcccttccctgcagcctgacaccctctcagagacaattagaggagtaggctgcccatgcctacagctataagagtgagtcagcgtagggaccggaggggatcaagtctctctgaatcctgcggccagacggtccctgcaccagaagaagtggcccagtgaggcctgggctgggatgctgtggtcagcactgataccagctgagtggctttccagcttgagaagacctgccagggacaggagaggacaagctccacctgcccaccacccgcctcgccatcctggctgcagccagctggtgactcattctcctggggagtgagccagctcctctcctggggtaccccagcaccctggtgcaggctgggtggccaggagtcctgggtgcctcagaaaacctgtgctgagcccagggccctggtaagctggggagggaggactgaggccctctgtatggggtgggggtcgcagccagacttctcttgctccttctcctggcccccgcagacttcaccctccctctggccaaagaggaggctgcaaccccagattacgtaataggtccaaaatgcctcgcaagcgagcagcccagccagtggctagactcaggagtccccatttcccagtacctgccaccagagcaagttcccattcccttcctaggccgggtgggggagtgggtggtgcttgctcacccctggaaagagctgtgctgcctgggagggggtggggaggctttctccagagacatgaattcttggcctgaccccagatgccagcctgcctgcccagctccactccagagtaacgctgggtgcacacacagccccattgtgtgcctgggccccgtgcctgcccagggcctggcaccggctctatcaacagcagtggctccgtcagctcctcagcagcccctgccagtgcttgagcccttgggcccctggtgaggaggaagagggaggactagtgattaagggtatgagtcctgggtggggtaccaggaccttttggatactatcaactatgagagacaagagcagggagacttagtcctgttctccgaggaggaaactgaggccctgagaggcttcagtaacttgcccaaggcctcatggctagtgagaagcagagccggggttggagcccagagctgtggctgagccccttactggtctcgtcacccaatcccagaccaggactcaggaaaaggcacggtgccctctttccacagccccactttggggagcctctttctcgaaaatatatgtccccagggtagaagaggaccctgagacggtaggatctggagtcctgtaggaccctggaatggtaggatttggagtcctgtgtgcttgtgagaaacatgggggttcattttcaaggatggtgctggtggccagacaggcagagcaggtttccagagctggaggacaggctctgtgcctcagtttccctgctctacctgcactgtacatccactgtgccttctaggaggggatagaaatattgaggtgaggtatggccggggctggggactggacccccactgctgagctctataggctgtgcgaagcccccttcaccaacccagaaccccactcaatgcctcatgatggttctattctaagttgggtctgagccatccacctcctcagctttcccagcctgaagaggcctctgagctgggtgagcctgccaagggggcagcccagctcggtgccatgagggccctgcctctgccgcaggcccatgttcccccacccccctgccaaggtgagggtgcccagacatgacccttttggggcctgccctgtgttttactttccaggctaggcttattcactcagagaggcttgaccccctggggcttgggggagctgaagggctcctcccttctccaacagcccacccttttgttcccctgtctgtcttgggcatgaagcctggctccctccttctacaccacctcagcgctcttagcaaagggacagggaattctgcagtgactgcaggattgtgaaatgccagggctggaccttggggacaggcagggaagagagatgctggaaggggacaccgagactgtgtcctttcataccccacctgggaggccagtctcctccattctgctggcgctcattttcctgcatgtataccattcccacccaccagtcagcacaccttcacctaaggccacagcggtggggacgttgagcccagagggccatgtccgagtgtcctctacctggagcctgtgtgggagaggaggaaaccaagggacagccctcaaggagttcacactgcagctgagaaaaccagagaggtgacttctttgtacctgtttctcatttgtaaaatgagtacagtagtatttcctacttcctagtgttattgggaaggccaaatgaattaatacatgataaagccaagggcctggcactggctctatcacggctttagaagccatccttgatagatggttttacaactcaatacaagttttagtattatccatagtggtagaagaaatacaatatatgctatcaggtgatgatgttttttccaagctggattgtaaaaaccatagggcaagggctgtcttattcatccttgtattcctgtttcagacacagaaccaggcttggaacagagtaagtaattgtgcccaaatggtgattagaggtgggtgaagtcagggtgtgctgtcgggaggaggaggagaccctggagcagggcttccagagaggaggagaagttggataatctgtgggagaggaactgggggagggtctgggggcccagattgggttggcgtgagagagcaaggaggtccccttggctgcacccagtgtttgtttagggagagggatcctgcatgctttggaggcccaactagagcgcttggactttatctggtaggtagtggagagcaattgggggtgatggagcaggaaaaaaatggtctttctatgttgctccatctgtttcattttgtttttgctcccttgttctctgaggaatattttctttcttcatttctccaaagacaataaatcctctctgctcttcagcctcttctttctgatccgtagttacccctgtcccaaatccctgcattctgttcttggcttcttctccttggccatcctggcctgttgtccctgctgtgcttttacctggcttccccttcctttatctggtccctgacccaccttctctggaataggagttgggtggagttggacttgctgagagatgggtactggcatggcatgaccacatggtgggagctggtatgaaggcaactgagccaggaggatatcctctattctgatgtaactctatacatccttcagggaatgactctgccccagttatgtggctaaggcccattagaaggatcttactttatatttgtcaacctgtttaatgaaaatgtagatttccaaaatagataaattagggagtgatggaatcttattttctcgtttataaatttagtggaaagatcagcactttgggaggctgaggcaggagaatcgcttgaggccaggagttcaagactagcctgggcaacataatgagacccccatctctacaaaaaataaacaaattagtgggggcatagtggcacacacttgtggtctcaactacttgggaggctgaggtgggaggatcgtttgagcctggaagggtgaagctgcagtgagatgtggttgcgccactgcactccagcctggatgacagagtgagaccctgtctcaaaaataaaaataaaaaataaatttaatggaaagggatattgaaccagatgggaacgatgcagacaactagtgcctttttcatctccttttaaacatccatccatctatccatgcatacatctatccattatatccaccttttcatccattatatccatccatccatccatccacccaccattatatccaccttttcatctgtccacccgtccatttaggcatgcatccattatatccatccatccatccatccatccatccatccatccatccaccaaccattatatctactttttcatgcatccacccatccatttatgcatgcatccattatgtccatccatccattatatacatgcatccatctaatatttattgagcacctatcctgtgccaggtactgcattagatactttatgtttaatccttacagaaattctccagggtggatattgtcctaattttacacatgaggatactgcgaccctgggaatttaagtaagttgatgaaggtcacacagctagaaagtgacagatctgggattcagcttgactaggttcaaaacacacactcttagtgtttaatcaaatggcctctgttggtgtcaccagtgcctagttctaagtgcggaacataatagctgtgttattgaatgaacaggcatgccaaggttctggaatgctggagctctatagctctatcctaggagcagcctgggggcagaaggcaatgctgggcttctagtcctactggcatttgctaccagcaacctaatgttgccatcactacccccggtatggaggtttcttctccatgcaacttgcaactctggcaagtcctgttttcttctctctaccatcccagctctccttctgagggcagtcttaaccttccgccaagtggggaagttccaagtacacatttggccattgcatccagcttgaccagtctccccagtgactggtcttcccctagctcacacctgcctctctccttccctgtagggtgggctagcttgcattactctgacccttttattggcccctatttctaagctttagagttagctattcagtatcaggtcataactgcctcctcagggcccattgggtgaggcaaggatatgagtgcaaacagtttatttgggaggctcccccagggagcaccagtggtagagtaggattcatgagacaggaaggcaaggaagctgataaaatgtgtgtgaaggagcaaggtgactgtgggcatctgaggctcactgccattggaggcctctgcagaatatgctttagagttccccagtcaagtgataggtgtctttggctaagaggtggtggggaagggagggagctaacttcattggttcaggcaccaattcaggtgctggcacctggaaatcttcaggtgggcacttttgacatcgtgagggcccagagcatgtggctggggccctgatagcttttgccacctcatcaagcccagccctgggggtctgccaagccctcttcccacatctccctttctatgtccaagaggcttccccaggcagacccttccccagtcgccagttccacgctcactgtgtttcacagatacttagggagcatctacaaggtgccatggacaaaaagaggaagctgtcaggatgcctccaggcactcacagcagaggaaggtgacctgtgcggctgaggcgcctgccatgtggcagacactggctcgcccatcccaggccttgtgcaaggccagcaatgcccctgtggcatggcatcctctcctagagggaggtacagacgtgctgagcgccacagagcctagagccgtcttccacttccctcccaactctagcatcctgaggctgtgattgtagtggtttttctgacttccttttcctttctgtcactgcgcctgcctcttcccctagccccatggccgccacgtggctgccttttagtcagccgggaactgagcctcctagtagcctccctctgtgtctctgtcaggaacaggatacaattcagggacattttggtgggggagtaatttcgtgcggtggcatacctgtttgccctggcacaggctctgtcatgtctgcttcttggagaggagccttcttcccctgggctccacctgttcccatccccagccctcccagcttcaggctacaggtctcgcaccctatagggctgagggaatgggaagaattaaaagagggaagtggcgtgtaggtaaggccttctggggtgggggctaggggaagggcaggagatggggatggggcaggggctgggcctggcggtgtgcttcccctggagacgtggtcctgggccacaggcaggcacgccaagtcacagcccctctgacttcttcctccagccaccagccccagcctttccccttgatgtttcatttccaaaccaggtctgctctgggtgcgtgtgctggggtggcaggggtaggagtgtgtctgcctgtgccattccctaccctgtgggcaggcccagccatggcagcccgagtctatcatctccccactccgccacttggataggaaggtggctgcactcactccaggcaggtgtgttgttgggaggagaacagagaggattggttcaggcattggaagatggggtttatgtctcaggtttgagctcaagcatcttgggtccagggagaaggtgtaaggcagctgctgcctgagtctcaactctatgggggaaagcagagcagctctgagccttggggctgggcaggcaggagggcatggagcccagatgagtggaagagaatgatgatgaaagagcagacttcccgatgctcctcccccgaccccatcacatgcagagttcaacacaccccactcctcgctctgtcctggtaaaggcagagtgcttcttatggtgtttaaggacaggaaaagggctggaagtgtgtgtgtgtgaattttgcttcctgttcctttcatacctgggtgtgggcggggggagatgggggcaggttgggggacagctcactcactccatccggtgggtgggtgacttggtgggctgttggaatgttgccataggaggccatttctcctctatggggggagatggtggcttccaggtcaggtctcctcctctggctccctgacagagatggggtgggaatgccagccggagcgcacatggacagggcaggagcaaagctgaattctgggtctagggcagctgacagcatttgggaatcctggggtgggcccctgttagctcttcccagaaccccaactcttgggcaggatgggggtgggggggtgtaagggtggttgggggtgggtgtaggtgtgtgttgtgaggggagaagagcccccgctgagttcctgggccactgcctgtgctgtctagtggcctctgccagcactggctgccccgtcctgcccccaccaggcgtgactcagatcgaaagcagaagctgccagacactgcacagggtgaagtgaggcagaaccaactctgctattttggaacctggttaattcccccttctgccccccacctccctgctctcagggctcccatcccctccagctgtctggcacttcagcttcctcaaggggacagttggggcaggccttggtttcccctggcatggacgtggaaggccatgctgaggcccctgtccttgctaggcccctctccctggccagaggtgctggattctggggacctgcgctctggggttggggaggaagagcgccctctcctggtgggaactcgtgggcagggcggccctggcgagatgacggtcaccaggcctggcacccactctcccccgcccatctttggccgctctcaggccagctgtcagctgcctctcccaggggtgtgagctgacgagagcttcaggtgggagcctctcccggcagtgaatctgagggttgggagggatttccggacccagagggaagatattttggggccgagggcctttccagaacccatgaaatcacacaccctgctgcgaccagactgaccctccctagttgatggttcttttttggacatcctaggcctgcttgggattctggccccatgatttagggtttctttggagcccatctgagcctggggggccctgtggtggtggaagaggtccagcctgcggtggtgaaagaggtcagtggatgtgtgtttctgagctgaaaatgggtgtggagttgagagctgtcacctcttcatggacagggtggatgagggtccctggcccttcagaagctgtgtcgttgggaagagggtggactttacagctgtcccgtgtgagtgtacatgggagtgggcacaggccttgcggtatggctgcctctcagggaaccctgaagtcagagctccactctgctgattaccccccagcaacctggtgaggaggatggtggtatactgggggagaggggagtcagcaggcaggtgaccaattaaaatttgggtccttgccaacctcaggtgggcaggacgtaggtttctcattgttcagatggagctggggtttaggcaggtgggaggcagaggcagagccgtgtggaggagagagtgggctcctagacctgctgtgggagcctccacactcccaggcctcctgcggagcacacaggcccaggcacacactgtcccaaaggttgtctgctctcttctggagctgctctttgggcaggcaggcaagtcctggtgcagtgtgtgtgtactggtgagtgtgtatgtgtggacagtggcttatgtgtgagaggtggtgtttgcatgaatgggtgtgtctcatatggtctgtctgggttgcttttccactggtaaccatctcggctttgaagctgtttccccatagacctggattgttttcccctcctgcacgggccagagccccagcacccagtgagccagagcccacctgcagccttgcattctggcctccaccttggctcttgagcctgagaatcaggctgcttaatttccctgtggggctcagaagggccctgcctgtcctttaaaatagctctgtgcttccaccaggggcctgtgcttccctgctgtgttctcccacccgccaccaattttcatgcttggaaccagggaactaagtccccagaaggcaacaagtaaagtgtctttaatgtgcccacacatctcccagggcagtttgttaaaatgcagattctgactcagtgggtctgggcagggcctgagagcctgtttctaaccagcaaacagggcgtgcaatgccttaagaggccctctcccatctaaggccctcactgtccagccagatggctggtggtcacccaggcagggagctagtactcacagaccacctccaaggtgctaggcacatcacatatttcagttccatttaccccctcactgactctgaggaaggtggcattaccgccatccttttgtacagatggggaaactgaggctctgagcggttaagcacctgcccccagtcacaaagctgacaaatggcaaagccagatttgaattctggtctgtcagggtccagagcatattcgtgatccactaagcccggctgtcttccagagggcggactcaggacagatgacgtggtggaggtggaggcggggtcagaggctctgttggggaactgcaagggtagtcctgggtggttttggatggaaaggatatcttgaggggaaggagggttgaatgggagtagttctagaggaaacaagagctgaggggaggctggtgtcctgcacccacctgcttagccaagagccccttcactgatgggctcaagaccccctacctgcctcctctggcactttccagacagactctccacaggggcacccagcacactgtggggagaccaggtgccccagttctgctacctaccaactgtgtgacctcgggcaagttttcagcctctctgtgactcagttgccccctctgtaaaacaggggatatgtgaacgcctccatcatggtggatggagctgtggtgaggattaaatcagtaacacatatcaatgcagaacagtgcctggtgcagagtacgcactcagtgtgcatagtactaatgcctcttggtttgcacctgagagaaaacaggccaccttctgtgaattcaatgcaatcgtccatgctcatagatgtttttgtcctttcttcctccattcccctctccactgtcttcttttgtttaggaagacctggctacttcagttgtacagtggttgtttccaaagtactcagaagcaggtttgactcttaaaaacaaagccagggaatcgttctttacagcagaccagccacagggaggctggggaggctgaggcagcagatgacggaggaggagcagccccaggagcaggggcaggagccaggcactggcggggttggagtgctctgaggactttgggcctggggcagggagggctgaggcgggggtggcttaggcactgggaccctgagagccattattagaactcaggacagatgcagggggtcctgggcctgcggctgggtttgggaccaggagccagaagctgctctgcatgcccgctgtgtgcccagctgtggtcgttgtgcctgcctcttctcacacttggagtcaacgagccttccctgccctaagcagctggcagctagcagaagatgctggagtgtggattcttttctcctgaggagatggaaaagcaaaggctggatcctaaggctgccatggctctggagagggagctccccaatgctggggcagccagcacatgggacagtgaaaccggtgcctggcccttcccctcccagcctgcaggccgattccaccggaccagccctccacacatccatgctgccagaaccatcagcacaccaggcaggcggcagggagcctatgagaggtcccacacagcctctgcatgttatttgtgagggtcttgagtcccggagagggggacaggacttgcccaaggtcacgcagctgggtggtgcataccgatgcaggtcttccagtcccactctggccttaggtaggcttttgtgctgggcctgtggaggctgagagagtccttgcaaaacagactcatctcagagagtcagagcttgtgggccccaagtccacaatggcatgaactgaccaatcagatagagtcttaggcctcaccttccctggggagggacctcattgaccacataggctgacgtagcatccatgaaaactttagctgatctttcctgcaggggacatgagcaggttcgctggggtgggccagagggtacttggggcaagtggagtttcagtctctaaacccctctatcgccctcaggcccctttcctgtcctaggagccatctatggctgagtcccactcctcccccaacccttaccaccctcacctcactatggtctggtgccagatctctgatccctggaatcacatttctgtctgaccaactcatatagcctccccttccgccccctccgacccaggctctcaggcgggctaaccgtctcagcgagattcagatttgtcaccctctgagcctcctgggcatggatgtcttggctatttagcaaaaagcatctgtgggtggggtctgggagggctgaggagcatgcaggcctctctggggaacctctgtaggattcgctgagggtgacatgggatgaggggggcgcaggactgggagtgcaggggacaacaagccatctacatggggagacctttcctatgggccccaggttacctctcctgggctggagctgctggtggtcacatacctgagagacctgggcttgaacccccacttcactgtgctcttgcagtgtgacttctgacaagctgcttaatctttcttttttttttttttttgagacggagccttgctctgtcgcccaggctggagtgcagtggtgcgatctcagctcattacaacctctgcctcctgagttcaagccattctcctgcctcagcctcccaagtagctgggactacaggcatgtgccaccgcgcctggctaatttttgtatttttagtagagacagggtttcaccatgttggccaggctggtctcgaactcctgacctcaagtgatccacctgcctcagcctcccaaagtgctgggattacaggcatgagccactgcgcctggcctacttaacctttctgagtctcggtttcctatcctgctgtgttgctgtttatcccatcaagtgtttgtgtggatgaatgtgattgaacagaggccccttgcgcagtgcaatgtgggagggactcggagcgtttgccaagtgggtgataactgagtgtgtgggggtcactggaccagcagcccttgagggccgtgcatctctttctggaaagtctgatgggtgggatggtgtggaggttctgaagaagaaaagtgatttctctgaaacttccttgtagctgaggagactggtaggtggcaaggaaacaactagagaacaaagcatggcagacacaggcaggaggctggagtagatggagtgcccaggaggcgggtgcaggggcacaaggggtgggggttcagtcccaccactccccaacccaggagaaaggtggctgcctgctaaggggatccttagactgcaagcggcagctgagggatgcggctacacgtgtgtgcacatggacatgtgtgcatgtgtgcgtgcatgtgtgtgagagagaagagagaaagagaagcagacacggagagacagagcgtccacatgggtggctgggccggtccgtgcatatcacaggggtggaatccttttctagtttctcctttcatgttcctattagctacatgtccctcgtccctgtcctgccatgcccagtggcagtcgtctttgccagggcccagctggtcccagtgggacaggacagggcgactccctggtctgcaatggcctttgaagctgctccccctgttgtcccgggccaacagtctgaccagccaggaggcgccagttcccaccctttcctgtgggatgtgagctgaaacttggggctgatgggcctgagctgtgggaacaggaggccattaagtgggccaggagcttgtgtgaccgcccttcctctctcctctccttcctttccctcctccccacctcctgctggtgctcagagatttaaaaacaagcccctgactgccccctgcccccagccctgcagtctcccgcagcgcattcctgcagggggtctgggagaggcggtgcagaacgcatcctggggtcttgctctgctgccactgaagcgcattgtgcagatctcccttttggagcctctgcttcctcatgtaattcattctttgtttcttgatctttttttttttttttttttgagacggagtctcgctctgtcgcccaggctggagtgcagtggcgagatctcggctcactgcaagctccgcctcccgggttcacgccattctcctgcctcagcctcttgagtagctgggactacaggcgcccgccaccatgcccggctaattttttgtatttttagtagagacggggtttcaccgtgttagccaggatggtctccatctcttgaccttgtgatccgcccgcctcagcctcccaaagtgctgggattacaggcgtgagccaccgcgcccagcctcttttgtttcttgatctttattcatcacaaataggggttggtcagtcctcagtaagtgtccccacttggcagagcggttccatttcatgaaatatactgaagaccacatcctgcatgacagcctttgtgtgctgttggagaccatagcactcagccatggtgatgcaggacagggtcccggagggaacctgccagggtgatggtgacattctccatcttgatctaaacagtgattatacaaggccacacacctgtaaaaattcattgagctgtacactacaaatctatgcattttgctaggataagttacacttcactaaaagggaaaaagaccaaaacatggcattaaaactgttaaaagcatgtgcgtgtcccattgacctcatttctgcttctgatatcaaggacctttcaatcaaacagtgcacacttaccaggtgtcctgggtttgctatgtttctgtatcggaagttgccagctaatataataaaaggctatattatgaagtatctccagtgtgccaggaactgtggtaaacactccgactacttatcccttagaacccaaaggagtggacattgttattgctcacctgcctctctcatctcctgcagtgaatgacatgatatacaagctctggaaaagaaaatcttaaaagacccaaggcttttggagaggaaacagagggctcctggtaataggaaaagctggcctgaggccttcctgcccctatctagtaaggagagactgaagctggggttaccactaggctgctctgccccagtctgggctttcagatggtgtgtatgtgtgtatgtgtgaatgaatgggtgaatggatgggacactttccccaaaggaacttatgcagggatgcccccagtgggcctggacggagcaacactgaacagtgaccagaatggtgacacctcccctctgcccacaaattcacacctgcaagacaacttacacacccagcctcctcacttagagcacaactgctatgaggtagacgtggccccagctggcaagccctgcttgactgatggggagactgaggccatacccagacaattgagtccagcccaaggctaagacttgaacccaagcacttggcctttcccacagcatcatatgggcaggactgctggctcctgggagtcgtaggatacctttccacccctcactctgtttgggtctgggccatctgatgccccctccccaggccctacagtgactcatgaccacctccgtaatgtggaatggctttgtccatgaggattatgtgatgtccttgttctgtttcctagttcatcaggacttcctctgctgcctcctctgccagagggggctgagaaaaatcccaagtttggtatttttttctctcttcccttccctaggctgaaaggttcctaggaggccacaaagcccttcctttgcctccaggaatctcgaacctgttcaggaagcttttgtttagcggtcagtttctttccccaggactgaccgggcagctcccccacgactgagagtgtaacagactgaatcagaagaaaacttcttccgaccacagaggtgcagagcgtcatcaatggcttaaacaggcctcccagcctctgggcttgcacactttgttgtttcagccgccagacatatgtttttctgggaatacaggaaattatctctgctctttgaggaagggtagaatttttttttctgcctgtgtttggggattccagactgttccatcatcccggacaccctctggctcctgggctggatgaacgagatcagccgctgaaactctttgatcgcagggaggcttcttcagtgagaatttctaaaacaaaacgtggccgccctcaccctgaatgcaggactgaggccaaactcccagccccagggttggggcggtgcagccagactgccagggtccagccttgccactcattagctctgtgaccttcagcaagtgaccacctctctgggcctgtgtttcctcattccttgaatggggacaataatggtacccacgtcactcatatcatgaaataattatgataattacataaggtgctttgaacagtacctagcacacagtaagcattctatgagcattagctgttagcataaaatatttttttttcaattagaaagatatacatcttcattctagagaaagaataacattccaaaaggcttttaaaaccacacaaaatacttatggttacatcatccaaagaagtcagtaataattttgtatatttcctcccaagaggtttttctatacatatttttacattgtgatgatcagattttatatacaatttccccctacatcctacattttgtcacctgacatatcctcatgttatttattgtaagtatagcagtccatcaggagggacacaccgtaatttatttaactatcctataactggacattgaggttagttttgacttttttccatataatgtgaagtgcatctttatgcacaacatccttttctgcatctatgattacttccttggactggtgaatatttttcaaggctttgacatatattgccaaattgcttttccaaagaggttgtaccaaggtatgctctggcagttgtgttgaaggtgcctggtaccaaaggcattttaaagtcatagacacacttggggaagggggggggtttggagaaggggtggtgttggtgaaggtagtttccctaactcttcttttaaactatttaacgtctgccctcattctttttttttttttttttttgagatggagtttcactcttgttgcccaggctggagtgcaatggtgtgatctcagttcactgcaacctctgcctcccgggttcaagcaattctcctgcctcagcctcccaagcagctgggcctacaggcatgtgccaccacacctggctaatttttgtatttttagtagagacagggtttcaccgtgttgcccaggctggtcttgaactcctgacctcaagtgatctggctgcctcggcctgccaaagtgctgggattacaggcgtgagccaccatgccaggctggtctgccctcattcttatgtgattttaaaatgagaatacaacacacatacagaaaattataagttgtaagggagcagctgtacaaattattgtaaatatgacactctcatggcaccaacacccatatcaaattacaaaactttcctaatcctcttacccaccaagccatcttgtgtcccctcccagacactcccccaagggtaattaggatcctgagttctaacatagtagattaatgttgcgtttttttgaactcatatacgcagagcatgctgtatacacttttgtgccttggttctttcgttaacattatgtctgcgagagtcatctatgtcatgtgtaacaacagtgcatttgctgtcattgctttgtagcatttgattgtatggatgtaccaccacttcaatttattttatttatttattttttttgagatggagtctcactctgtcacccaggctagagtgcagtggcatgatctcggctcactgcaacctctgcctcccgggttcaagcgattcttctgtctcagcctcccgagtagctgggactacaggtgcacaccaccacgcccggctaatttttgtattttttaatagagatggggtttcaccacgttggccaggctggcttcgaactcctgacctcaagtgatctgcccgcctcagcctcccaaagtgctgggattacaggtgtgaaccaccatgcctggcccaccacttctttatctatctttctttagtggacatttgggtggtttccagttttggttcctatacacgcaaacattctagtatatgtgctttggtgaacacgtggatgcttttctggtgggcatgcataggagggggtccatgggtcatggagtgtgttttcagcttcctgctccaagttttaaaggatcatttagagggcagaaaaatccccaaggcagttcaggcctcacaagccactgaatggactggcgtcagctgacaatagtttgagggcactgcatgaagatggtactcccctcagaagcccttgtctggggctgtggtagaaactgagtggggccctggccctccagctccaaatgcttggtggctgctggccctggctctgtgcctctgctggccactcggtgtcctcacccagggaccgcggctggcctaatgaccactgcaccgagcagggcagggcttgggccagcccaggtggagctggggggattccttccccttggcgacccacctttggacatgactggaagccctggaagcaggttgggcccccccataaacccccagaagctgctgtgcttcctttctcctgttaacagaatcacacaagtcgcacatattcccactgtaagagctgagtgcttctccagtggaacgaagaactataaaaatccctctttatccctccccctccattgccccttcccactcccctccccagcggtaacaactctgaacagtttggggtgctgggagagcccagaatagtagttaaagagtgggggctgtgagccagcctgcctggatcaaatctccattctgctacttaatcagctgtgtaaccttgagtgagttccttcacctctctgtgcctctgtttcctccaggaaaaatggggataatactagtactcagctcattgggttgttgggaagaaaaaacagaattaacattaggaaaagcacattgaccagccctgacccatggcaatcattcacgaagcatttagcggttggtactctgatcttcctgttgtctacacatataccatttcatgattcatgggctggttcatactaaggtgtaaatgactgacaggcaaggcccacacacagactggatgaaaccagctctggcctgaccagaggagaccgggatccctggttatgaagcgactgccacacacttaccttgaatccccccaatggccccaaaaggcaggtgctgtgattagcaggtgctgcgttttagagaggaagacagcctagcacagagaggtgaagtagctttctgaagtcgcctagccagtaggggcagtgagcctgtgggattacagaactcattttggacatgactaagctggaacccagtctgggctttgaggcagagtcagctgagaggctgtgggtggacagcagcaggaggcagctggagggtcctgggggtgttgatgggggcagccatgtgattggggagaggcagggattctctgggggcatcaaacccttcctctcaggaggagggtgttacctgggaggggcaggggagaaggctctccagggaagtgccccatccctggtgtctacatgcagtaggcactccaggcccccagtgttactgaacctgtacacagtggaccctttccaggcatggtgggtctgaagggccagatggtgggaggggccagggacattttggttctcccatgtccatcctcttagttcttcctggctagactgggtgtcaggggaggctgagagtggaccctcaggattttagagtgagtaggcatgcttggaggctaaggatggggggattagcatgtcctggaccacccccatcgctctctgatcccctcaggtccctcccttaccccatacccatcccacctacaccacactcagcaacccaggctggcgaccagggccaggggagagggctggagcttcactggaggacaagctttgtgggtgtgacagctccagcggtggggttggggagcctcactaccctgccagcctctgtcaggggacagtagctgaggctactgacacccactgatgcacagacacctcactgtgtccacttctccaacgtcctctcccaggaggctcacccagattctggcagggggcggtggggcagggattcccaagtccattgtgcagatgagagaactgaggctggcccagccagtgagaggcagggtccagcccaggctctcctcatagcaaagccagctccagtccacgcgaggccaggccagacgctcagctctttgtcagagaaacaaggggatcattctcccctagccctccctgtgccggctggcactgccaggcccggtgcccacacccccaccagggccaactgaagtcagattgtccccaagggtgggggggtgagccagtgccgtgtgggtgggtgtgtagagggtacagctgcgagggggtgggttgggctggggtcagagcctatgaggtctgtagggctagtgtgcgtgtggtgggcagtgggggtacaaagacagggataaccctctgtagcagcataggaagggggtgggcaaaggcatgggtggaggctgcagctgtgttcctgctgcaggatgggaagggagtggtgggcatctgctcctttctttctggggactgccccgttggtagctgggtggagagacccaaggagctgagacagcccctttactgattcatggtgtagaggggcagagaaggaaggagggtggggtgagggccactgcctgccttcctaccttgtcgggaaggcacagtggtggtgggaggagccctggctggcagtcaggtggcatgggctccattcctgggcctggcagccaggcagcctgcaataagcttcctccctgctctgtgtggagaccctctcctccccagcatgggctcagaggccatgctgcctggggctgggttccagctctgtccctttcactgctgaaagacacttaatctcctgtgcttctgtttctccttatctataaaaggagagtaatatgcagaactacttcatagggctcttccaggtgaaggagtctggaacattgcctgacatacagtaaatgctcaaataaattcaagttattattatttctattatctggtgattttcactgaatatttgccagttctttttgctaatgctgactaagtccagtgtctggtattagccagaacatgtcagcctttgctgcttccctttgctatcccctgaggtctgggcctcattgttaggagcttgagacacagctctggcttctggtccacactgatcagttcgcctgccagtcatgtgcccatccatgtctcatgcactcagcctcccaggtgctacatactgtgcaagacctattaatttcatatagtgctccaatcttctgaagcagagaccgtttactaatgagaaattgactctcagagaggttaagtgacttgcccaaggtcacacagcaaagaagtggcagaactaggattcaagcccatattttctcagttcaaaagtccttgctcaaccacaaagtcatactgcctcttgcaatatccccaagatgggaccctccagcccctaccaggaccttcatggggtctggacacactcaggagccctgcacctctcagagtctcagcctgtctcagctggggaggaccttagaaattactgggtccaaccctttcattttgtgcatggagagatggaggctcagagggggaggggacttacccagggtcacttacctagggtcagtcaatgagctagggacagagtgggccaagctgtaggactcattcttccctgtctttccttccagactgggctggggggcttaagtcacacctgtcccactgagacctgtaggagattagggctgatgtgctggtgggaagtcctctctgggctctggcagtgccaggtgcctggaagtggccctccccatacaggccctcctaagcctgtggacttgcccttctctttattacactgtaggctccatgagctcaggaactgcagttgtatccccattgcctggctcacaaataagatacatttcttcacacatgcattcagcatatgccatgtcccaggtcctgagccagagtcccatggtatagcagtgaaaaagacagaaaatgcctgccctcagggaagtttgcattcccagtaagaaagagacagacaatgaatgaaatagctaggcaaaaatgcattgtatttaagatggtgataagtgatatggaggaaaataaaaacaaaagggaaggggcataggaagtggtggtggagggctttgtaattttaatagggtggtcctagaaggtctctgtaaggtaacatttgagccttggaggaggtgaaggagtgagccatgatgtcatctggggggagagcattccaggcagagggaacagcaagtgcaaaggtcctgaggtgggggcatgcctgggatgtttcggggatttcaaagtgcctggaggatgtagccggagcagataaaacaagagggagagctggcggatggggtcaaaggggaacacgaggtgggccagatcctagggggcctttccagtcatggtaaggactttagcttttcccctgaggaaggtgggaaccatggggagttgtgagcagaggggaagacaggatctgacttaggatttaacaggagttaaatgagttgctctactgagttgccagtagaacgtcctagggcaagccagaggaggcagtctgaacactgggctactcctgcgggattccaggtaagacccaggataggctgggcccaccttgtggcagcaaaggagggtggatatgaggtcggatctaacaggatcaggatgtgggcgtgacacagagaggagtggaagttgactcttagagtttgggatttaccaactgcaatgagtgaagaagacagaaccttcagttttggtccaggaaccaggaaacttggattcatgtctcagctgtcacccgcttgctcagtgaccttgggcaaatctcttcccctctcagggctcggtgtcttctcctctaaaatggatgcggtcccagtcattctggcctccccctgccagcccctgtgctttgaggaggacacgtgcctcatatacctgctgccccttctcatccacagggagccagcgccggcagccaccatggcgtcacgcatagggttgcgcatgcagctcatgcgggagcaggcgcagcaggaggagcagcgggagcgcatgcagcaacaggctgtcatgcattacatgcagcagcagcagcagcagcaacagcagcagctcggagggccgcccaccccggccatcaatacccccgtccacttccagtcgccaccacctgtgcctggggaggtgttgaaggtagggcctgttctggcctgccccccaccctgtccccactagtcccagcctcccctagagcccttgccttttccccctcccaggtgcagtcctacctggagaatcccacatcctaccatctgcagcagtcgcagcatcagaaggtgcgggagtacctgtccgagacctatgggaacaagtttgctgcccacatcagcccagcccagggctctccgaaacccccaccagccgcctccccaggggtgcgagctggacacgtgctgtcctcctccgctggcaacagtgctcccaatagccccatggccatgctgcacattggctccaaccctgagagggaggtgagtgaggagctggccagtggccatgctgcttgcagagctcgtgcccactgctgtgcttctgagactcccagtctaatggcagaggcaggggtgccttcagggagactcagtctgaggtggggacagagcccttctcagggagccccaatctcaggggggaagacacagccctgccctcagggagcctcacagaggaaacgccatccttactttcaaaagctctgctaggaagtcaggtgccgtggctcacgcctgtaatcccagcactttggaaggctgaggcagccagatcacttgaggtcaggagtttgagaacagcctggccaacatagtgaaaccctatctctactaaaatacaaaaattagctgggcgtggtggtgcacgcctgtaatcccagctacttgggaggctgaggcaggagaatcacttgaatcgggaaggcggaagttgcagtgagctgagatcgagccactgcacttcagcctgggcgacagagtgagactccttctcgaaaaaaaaaaaagaaaaaagaaaaaagaaagctctgctagggagaaacagaagacttatccaggaaagcccagcacactccccaagccagagacagaagtgagatcaaggaagctccctgggcaggtaggctccttggcaagaaccgtagcttcatgttgggccagtgggacctggacagctcatctcttctctgggcctatttcctctttccccagataagtaggttgggtgaggtgggctccaaggtccctccaggtcagtggttgtcccaatgcctctttcccctgcccacctcgtggtgggccctccccagatggacttttctcttttccagttggatgatgtcattgacaacattatgcgtctggacgatgtccttggctacatcaatcctgaaatgcagatgcccaacacggtactcctggctagggtggggtgggtgtgcaagggttctagggaggggggcacccactgtggctctgagcctggagagagtggagacagggttctcactgggcagagctggcatgtttctgtagagatgagtcattttcattaaataatgtgacaaaggccggggccaagaggaattatgaagcaagaaggatgtgcctcagcctctgtgcaccatggggcttcagaggggagaaggggctggggacacggagtgggcctgtggggggagctttccaggttggcgaaggggcagagggaggcagggagagcactgcatgggtggaggggcagtgtgtctatgggaaggtgtggaactaatgagctcctttggggacctgggcctcccctcctttaccaaacccagggcccaacaggcaaaagcctgtctgtgtctcttactccatggggcaagtgatctggggctggccttgtccccaaccacaggaacactccctctggcagcttcctgcgtctcctggcagaggtggggtagcaggtggggaggtgctgggcttggagtcaagaagcctggcttctggcttttgctgtgaccttaggaaatccctcaagcatactaaaccccagttttctcagctgcaaaatgggggtgatgctctctacccacaggattgtgggaagattagatgagggaagaaattgagggcaagctctctacaaaggtggcaggtgtgtacgctgggcaggtgggattgccagcgccccttccacccacttttctttggagctcctgaacctcagctacttactcctgcctttgggcatgagcctttcaccctgatcctggccccagcccatgccaccaagggaaagtccccagttcctgtggtggggagtcaatcctctgtccccactgccctggtgacatcgctgagtggcttagtaggagctggccgggactggttgggtccaaacctacagctagcaggggcagcgagggctgaggagggagggaggatgcaagtgattggtccctttagtagttcctgtgtacactgtggggtgtctgggcctgtgatttgttctgcatgtttctgtggcagatctttccagagctcagatctctccctgtcagactcctgcttcaacttcccttggctgcccattccaaaattccagtatctttgcaagtcaaacactgtactggggatccagatacatctgccctgcctacagcacctccacccccaccacttctgcccttgagctgctggaattgtgctctgccaagctgccctgtctgcttgtgccctggtggctgcccggagtgccttgcctcacatctctgctcaagactcagagttccacaccctccaggaaaccgtccagaaactctagaattgattagatgacctgctctagggcttccataatgcctggggcctaatcctatcacatattattggttggatcactctctcagacactctaggccaggggctccttgagggcagggactacatcttataatagctctggactctgcagaccttcaggttgaattgctgggtgaaagggcccaaggtgaattttgacactccaggtgtccccaggaaggactgctcctgggatgataggccctagagggggctccccgtggagagggggatactcatgggtctccctcaccccctaccccacagctacccctgtccagcagccacctgaatgtgtacagcagcgacccccaggtcacagcctccctggtgggcgtcaccagcagctcctgccctgcggacctgacccagaagcgagagctcacaggtactgcctccctctacccctgtgcctttgaatacccgactcctccctccttttctccctccctcccagctcctctctccttctcttttggcctccagatgctgagagcagggccctggccaaggagcggcagaagaaagacaatcacaacttaagtgagtcctgccccgcccctctccctgcctccctcttccttgttctcacctgggctggctaaaaagccactccctgacctgcactggtggaaggcttccctgctcaaggccaattcacttgcagatggcttaagccctcccattgctgtcgctcagtggtgcctgggactattagtgctgtctttccactaggcctctttaggagtgggtaggaaggattcctgtaagggatattcatgaaacccccagtttatcaggttgttttctgggttaaggcatggaacctggggcatcagagttctgtgtagcagggaagagtcctaccccaggcagctttgctgtgctacgagcatcaccatggctgattctacctttcagtgctcttaattgtgtctggcctttgccctggaccccctaattcctgtagaaatcccaatctgttggtcacctcttacttcctggaagaactaaatctaagctgcaggctgccctgaagcacccctccctgggctgggtacttctccccatggggtggggggtccccatccctctaattgctccttctggaatctgttacctttagttgaaaggagacgaaggttcaacatcaatgaccgcatcaaggagttgggaatgctgatccccaaggccaatgacctgtgagcaggtttctgagggggagggtgatgggtctgggtgggcagcagctgacaagtattatctgccctcagccccatgctagttactaggatgggaggagaattccttctagaagttcatctatttgagaaaagatctctccctctcccaaatcaggaaagaatcaggaaagctcaagacagatgagtttctgtcctggaagtgaggctgaggtcaagggaggcttcttggaggagcagtcatgctgagaaagttttcttaaggccattgggctggcagacaagaggccgggctcacgcctataatcccagcactgtgggaagctgaggcaggcagatcacttgaggtcatgagttcaagaccagcctggccaacatggcgaaaccccatctctactaaaaatacaaaacttagctgggcacagtggtgtgtgcctacagtgccagctactagggaggctgagacaggagaattgattgaactcaggaggtggaggtagcagtgagccgagatctcgctactgcactgcattccagcctgggcaacagaacgagactccatctcaaaaaaaaaaaaaaaaaaaagaaaggtaggctgggctggagtcttggtagtctgggaaggaggctgctctgaattgcctggtttcatgagattaatgaagtgggcagtggcaacagaagtcaccaggagggcccattctgtgcaaactgagatcagccacctccacctccaggtctggggttgctgggtaagactgggacaggccacataagctctgcaaccagagcagtagcaaggatttggccactcttctgagcatgcacctctaatttgcctggcctgctgctgcagggacgtgcgctggaacaagggcaccatcctcaaggcctctgtggattacatccggaggatgcagaaggacctgcaaaagtccagggagctggagaaccactctcgccgcctggagatgaccaacaagcagctctggctccgtatccaggtctggtcctgaacttggacttctttggtaactctgacccttaacctggctcctggccctaaggggcagtacttgtacttctgaagttggagacacaggaataatgcccattaggaaggaggatgtatcagttaggatgttttgctttggtaacaaacaatcctcagcatctttaagcaacacatatcagctggaggttctgttctgtgagaccctcattctggcacccacgctgctggcacccagctctctgatggcacatctagagctggctcttaaagccattgtcactcttaaggtgccacatgtcacttctgttcaatgggcttggccaatgcaagcacactctacaagtactctaacctcaagaggcaggaaaatgcaaacctatcatgtgcctggaaggtagagagctggaatcatttggtgggtggcactaggaatctccacagggccaacctaaagaaccaggagcttggcagagtcagccctaccagctggaactgagagttctagtcctggctctgagttgagggcctcttgtcctctttagacctgaggctggccctttacacaaagggcaattggactgcaccttgtttctctttcttatggtagatgacacaatttacattaaaatctagcacacacaggcacaaagtgaaaaatcagtttcatgaagtaacgctcccctcgtccttaatagatgcaatgcattctaataatttctattctagtctagtctagacaagtcaatttcaattaaaaaaatagaaagctggtcaagactcactacggtggcttcacaacccactaatgagttacgacttgtagtctgaaaaaacactggtctagactctagagctaccctatgctttcttccagcggaaacactttgggtcttgggtgccgtagggcaggggcaagtgctgtgatagaggcccaggggaggggtcctggtggctggtgcccataggtgtgttccccagccttctgtctgctcccctgcaggagctggagatgcaggctcgagtgcacggcctccctaccacctccccgtccggcatgaacatggctgagctggcccagcaggtggtgaagcaggagctgcctagcgaagagggcccaggggaggccctgatgctgggggctgaggtccctgaccctgagccactgccagctctgcccccgcaagccccgctgcccctgcccacccagccaccatccccattccatcacctggacttcagccacagcctgagctttgggggcagggaggacgagggtcccccgggctaccccgaacccctggcgccggggcatggctccccattccccagcctgtccaagaaggatctggacctcatgctcctggacgactcactgctaccgctggcctctgatccacttctgtccaccatgtcccccgaggcctccaaggccagcagccgccggagcagcttcagcatggaggagggcgatgtgctgtgaccctggctgcccctgtgccagggaacaggggccggcctgggggctgggagggccaggggcacctccctcccacccttcaggctgcactgtgtgtgaagtagccacctgccctgcctccctcctccccgttggcccctgtttggacttagtgcctgtctggcagcctgtggggtcaggagaagcacccccagggcagccctcttgactggcgcagtgggaagaggccttcagcccctctcccggagatggaatcgcggggcagggaggggcagggtgttctagaggtgagaagagggcctggtggagattccctgtcttctgagcccgagcccctcattaccagtgaaggacatgcttgaggggttcgggaagctcctcatctgaggcaactggtcctgggggtgctcaggcctgcctttttgggactcagatggcaggaggtccaccccgcagcctggtcctcggctctcccacaggtgggcaccccccactttggtgctaatagctctccaccaggtggtgtgagcgcgggggctgccagaagcgggaggggtcactgccggaagagcagctgccctccgacccctcactttgtgcctttagtaaacactgtgctttgtacttgctggtcctgtctctttggagtgggtctagggctgacagcgaacgggaggattcaacccagcgggccccctccagagtgcggatgctgcctgaagggagtcggggtggggggtacagggaagagggaacacgcttgtcacacgcctcagccctgcccggggaagacgaggggtttgggtgctgaggggggcacggtccctcctcacggccacgaggtggcgctgcggccacgccggttccacacctccagcggcggccggagcgagactagttgatgtggcgagagggttgctcacaaaccaagtgcgccgcccttagctgcttatttggggcaccctgggcccggggtggggggcatgcttcttctgtcccacccctgttctgggggtgacctccccaggtgggcggccacccggcttgagaagctgtagctgggcgctctggaggcggcgctcgcgctctgtctgccagacgggcttcccggtaactgaggggctgcgtcctgctagggctctggggaaagggacccccgtgagctagacagggaggagatgggagtccaggacggcgcgtggggtgttatgggcccgggtccccccgccccgctctggctctggcagcgaggcctgggcgcggcctttcctccgagctgcagtccttgggcctctgcttggagacgttggtgtttatgacctcgcctaggagggggacatgggctggggacagtcagggttcgactggcggctgctcgagccccggtgcctggcgggaacagggagagggcttttcgggcttcatccagttcccctctgctctccacggccgcttcaggcagagaccaaaatggctccccgtcatcgccctgagaggctgaaggggcctaatttaaaaaaaaaaaaaaatcccgggatgaaaatggctaatagggcaatttcctctgtgccgaacgggagatcaaatcaacgttgagcaattagcgtgcgaggggagagaaggaaaatgggccgggcggctgggcgctgatggtggccgggctggcgcaggctgcaggattaatctcaaggtcagatggagccggggatgaccttgtggagcctgagccagccggggcgctggcgcctcctcctagttccaggttccaccccaccacctgggacttacccatgccctggaaacccctctgagccccgtctgggtcaagccctgaactctgtgagacacctgattaactaggcttggcctgccttggccgggggatgaaggctccgggaagtcccaaggccggtccttcaggcccctgagaagtctctcccgaccccactggctcttccacttcaccctggggattgacctagtggagtggagggctgcccacctgcttcctctcacagcccttcaagatcacggatagcccttcctgccagcagatgtctgctaaaaagaaataaatatttaaaacatttttaaaaaggaaaaaaaaaaaaaaagaaaaagatcactgatatccccgcctccacctgcctgctgctttcctgcccctgggctccttcagcctggccactacctctggcattggagtatggactgcatattcgacaggacagagggtgtgagtggggttctgtccacaagagggtgccctgggccaggactaggcagctgcccgccgcggctggtgggggtgggggagtctcagcttcattgtacattccaagctgtctgcctgggtggctcccatcctgcctgggagtcctgcagtcctaccgatttggctgaggccggcccaggaactacttccggtatttcaataagccaccagaaagtgttcctgtttctgagaccagcctgaaggaccctcactttgtggctggaatggaatctggctggtgattatgaacgactctgattcaataagagggcaatgcatccttcagcaatatttatttggtggacaacacctttccaagtgtcaggtccatggaggaaattcttttttttttttttttttttttttgagatgaagtctcactctgtctcccagactacaatgcagtagcgcaatcttggctcactgcaccctctgcctcccgggttcaagcgattctcctgcctcagcctcctgagtagctgggactacaggcgcacaccaccacacccagctaattttttatttttagtagagatgggatttcaccatgttggccaggctggtctcaaactcctgacctcagctgatctgccagcctcaacctcccaaagtgctgggattataggtgtgagccaccacacccggcctttttttttttttgagatggagttttgctcttgctgcccaggctggagtgcaatggcatgatctcagctcactgcaacctccgcctcccaggttcaagcaattctcctgcctcagcctcctgagtagctgggattacaggtgcctgccaccacgcccagctaattattttgtatttttagtagagatggggtttcatcatgttggccaggctggtcttgaactcttgacctcactcaggtgatctgccctccttggcctcccaaagtgctgcgattacaggtgtaagccaccgtgcccagcctggaaattcttttttaaaaggcagagtagggccaggtgtggtggcttgcacttgtaatgccagctactcaggaggctgaggcaggaggattgcttgaggccaggagtttaaaaccagcctcggcaacatagcaagacccttaactctattttttttttttttaattagccaagcatggtggtgtacacatgtggtcctagctactcaggaggctgaaatgggaggactgcttgagcccagaagtttgaggctgcagtaagctatgatcatgctattgcattccagcttgggcaatacagcaagacactgtttctaaaaaataaaaaggcagagtaaggacattggctggtgtggacacaggagggatgagcctgtccagccccttcattttagggaggcttagagaacaaacagacacgtacagtgggagaggaagcagagaaagaggtcaaagctaagaggacgagaagcagtagctcccttggatccattgtggggccctcggcaggagccaggctgctggggtagcagaggtggtgagggtggaggatgcagacagagccccagcccctgaccctgctgtcttcagctccagttcctgcatctgtctatccccatcagctgctcggcctgcgttagtacctacctcttcagccttaggaagttctgcatgtccaactgcatctgctgggcggccggctccaccatctgtagaacagggcctgggaggctagagttggagtggcagccggggagggggttgcagggccttggaatgtgctgcttggaatgccatgtttccattatccatggttcctttaaagcagagattcttcctttactgtttgacgccattaacttagatgagagtctgatacatgctacacaccttctccccagacaaacacacacatagcctcctaaaaactaacctcaggttcaacactcaagctctcaacccatgccccgtgctccatctcaaagcccatgcccctcccctgtctttcaagctgcctggctcagctgcagccgccagagagccccttcccaggcacctgggtgtacctcctgccccctcacctcctggaactcctacctcttggggcccaggccccatccccctctcagacttctccagcctcatcttttttttctttgctctgttctttccaaggggggcagtggaatttatacaatatttaagcagccagagccgagtctgggaagatattattaatgtaaaagggacgggctgcaaatgcttttggacctggttacaattagagggtgatttttctaaaggtcaatgaattcagataatatccacaggggggagagaaatttaatacctttttagtgaattaattaattataatattatatcggcttggggttcttttccagagtgattaagggagctatctgtcttctgtgaggccggagaccggcgcctgccgccagcgaggaccctggcgcagggctcaggatggggggcccttccctctcctctcacccatgcagtggccaaggagctaggggcttgttaggcatgaaagaagacaggccggacctggtcagggctgagggtggtgcaggtattggcctttccccttggcctgtgtcttccacccccgggtctggccctcctgctgccatgtcaccaagcctcatgccatggtggcctgaagagctgagatgtggggtatggcctctttctttacacttggagaaactaaggctcacgggcttcagggacatgccttagctccactgtgggttaggacagactgaggtggcagagctggctggaaataccgagaagacaagaaggacctccctaatacctcccaaaccaggccttctggaaaatctccaccagccagaggtctgtggagctgcctgggaagcttctccatctctttcagggtgtatagtgtgcccagcctctgcttataaaatgaaaatgccccaggagtattgatacctccagttgctgtgaggcctaagatttctgtccctggagggatctgaaagtggccagggagtggtgcttttcacccatttattcatttattcatactcagtcaaatgttcattcaacaaacatttgtggcacacctgctcttgtgccatcagagagacctaaatatcacctcttgagcccctgcccacttcatcttaagccccagctgctcatctaagcaatggagggtggggtggggagagctccgtggtccctttctgtccagacaacagtcctaactcaacctgaaggcgagaagactggctgggatgcggtgggtttgtggagcaaagtgggtgctcattcactcagcataccctgagcacccactttgagctggccctgtgctgggtgctggggatatgtgggtggataaaggccagctggtcctggtgacagagtgggcacagggaggcagatgtgagcctgcaatcatgattccgtgtgggttcagcaaaaggagtagaagtgacattaagctgggttgtgagggaccagactgacaaggggagagggaaggcgcatggaaggagagggaggggcattctaggcattggacacagagtgtgcaaaggcctgacaaaggggggtacctgcagattagaggagatggtgggacagtagatgaggccgagtgggcggccacctttgtccccacccacgggcccaggcatgttgacaggaagacaaggccataggtcgggtccaggaaggcagggagcagcaaagccaaatagacttgcttttcttcccttgtttttgaggcagggtctcgccctgttgccctggctggagagaagtggagtgatcatacctcattgcaacctcaaattcctgggctcaagggatcctcctgcctcagccttctgagtagctgggactacagacacacaccaccacacctggctagtttttgtattttttgtagagattaggtttcactatgttgcccaggtggtctcgaatttatgggctcaagccatcctcctgcctcaacctcccaaaatgttgggattccaggcgttagctggtgtattgcacgctgggcccagattgcatttaaacgttggctctgccatgacttgccatgtgatggagcctccctgtgcctcagtttccctatctgtaatgggagattgcaatgtctacctcctaaggatgttgtaggaattaaaggaacgactgaagggaagaagtcggccctgcatttagcacatgatgtggctccagatatcttagactgtacatggccctcgagagggtgggtgggtcagggccatgccttctattgtgcccgaaattcctctttcctctcaagggggtgccagcaaaggccctaccctggggacatttttttggggggaatatcaacattttcctcccctcatggctcagccccatctttccccactccctgcctctgtccctcttctcccttcatgcaacatcccctccaccctgactcccccgcagcagcctcctcccccaccctctcctctctctccatgtgcggcgggccggggagggcctttccattgtactatctttgggccctaaattaaaattgatgacatcttgaaatgagcagtgagggtaattttgcttctgagccgggatgctaatgaggccccttaatggtgcaaacgcggagctgacgggtcgtgtgtcacgcgccgcagcgaggggggtaatggccgcggtaagtgccggtaattacaccctgtcttgctgtattttggcaggcctggtgggagagtgggggctcaatcaccactggcgggggcaccccccacccagcacgggactgacagccagagatacccacttccacccagccaggcccctcgacttcagcctcacctagaatgaggggcctgggcacagcccccttgccccatgcacacatggcatgcaaaacacatagtcacacatgccacagtcagaccattgtgcacccccacccccactccacacataactccacagcctgggcactcccccggtatgcacaaagcacacgcatagacacacacacacatgcacactcacccgttatgctcccccatacacttctacactctgcagatacacactgctccatatacacagcctgcacagcacacacacatgcacgtgcacacaaatacattctcaaagagcacacacacgtggagcgcctactgtgctctatgagctctatgtctgccaactctactcccaactcttctgaaataggtgttattctcattttatgacacagaaactgagtcttgggagatttagcaacttgtataagatcacacagctaggcagtgacagagacaggactggaatccagctgtttttactttgcaacctttccagcccccatatttcctcctatgtatgcatgcatatacacctctcactgcacaaacacacgcatgcatgcacatgtgcacagtcatcacccacagatcacgtagatcctctgtgcacccaaagacgcatacaaaggcattgttcaaatacctacgcgttgctgacacacatatgcaaggtgtgcttggtgtgtacacacagatgtgcacttgtgtcacatggtgtttgcacccctcacacatggtgagcaggatatcatggagaaggaagcctagattcctacatggggagctaggcatatagcctctccaggcttcggcatctcaatctctaaagaaggggaaataaacactactccacttccctccccagcacttaactgttgttaaggcagaatgacagccacacaaaggactgtgacgtgccctcctacaaacccccggcagaatcacacactgggtgcacgtatatgcattgtatgagtgtgcatgcactgtccaagtggcgtctaagctctctgtacatacaacattgtatttagacacatctctgcacacacactgtacacatgctgtgaatacacatcacagcacctgtgcagtaccctaagcgtacctgccagtgaaactggaaaccccacaaagcccatgggtacttgtcatgtgtatatactacatcccttcctcctccccccgaaaagtatgtatcaattctatgattatggtagaggttaaaagtatagactttggcgtttgaccgcctgggctctgcatcactttatttgctgtgtgacctcaggcaaattacttaacctctctgtgcctcattgtcttcctctgttaaatggggataataagagtgcatctgcctcaagggatgctgtcagattaaatgagttgacagatgtaaagcacttagtgcctggcacgtagtaagccccagtgagtgttgtgataaggtgtacaactacaacaaaggaacatacctcggggtgtggcaagcaccaaggagcaggcagtggaaggcagaggagggaacactcatatacggctggggcagtcaaggagggcctcctgtaggaagagggattagggctgagccttgaaagactgtagtttcgtttactgagttcctgctctgtgtcaggccctgtgctacgtgctttatatgaattatcccagtgagccttctgcgaaccctgggaggtgaccatggttatgtccatgttagagatgaggaggaaaaggtgcagagagactcggtaactcgtccaaggacaacaagggcctagataagagaaggagaagaggcacaggaattccaggcgggatgtgcagcttgtgttggaaatagagcaacagatgggaaacacacccagagggccttccttgctacactgtcatagtttccagttaatgagaagggggtgagcatctggagtgggggctgacctaattgctgtgtctcttgcagtgacaacagggacttgtggggggtgggagtggctggcactgcccacagcatgctcagggcaggggccagagctgggcatctgattcacctcccttgccccctcccccaccaagagccagggcctgacccagttcgggaagaggtgggtgctcccgcttaggccctggagaccaggcctggatccctggaaagggacctggacaggtgagaagcatggaggagttggtgaggggtcagtgagcaaatctctgcccactccaccctgaagccagcaccgctgcaccccagggctggttcctggagatgcctacatgaggaataagctgtgggccaggacactgaggctcccctcaaaccggccttaatatccctgttgcctcatgtccattaaactgtgcagggcctgacaagctcattcaccaccccttgaagagatcatagattttttcccctcagtgtttttcatgggctgttcctatttgtagtgcagttcttgacattcagcaaacagctccccacaaatagcctcctgtcccccaaccccacaaataacctctagccctcctcacccacacacccacccttttatcttgctggcatagagaaggtggggggctaggtggggaaggaggggaagggccatggcttccgaggcccgggacatgggttggcatcccacctcctccccttcctagtgtcggggcttggggaagtcctccacccttatctctgtgcctttgttttttcctctttggtcaggtggggacaacaaggcagcctcccaggctggggtgtctctggggttggtgtgaatcacatccagcaaagcacttggcccatgctggggtgggggtgttacccaaggagggatcacagcatttattgtccagatcaggagactctgaaagtggaaggggacattattaaagatcacaccagggcaacacatgacaactgggactgtcttgggagcagcaagatgagtgatcactggtctatgaggtgtctgtagcctttctgtccatcccgcctggtgggatgggctggggcgtctgtgtacacacatggaatggctagggctgggccaccttggggaagcagaacagcctgggtgcggaggtgtatagagaggtgggagcagtctcaggagccggaggtgacatcctagacacaaggaaggtggagctgttgggagtggcccccaaggctagacagaggagaggaaatctgagggtgggagagtagggtggggggactcaaatctgcagacaggcttggaggtatgaacaacctccattccagatcacagtgacagccgccctcgtggagcacctgcttggcaaagaaggcactgctctgagtacttttcatgcatttgctcatccaatccccacaacaagcctatggagagggtactatccttgtctccattgtacagaggaggaaactgaggcacagaggggttgagtaactcgcccaacgccacactgctaggaaggaaagagctgaaatttgagcccaggcagcctgctcctgttccctgggggccctcccttctcctggctctgcagagaagttaagctgtgttgctggggggcagatggctccatggaaggggcaagtccccttcccagcccaggtcccagtttccaacactgtgggacccgggaaattctgcaggaggctgccgggccaggggagagcagcttggctttggagaaggcctgcttggacctggctccacccctcactcgcagtgtgaacctcctgggtatatttctcaattttgtggagccggtctcctcaacgtggaagacgcctgttccgttgggcatcgggaggttcaatattctcagctgtgggaggcgactggtgtgaggcgggcctttcgagaaggctggttccctctcactctctgagctgggcctgtcctgggctcccctcaccccagggaggaagaaactcagcgctctggaacacctgctttactcctcatctgggccaggggtttgaaggaggagggctgcaaaggccaggatccaaggcgctcagtgatcatttgtgtcacgattatggaagggcagctagcttcaggccagggcggtgagtgctattccagctgaggctctggagcaggctgggctcaggcactgggctgggtggtggggttgccaactctgcgcccctcaggtaccttagctggtaggtcctaggaaaggggtgggggacagagggggctgcctcctaatgaacaattagtgtctgctgcgtggctaatcatgtggttccgtgtaattaagaagttaattagtgctgtgtcaattaaggtttaattagtcccctcttcagagaagcctgaaatgccctcctgctggaagcttctggaatggaaggtgggggagcgggaggcagatggaagaggggacagtgggtggggagggggccccacttccttttgtgcccctcccagttctgggatcagtgacttgctgcccccagccccacccgactggccctggtcatgacgactttggggccctacaaggctctcttctaccaccagggcttgcccactccagagggatgctaccctgtggcgctcttgtggaaggccctcttaagccactgcacccggttctctacatctgcttttgggtaactttctttttcttttcttttttttttttttttttttttgagacagagttttgctcttgttgtccaggctggagtgcaatggcgtgatcttggctcactgcaacctccgcctcccaggttcaagcgattctctgcctcagccttcccgagtagctgggattataggcatgtgccaccacgcctggctaattttgtatttttagtagagacggggtttctccatgttggtcaggctggtctcgaactcctgacctcaagtgatccacccacctcggcctcccaaagtgctgggattacaggcgtgagccaccatgcctggccgtccctagtctttttaccactcccttcttccatgatggacatcattgaacgtaagactttcaagcacatcttggataatttctttaggacatgactaagagaaaagatgaggcttttggtttgatcttctactaacccccactctgcccttgccatctaatcagagttgcttggggccatcgctgccctgacggcctcttttctctagtgtctgttcaacccgctgcagccgcctcatgcctgcttcctctgcctttcatctttttactcttgatggtattatgagcacaaattggctccaccttccaggaagttctgacctggacagttccctggtgcttccgcgaggaaacccacaatccttggtggtccctgtgtcgcatccccagcctggctgttggctacttctctgagttcccccaatcattcagctggacaaggctcctctcctgtccagagtgcctatctctgaccttctgcaactgcttctgttggattttcctctgaactccaaatttcccaaaccaaacaccagctgctccatgaaacttttcttgattccctcctctcagagggatgtttccaacttcagaacaaaggatgaagaaggctggtagagattatgcctcctgcttgacctcctgccaggtgttggcgggatggcattgctgggccatggcagcgtgtggtcagtgagggttgtgcagtaagccccctactctctgaatggaaggaggcactcagcaccgtcactctgacccagagccgtccttgcacttcaacaatcatttctaagcattttcttaatgccaggccctgacctagatcaggaaacagacagatgaataagactaacccttgcctacagtttagtaaacagccccttaggaagcaacgtggggagtgcctggggctcctgggaatgcaaaggagaggcccccagcaccatctccaaggtgggcactgctggtgtgactggcacgagccttcgtctccctcctcccatcccccaaccccaaaggggtagcaggaagacccactgggggagggaagcagagagatttggctcgaggagggaggaaatgaaatggagaacagagataattgttcccatttggcaactttttctaattagggaccaattatgtccttgggtacctaattggggacctggtagattctctaatttgctaggtaattactggccagtagttctaccagcatgaaatttgggggaaaaatacatgatcacaacaattgaattttctctgtttcagacgctttgcccagaagacaagctgggtgctctgagctctcttttgcctctgttaacaccgcctcccgccacctgtctctcctcaggcttccactgggctgtgtgcccttcctggtcgctcagctccaggagctggcaatctagctggaaaccatcagccaacaccacagggatatggggacatctgtgtttttgtctccctcgaattcatccagcttttggtaacatggaattactaggtgtgagaaactgttctaggtaacacacatacacaggcacagacagctttattaaattccacaacccactgacattggcatcattgttaatcccattttacagatgagaaaactgaggtactaagaggtcaagttaaatataggaatttaccctaaagaaatgatccaagatgtgcttgaaggttttatgttcaaggatgtccatcatggtgtcatttacaacgtccaacacaatcggagctggggcagatagtccgaccttgagtgctcacacgctattccatattgtacctttccattaaattgctctgcctcagttctcctctgtgaaatcattcctaaccacaatgcaataccaccttactcctgcaagaatggccattatcgaaaaattaaaaaataatcaaagttggcgtggatgtggtgaaaagggaacattttacactgtgggcgagaatgtaaactagtacaaccactatggaaaacggtgtggagattccttaaagaactgaaagaactggctgggtgcagtgcctcatgcttgtaatcccagcattttgggagcctgaggtgggtggatcacgaggtcagaagatagagaccatcctggctaacatggtgaaaccctgtctctgctaaaaatacaaaaaattagctgggtgtggtggcacgtgcctgtaatcccaggtgctcgggaggctgaggcaggagaattgcttgaacccaggaggctgaggttgcagtgagcagagacagcgccattgcactccagactgggtgacagagcgagactccatctcaaaaacaaaacaaaacaaaacaaaacaaaacaaaacaaacaaacaaaagaactaaaagaactaccatttgatccaggagtcccactcctgggtatctacccagaggaaaagaagtcattatacgaaaaatatacttggacacacatgtttatagaagcacaattcacaattgcaaaaatgtggaacctgcccaaatgcccatcagtaaacgagtggataaagaaactgtggcatatatatgatggcatactattcacccataaaaaggaatgaattaatggcatttgcagcaacctggagggattggagattattattctaagtgaagtaactcaggaatggaaagccaaacattttatgttctcacttataagtgggagctaagctatgaggatgcaaaggcataagaatgatacaatggactttggggactcttgggaaagggtgggaagggggtgagggatagaagactaaaaattggttcagtgtatactgcctgggtgatgggtgcaccagaatctcacaaatcaccgctaaagaatttactcatgtaaccaaataccacctgttctccaaaaacctatggaaataaattaaaaaaaaagaactaaaaacatgctatgtacagaaagaaagaaagaaaaaagtctacttcataaaaaataaaatggctttattgagatataaagccatttattgcacatatttaagtgtacaatttgataagatttgatgtatgtatccacccatgaagctatcaccacagtcaagatagtgaacacatccattacccccaaagggttccttatgatcctttgtgatccctcccttttgtttctccctatcccacctccaaccccaggcaactactgatgtgctttctgtgcgatagattagtttgtactgtttagaatttcacaaaactggaatcatagagaacgcacctatttttctctggcttcctttagtaggcataattagttttgtctgtgaatctaatgagatgcataactgagacacattcatgttgttgcatgtatcagtatttctttcccttttaatggctgagtaatattccattgtatggatataccagaatttgtttattcattcaaatttaaagacattgggttgtttagaagtttgactattgtgaataacactgctatgaacatttgtctacaaatatttgtagggacaagtgctttcatttctcttcagtaaatacctaggagtagaatgcctgggtcatgaggtgggtgtatgttcaactttttaagaaattgttggtcgggcacggtggctcacgcctataatcccagcactttgggaggccaaggcaggtggatcatgaggtcaagagatcgagaccatcctggccaacatggggaaaacccgttccctaaaaatacaaaaaaaaaattagctgggcatggtggcacgagcctgtagtcccagctacttgggaggctgaggcaggagaatcacttgaacctgggaggcggaggttgcagtgagccgagattgcgccattgcactccagcctggcgacggggtgagactccgtctcaaaaaaaaaaaaaaaagaaattgccaaaatgttttcaaagtgatcatatcattttacattcccactaacaatatatgagaattccaattcttccacagcctcaataatatttggtgtggtcagtttttaattttggccattctaatagatatatagtgatatctcatggtgggtttaattttaatttccctaataactaatgatgtcgaacatcttttcatatgtttatttgccatctgtattttttcttcggggaagtgtccaaatcttttgccagttttgttgggttgcttgttttctttattgagttttgagagttcctaatgcattctagaaacaaatcttttatcagatatcaaatcctttaccactttcctggtaaggagttcagagagctcctccatttttctcgcagagaaactaatgctaagggaaggaagtacatcagtcaatacgtttccagctaaaaataatagaaaacccaactaaagtgcttaagaatgattctataacaggatgttcagagatagtgtggttccagggttggttaattcagtggtgaagatgtcataaggagtagatagttttcttctttccactctggagtccttgagagtttgtcttgacctcttagactggctaccttcaataggcccaaggtggctcttttttaaaaaaattcattcaaataatatttttttgagcagttaaggagatacaaaggtgatttaaaacatggccagaggtgaggcaaatgcacaagtaatagaaagcaaagggcaagtttcactgaatcacagcagtcagagaaagtgcttttgggaaccaaattgtttccagcctgaagagccatggtggcaaatccaaaaaggggattgagattaaaatagaagacttcagtctggattgttggtgacactcagtatggactatatttgtctctccttttcctgtctccccatctttgggcttaatttaccagtagtgcccaggactgttccatgtgctttttctatacttgcttgcatttttgttttaatgtcttctacagaacgaggtcctttgggtgttttaggagtcttttcctgttttttaaaggattcttgtccttttgatcttggtgttgatgatggttttgagacttttccattctgatctgacttttgtgcatttctggctggagtgtcttgtatagatttcttcactggcgcttcttcagtttcctcatcatcaaaatcatcttcttcatcatcatcatcatcatcttcatcagcagcaagttttacttcttttctgtggaatcttgctaccacttccaggggcagactgctttccagatgtacttaagagtttcacatcctcctcctcttcaccttctgactctgcatcttcctccacagctactaagtgctgtccactagcatgcactggccctgaaccacacttcaaccataaggccactagtggtgttatttcaaagcccccaagggaaaccattggttgtgcagacattttcaaagttgccagtgtgactttaattggactgcctttgtaattcatggcctctgcttcaacaatgtgcaattcatcctttgctccagccccttaactgactgttcttaaagataactggtctcatcttcatcattatccgccttaaaatgatcatctttgttggcctttagttcacaactgaaaagatagttctgggacctcagtgggctcatgtccatgtccatcaaatcttccatcaggtggtgccacgcacttaggtgggagagaaggcagatggagataaacgaccactgctggagagaacagctgcacaggacagagtcacaccagggtggctctatttttataatcagaaagttataaaataattttcaaatatgttataccagactgtgacttgttttttcattctcttaacagtgtcttttggagaatagaagttcttaattttgataaagttgaatccatcaattttttaaaaagatctgtgcttttgttgttccatctaagaaatacgtagcaaacccaaagtcacaaatatttttcttctttgtttcttctggaagttttatagttttagattttgcacttaggcctatgatccattttaagttaatttttgcgtatggtgcaaagtatggttctctctctctttttttttttttttttttttttgcagatggatagccaattgtgctaggaccatttgttgaaaatatgatcttgctccattaaatcatcttgtcacctttgttaaaaataaattgatcaaggccgggtgcggtggctcatgcctgtaatcccagcactttgggaggctgaggctggtggatcatttggggtcaggagttcgagaccagcctggccaacatagtgaaaccctatctctactaaaaatacaaaaacttggccaggcgtggtgggtcatgcctgtaatcccagcaatttgagaggccgaggcaggtggatcacctgaggtcaggagttcaagaccagcttggccaacctggtgaaaccctgtctctgctaaaaatacaaaaattagctgggcatggtggcaggcgcctgtaatcccagctactcaggaggttgaggcaggaggatgaacccaggaggatgaacccaggaggcggaggttgcagtgagccgagatggcaccattgccctccagcctgggtgacagagcgagaccctgtctcaaaaaaaaaaaaaaaaaaaaaaaaaaatatatatatatatatatatatatatatatatacaaaaaattagccaggcatggtggtggtgtacacctgtagtcccagctacttgggaggctgaggcaggagaatcacttgaacctgggaggcagaagttgtagtgtgccaagatggcaccactgcactccagtatgggcaacagagtgagactctgtctcaaaataataataaaagaaaataaattgatcatatatgtatgggtccattgctggactttctattctgcaaatctatttgtctgtcttgattactgtagctttataaatcaggtagtataagtcttccaaacttcttctttttcagagtcttttggctcttctaggtcctttttctcgccacataaattttagaatcagcttattgacttccacgtaaaatcctgctggattctgactgggattgcactgatatagatcaattctggagagaattgacattttcacaatattgatttttttattaataaaccacagtatatctttccatttcttacttaattccgctcagcaatatattttacttttccagtgtacccagtcttacacatcttttttcagatttattcctatttaatagtgtttgatgctattataaatgtttttacaagtaattttggattgactagcagtttatacattttatcgatttttctcagagaataagcttttagtttcattcatttgatttattgttagtctgttttctatttcattgatttctgctctgttcttcaatgtttgttttctacttatttgggggattatttgcttttctttttctagttttgtcaggtagaagttttgatcattgatttgaaacctttcttttttctaataaaaagattctgtggtataaatttccctctaactactgttttagctgcaaactacaattatttattttatttatttatttatttatgtatttatttgagatgaagtctcactctgttgcccaggctggagtgcaatggcacgatctcatctcactgcaacctccacctcccaggttcaagcgattctcctgcctcagcctcctaagtagctgggattacaggtgcatgctaccacacctggctaatttttgtacttttagtagagatgtggtttcaccatgttggccaggctggtctcagactcctgccctcaagtgatctgcctaccttggcttcccaaagtgctgggattataggcatgagccaccgtgcctggctacaacctacaaattttgatatgctgtgttttgcttttattttcattctgcccaaaatatttcttggcgtgtggtggtggtgggggtagaaagccatgaaaaggcctccctcctgcaaccctgcgcctgcaccccggactgccccctcctctgcagggcccccactttctccttcctttccctgcagctggatgctggggctttggcagcaaccctgccggcccaggctggatctggagactacagaactacagggtgatcctggctgggaatgtgtatggtgagggcctttcagaagatggggctcaagtgggactttcaggaatgtgcagacactgtagtcactcaggggctccaagcttccagaactgggatgtcagcaggcttcgtgaaaatgattctagtggtcttcttgctttgcaaggcagaggatctgatggggccccatcttagtccacttgggctgctgtaacaaatgagtggcttataaacaacaaaaatttattcctcacatttctggaggctggaagtctgaggtcaagtgtcagcatagccaggttttggtggcgactcttttcccagttgcagatggctgtctctcactgtatcctcatgtggtggaaagcagagagcttgctctcttcctcttcttataaggatgctcatcccatcatagcgatccaccctcatgacctaattacctcctgaaggcgccacctcctaataccatcctatgatggcttggtgtgtcaacatacgaattttgagggacacaaacatgtgcaccgcaggccagttggccattgtgtctgtcatttgcctatgtatcctcagacacattccttgccctttgtctgatctgctctgccctgccctgccctacagggatgatggcccttgcagcctctgtttctcgggctcttatttcagctggcttccatctgagttcagccagtggggccactggagggagttcacaagctagaaggaagggagaagccagggaatttgtctccctttctctgccttgggtgggctctccagaagcagctgtctcctctgtggctccagcttccccaggccgccttccacaatcacagattctgctaggcagccccctcaccactgtggttttagctctttccacatggttctggcttctgggctctggtaacacctaacactacctcctcctattttctccctatcccttattggtattgctaatctctggggtgcctcatcataccattggcatcttggttcttccatcattcatgtaacctattccctgtatcaacagcctcccccaccacacacacacacacacacacacacacacacacacacacacacacacaatttggaatacgctgaattgtcctaactggctccaactgatagattcatcatccaaaatggaataccccctttggctagagttttaggaaaagatccccaagaggtggcaggcctcctttatggctcagccacacatctgcagtccaagttcaaggtattatcaagttcagggatgccacattgtcccacttcaaggggcaccattcatatagaattgaagcccttctctgggtagcaggattgctttcacttaatatactggcaagatgcaaggcagattttagtaggaagaatcacttggggccgggcacggtggctcatgcctgtaatcccagcactttgggaggccaaggtgggcagatcacctgaggtcaggagttcgagactagcctggccaacatggtgaaaccctgtctatactaaaaatacaaaaattagccaggtgtggtggcaggtgcctgtaatcccagctactcaggaggctgaggctggagaatcacttgaacccaggaggtggaggttgcagtgagccaagatggcgctgctacactccagcctgggggacaagagtgaaactccgtctcaaaaaagaaaacaacaaaatcacttggggcctctgtctttcggggaatgagatgtgtcttgagcatctgtttttgttttgtcctcccaatgcttccacagtataccccacactttgggagctgctcctctcctcctccatgtggttctgatgaatccatcaattaccaaagctccttctccagcagaggtaaacagatgacccaggcttgaccaatcgatgtatccaatgaaacactgatttacccagaggatgggcatgtgatcccagagagccatccagcatcctgtcctgggattgagaaactatgcaaagggtcctttctctcaccagggttgccaagatctctggtttctgttcaccttgttttcttcccacccaccaatgtggaggagatctatcttcaataggagacattgaggccatcacacagggaatctcagagttgagacagaaggaagaagacagagagaatcccagaggcactgggtccccagctcccatcctgattcctgaagctctttctttaattttacaaataccagagtgttccttccagccatgagcgccaataaattccttttgtgcttaagttggtttgcacaggatttctgtcactaacatggtagacacagggctctctgaattccttaccaggaaagtgagactttaggacaacccctccattcgtctcacagagaaactaatgccaagagaagggagtgcatcagtcagtaggtttctagctacaaatagtagaaaacccaattaaagtggcttaagaatgattctatcacaggaagttcacaggtagtgtggctccagggttggctaattcaggggtgaaggtgtcataaggagtagatagttttcttctttccactctggagttcttgggagcttatcttgacatcctagactggctcccttcaataggtccaaggtggcttgttctgtctgggttatggacaacaaccacttagggcagaaatgggaatgtccctgtctgatgtcctagaagcctctggagagttttatgtttcattggccaagatggtgtcacatgctcattcctaaaccaggcactgacggggggatgagaccaccatggttggcttagagcaatcatggttcatcccctggagttggggtctgctctctttgaatctcatggctgcttggagaagagtaaactaaatcaggagtctgttaaaaaaaaaaaaaaaaaggaagaaggcgaggcacagtggttcatacctgtaatcccagcattacgggaagctgaggtaggaggatcccttgggcccaggagttcaagaccagcctggacaacataatgagactccatctctacaaaatataaaaaagtagctgggtgtgatggtgcatgccttagtctcagctacttgggaggctgacgtgggaggatcacttgagcctgggaggttgaggctgcagcatcactgcactccagcctgaggaacagagagagattttgtctcaaaaaaaaaataaaataaaataaaaaaagaagaggcaaatggctgttgggtagggtagttgagacagctagctgtcccctcatatctagtcaccctttcttccacagtaatagaaatttcagctgggcatttggccacccagaataaagatgacattttctagcctcctcttatggtttggctatgtccccacccaaaatctcatcttgaattgtaatccccataatccccataatcgccacgtgtcaagggtgggaccaggtggagtcaattggatcatgggggcagtttctcccacgctgttcttgtgatagtgagtgagtctcccaagatctgatgatgaacatgtaagcatctggcatttcccctgcttgcactcactctgtcctgccgcctgtgaagaaggtgcctgcttctcctttgccttctgccatgattgtaagtttcctgaggcctccccagcagtgcggaactgtgagtcaattaccctttaaaaatcttttatttataaattacccagtcttgggtgtttcttcatagcagtgtgagaatggaccaatacacctcctttgcagctgaacgtggccatgtgactaagttctggctaatgggaagcttgcagaactttcacacagtggcttccaggaatcttcttgaagagggctctgacatgaaccttctaaacaggacaggggctgaaacgcatcttctctatgtggtttgttcccaccttcacctcacactgaagctcatcccctgtggctggcccgggtagtagagtccaaggtagaggaggtggggaggggctctgtggcagaccctggggctgagtccccaaaggtagccccctttctccctgcccagcagtgagttgggtttgtctggccatcaatcatcactccccttggtgggtgagggcaggttctgccaatgcctgcctgttcgctggtccttctcagggagggacaccctggcccccttctgcctctgggggcttttcttccacagcccagcaggctaggagcgctggagaacactccctgctgggaacggtccccaaccggcaaccatgggtttgctgtgtaaatatcgcagttccctcagaagcacgtgtccagttgcccacagtggtaaccagcttgataacactcctcactcccctactggtgtttcctggaaccccctcgtaagcaaattatttgcacttcaattcttgtctagagtcagcttctggaggagtccaacctaagaaggaatatgatccagtgtgggcaaagatgtaagtagaagcctgttggggcttctggaaatcgttccctccctgctctggtaaaaggtgagggaggagaagtcccccttttccatctgccttttttttttttttttttttttttttttgagacagagtctcgcttgttgcccaggctggagtacagtggtgtgatctcggctcactgcaacctccgccgggttcaagggagtcttgtacctcagcatcccaagtagctgggattacaggcatgcaccaccatgcccagctaattttttgtatttttagtagagacggggtttcgccatgttgcctaggctggtcttgaactcctgagctcaggcaatccacctgcctcagcctcccaaagtgctaggattacaggcatgagccactgcacccagcccacctgccctttttgttctcgagggatgccatgtgtaaagacacaacgcttggggctgtagtagccattttgtgactaggaggggagccatggacaacattctgggcatgatggagcaggaggttggaagccaggatccttgatggtgtcttggagtttcctgatcagctcagggctcacccacttccgcatttctagttaaggagacaataaatgtccttacagttgaggccatatttatttgggttctttgctgcttgctgccgaacacatcaatattgatacaagctttgtcccagaggtgttacctttgaaatcaggtcctcccactactaccttgagcccttggggtagagcgggaggcagaggggggcacaggcttgaactccacaggtggctgagggccaggggtcctggacgggagaggaacatgggggaagctagtgtctggggtcccaagaataggggatggggagggcaagaaagtcagtcctccattaatccgggccaagaggaccattgttattgttattagcacgaagcatctcgaggctcacactcgtcctggcctggctgggcccccctaatggtcccataaatcccagccataaagagtaatggggggagacaaatgagataattaggaataaatctcagcgcagtctctattcatcagcgtccctagaactggccaatcttccgagccattagccaggtcctaattaatgctgagctgcccagctctgcggaggctccatgcctgggagggatccgggctaaggggcaccactgcccccacagcccacagcgggcgaccttgggaggggccgggggctgtgtgccttcagcctgctgcttcacctttccgtctccaagggccttagtttgtccgcaccctcctgtctgcctccttgtctctgtctccttttgttcatcttactccatctccccgactaccttcaatcccgtgtttctctcttatcagatggccgcagtctatgttgttagctatggaagatctgagttagaaggaattgtgggaccacctgtaaaaactctccaccatctgtcctttctgccgccctgtcagtacctgggcagggacctaatctacactggctcccccagaacagtccttggaacagggatgaccccagccctgccccctgctgtggctgtccatctttcctggggcagttcttgctagcagagtattctctcattcctggagctgggaatgctctttctgttatgtctgcttctcggtcttacccctacctgctggaggctgaacataagccgcactctactcaagctccaggtacttgaaggccattcttgccttctcttctccagccaaatgtgctgagctgcactcgacaacttgaggtttccagctgggtctcctctactcagggacttctctgtaccacccgtggtagtctgaccccacggtaacttctgttgttttaatctgttagctttcccctcgtttttcttataacacccctacctctttgggaggtttcccttccttgattctatcagggtctggaggggtggccaagtagcccactctcccaggccacagaggcagcacacgatgaggcctggccagccacagccctccgtcccctggcaccgtgattggctcagggatgagcctgctgatgtgcggggccaatcagagtgcctccctggcctttgctatgtggccccaaggcagtagaactgagacggtgccaggtggaccgtgtgtctaccccttcccactccacatgtatctgtctgcagtaggaggaaatgtgccccgcacccagaaagaagcagacccggagatggcagggattgtgaactggacggtggctacggcctgggggaaagcggtgaaaccaggtgagaggcgaggaagggctgggagatggcttttctccagaggaggctgaggtgatgaaagggctgtgactgcggctgccatcccataccgtgtgtcctcaccagcctaggaaagtcagagcacagaggagcatctgcacagagatgacaagggaccggctctgtgagctctgtccccatgactcgctactcccccactgtggcctgagcctcctgtccctgcttctccctcacctctctttgcccagggccagccccaaggacgactaagctgttttccagctcggtcaacaagtggagtcccgctgccccctgctcagccctgggattgtgtgcagcagttggcctgaaaaccccagagaccagccccagcccccacaaccggaccatcaccctggggagcaggtgaagctgttgagggtgatggcacggggcagggatggacctgctcagcccagtgtcagaactgcttagcggtgttctgtcctggcagctctggagccatggaggccatggggcctgaagctcagtttgccccgctctgagtatgagaacaggctatgccagttaaagttccaaatacagggagaagctgatggagactatggaggcagaggggtccggctgattgccctcccctcacaaaccaccccctggttcagctacttgctctgccgtggggccacccctcttaggtttggcgcacaagatcactgagtggtcatggacagtactagccacagatggctaaacttggcctcaccaccttctctcccacaagcagggggtgcttgccttggtttagacaacccagggggcggggtggcctcttaagatgtctcccaggcaaaagtggcctgatctgctgctccaaagatgaaagaagactggagagaggcaggtgttccctggacactgtggctgcagtctacccactcttccgtcgtacacacaggcttggggaggaaagggcctctttcccggggcccacagcacagccaggcctaaaactgtctcctggctcagcccagccgttggaaagcagagcctgggagcctgtggtagaccatgaggagagggaagggcccagagccagggcttttgccatttgctgcccggcagggatcagggccacctgggcaaagacagggaggtgaggaaggcagggcaggtgtgggacgaagcttgaatggataggcatgagtctccacagcccagcctcaggctggccaggggtggcggcggctgcaggctgtgaaatgtgtgagtgtgtgtccgtgtgtgggtagatgtggtgtgagtgtgtgtgtggtgcgggtgatggaatgcatgagcctgcggaatgtatgtgagtacgtgactgtatggaaagtctgtgtgagtgtatgtgtgtgtgcatacaggtgtgaagtgtgtgtgtgtgtgagtgtgtgagtgtgtgtgtgtgtgtgtgtgtgtgtgtgtgctggggggctggctaaatccttcccctgtcccgccccaacccagcttagcctctagggtttcagccactgtcctaaagaaaacagcctggagcctgcagcaggaaatcgctgtttggattgcagaggcgcctcttcctgccacagccctgcggagcagggagggccaggagcaggccttcctgcccacctggaccagatatcgagctggtcaggagccccttcaccccctgatctggcctccctaacgcccttcagaccccagccttgaggactgaatgggaaaccctcccaccgttgtctctcgagggcagtgggagaagtggatgcccccgaggctgagtgagccgaggctggaacaccctcacagaggaaagccaggcagtcctgtcaatggtaggtccagcaatcccacattcacgaacattctgccgatacagctcattcatgcaaaagggtgtgcctcgctcagcctggtttgtaccaaagcgcttgagagcggattaagcagagctgggggtccctggactgtggcgcatccatccagggcaactcagccagctctccatgtgctgggaaggaagctccccaagacatggccaggtgggaaaaacagggtacagtgcagtgtgtacaggatcctcacatcttcgtaaaaaaagaaaacacatacatgtaaatgcttgtgtgtgcacagatcagactttcaaaccttccgtaccttgggcaggcaataactaagaaaatatataaaaatacgcacaaatagatacatgagtgctgggggtgcctcggggaccctctaccggcttgattgtgagaccccaggcaggtcccttcctctctgtgtcctgaatttcttgtgtgctctcagaggtcagaaaaccttgaagctggtgaagtgaggcgtgtgtgcgtggagatggagtggggagggggtggggggctagtttgcgttgcctgttagaacctcctcctcctgctgcaatgaaacccactcccaaggccataggctgctccctcctgtgacattccttaagagagtttggatttcatctggcccttttccccagtccccactccttccttccagaatccctcggaaccactccaagccttcattcctggaagcagtgcccactaatacccctgcagcccccgtctcaaggccttcatcagctgagtgttctccaagttgccccaactgtcccagagcctctcatgccccctggacctctcctggcctcctccaggtccaggatatgtgtggggggtgctggtccagctgcccccagtgcggccctgcgatcctcacagccgccattgcttctcaggcccttccctctgcactccaaggccgccccacagatggccgtaggggcccatgcagtcctgacaaggcttccttctttctcagacgcctggcaatagggggatgcctgaggctgggtgtgtgacccccactgggcctccagtgaagcccaggggcaagtctgggctgccccaggcctggagtagccccctcccaggcacccctctggcactgtcatgggcatcacctatgccttggagcgacttcatgggatagagctggagaagctgaagtcagcaggagattaattaatcaaaacccgaacacatctgctgttaattaattccatgccaaggttaactcttccctctgggcttcccctccccttggtgggaagaaggaaataatggtgggagacagcacccccttaaccttcttcccttagtgggaaacatgaagaagggaggggaacgtgaagggcagggcagtttctggggtaagaaagcagaagaggcagggcccccagagggcagggcagcctcacccatgtgggtgctttttagcggtggtagggggcgtttgcttttgagagtcagggtccatggcaattagtcatgagtcctgaggaaatctgagatggacaaatatctttatttacagcaacagatagaacagaccctccctcccttcccttcctttccccttccagtcttttccatactgttccccctcccgccccaccccaggctctcgcctagccctgccctctggggtcactgcgtgggttaggcccccaaaaaagcctaggaaaggagactggagagggctggctgagggtgggtggggcgtctcttcacatttttctgtcctctaagcctggggtggaggagagaggcaggcaccaggagcagggagaggtagagagctacggccccaccggcccaccctccccaagtaactttcacagtgttccccagccctggctgccccctgcggtccccaccccagccctgcccctaggttgtcctgtcaggtcctcagcaatgtatgaacctggtaacccagtaaagagttcaggcttctctgccatgggcccaccacccacggctgaggaggtggcccctctgagtgccccccactattttcaaggctggggttctgagaggacatgggtgggtaggagaggaccagggagagggggcttctcaagccttgtgtgacagtcctgggcctggccccactcagagggaccctgctggaatctgcaggggcgccaggctggcttagcccccgacagaggctcaggaggagaagcagagcccacagcactccatgcagatctccaggcagtccgcggactcgcagcaggcatccaggatgccgcagtccaggtcgcagggcaggtcgcagtcggcacactcgccagagccacagcagcagcagcagaggcacgagtcctccgagctgcaggagccacaggtggcgcagtccaggacgatgttgcacagcgtcaggaactcgcagaacaggcaggacaggatgcagtggacacagcagtctgcggggtggcggtggagagggggacgggtgagagaggggagggatgagcgtgtgtgaaatagccgggggtgtgggggcctgcggcagcggcagcagcagggacgctgagtgttcactgtgtgcctgaagctcacgaatccgtccccacagctccattttctaggtgatgaccccgaggcacagacagttaagcacatcggagcgggcagtctggatcatccttgctcttagccaccctctgtttatttgtttaaccaacatatggagtgatacatgttcttggcactgttctgagtgctgtgcatgaattacattcatttaggcctccaatgaatctatgaggcaggggcctttactagccccactctacagatgaagagactgaggttaagagaagtcggccgggcccagtggctcatgcctgtaatcccagctctttgggaggccgaggtgggcggatcacctgaggttaggagttcgagaccagcctggccaacatggcgaaatcccatctctattaaaaatacaaaaaattagctgggcgtggtggcacacgcctataatcccagctacttgggaggctgaggcaggagaatcgcttgaacccaggaggtggaggctgtagtagtgagccgagatcacaccattgcactccagcctgggcaacaagagctggactctctctcaaaaaaaaaaaaaaaaaaaaaagagagggagagtagttaagtctacacccagaatcctaccacctggctcatctctcacctggacaccttcgacagcctgcttactggtctccctttgaccactgccacctggcatctccactccacaccgcagccagagggatcctttagaaatacctgttggatcctggccctcctctgctcagacccctcccatggttcacatgtcgcttgtgataaaagctgaaatctttgaagtggcctctgaggccccctgtagtgtggtccctgtgccctcttagttctcttctcccactcttctcctccagatcactctgctctggccacgccagcctcctggctgctccttggccatgcaggcgctgattcctctgcctggaacaatcttgccacaggcacgtgcttggctgagtccctcatctccttctttgcccaaatgccacctctcaccgaggccttccaccacccgcttcaataccgcaaccggctggctctgcctcacactccctgcccggccctacctgactgccttcttcttccctcagaggacatcgcctcccactgtactacacggtttcctcatattcattgtcatctccttctaccggatatgtaagctccagcagggcaggcatctttgcccattttgttcaatgaaagattacaagtccctagaacagcgccagacacatagaggtgctcagtgaatagaatagaaatgcatgaagctgcgctgggcaccagctgggaggtggtggagctgggacttgaatccaggctgctggctctagaacccacgtcctgcagccctccgtgtgctggggccaggccatggggcaaagcgtgcagctctcctggccagggggccccctgggaggttcactgtgctgtggagggtctaaccctgttctcctgcattcctgtgtggagggaactagggtcttgtgatctctctccaaactggatagggtagttatcttcaaacgtaaatctaatgaggtgaccaccttgtttaaaacccttcagtggctccctactgctctccagatagtctaggcttactgcctggttggtaaggacctcccaggacccctgcctgctaggagtctcacctttggcagttcaccctccagccacactggccatttctcagctctgtgcgcatgctctcctggctggagcctccttctggtcttttaaggcatgttcagacatcacctccaagccttcccaggattccctccccagatttctgggctggtgtgagtggtccccctgtgtttgcgtaatcctctgcatgagtttatcattgcacttatcacatcgtatggcgattacctatctacgtctctcatgagagctttatgaggtcatgaaccaggtttccagcacatagcaggtgcctaggacatttcattttatttttctttgagacaaagttttgctcttgttgcccaggctggagtgcaatctcgggcacgatcttggctcactgcaacctccgcctccggagtagctgggattacaggcgcccaccgccacgcctggctaattttttgtatttttagtagagacagggtttcaccatttagacaaggctggtcttgaactcctgacctcaggtgatccacctgcctcggtggatcccaaagggctgggattacagaagtgagccaacgtgcctggccaggacattttaaatgaataaatggctccttcataaataagactgttgggactgggcttggtggctcacgccggtaatcccagaactttgggaggccgaggcgggtggatcacctgaggtcaggagttcgagaccaagctggccaatatggcgaaatcctgtctctactaaaaatacaaaaattagctgggcgtggtgggacgcgcctgtagttccagctactcaggaggctgagacagaagaatcgcttgaacccgggagaaggaggttgcagtgagccaagattgcgccactgcgctccagcctgggcgacagagcaagactccatctcaaaaaaaaaaaaaaaaaaggaaaaagactgttgggcagaatctgctttgcagagtgggaaggtttctgagcatgttatgtgcaagtgtgttttgcagatgcccaggccagggtcccttcacatggacaggaatcactggaacattctgaggtaaaggtcaggccatcactgagctcaggcagctgttggccatgttcaattgatggctgatgaggaggggactggctgcccctgtggccctgcagaggatctttgtgttgtaggcacatcggctggttgggtgtctggatcctctgacctcctactgcaccttgcagccctgccctggcaccattttattctgctacatgttcttttttcctcccttaacagaaaatttctgtttccagaaacagagtggcttaagatggatcaacccaggtggctccgttccttgtcacagcaactctgggaaagaagggatggggaggggtttggggtggggtggggaggtggccttgagaaggcaggtacacctttacccaacgggtgtactttgcaaggttctaagatttggtcatgcgtcaggttccctgcagggcttgttaagctccaccagagattccaatccagtaggcgtggaaggaggctgagatcctgcatctctaagtaacagcctggtgaaggtgctccagtgggcccatgcgtcatgcttcgaggaacccggctttggaggcctctcccagggagagatgggatgggtgcttaccttcctgtgcctggagggggatctgggaggtggtggatttgctgctgctcttactcttcttgctgccctggctggcgagagatgggtgtgtctgcaacttccggtgggccttggggccacccagggcaccattccccgcccgtctggtgccgcccagctctgaggggtggccagagtcattcggcagaagtggggtgcagcccaaggggttcccctgaggctggcctggagagatgaagagaaagtgtgatgggaaaagggtgggggtcattcggcccccagagctatgctcgaatcctgcctgctgcattcttacatataccccaaagcacccagccagacctgtatcctgcagatggggaaactgaggcccagagagaagaaatgactagtccagagccacgccatgaaattgagttgggcctagctcctgactctcagttcagtgctcagtccagaaatgacagatgtataagggcaggggctcggagccctggacctctcctttgttcctcacacaaagtccattctcctgctcttgtcatcctggggttttggcagagtggtggcagtggcagtgctggggaagaggggtggtttggctggggttgggagcgcagcagtgaagaagttaatcttcacctcggcctctgccaagcccccagctgttattgcccttggcgcactgggtgatttattggaaacatctgtttggagatgaacgcctggctctggaatccaggggctcctcactgcagcccctctacctcctgctccttccacctggtgcctccactcaagcctctgccctccgcaccctcaaccccatcctgcctctatgggcagctggcagaggggtctgggagaggagggagggaagaaggcaagaagaagggcagtggggagacccctgaagccaggacccccgggtccccattgcaggctgagggaccagacttcagctttatcaatggagtacaggcaaggtgaccctggagaccccccaaaccccgaattccttcctgctcctcgctcagggatgttcagttctgggtgagaaccagctggctcagttctgctctcaagagatgaggggaggtgtgtatggtggggggagtgcggagggactgaagaggggtcactgagagctctggggcccctcagctgtgcaggggtcctgactcctgggcaggaccctgtggcctcaaggaccctctgtaaatgtggggggcacttcagtccctcaggagctgggatctggatccccatctccctccaggcctggtctgtgtatgtgaattgtgtaggagatgtcttgggggccctggagcccaaggagaggggagggtggcctcggtgcctcccttggctgaagaggccgggtcttccagtgatggcagcagtcacaacattgcacactgcctgcttcctgcacgccagcccttctaagtacttgctgctcacgcatcccctcagtattgctagtcttcttttactgatgaggaaactgagtcccggagaggtagaggtacagtaagttgcccaaggtcacatagctagcaagtgtcagagaggtacagtaagttgcccaaggtcacacagctagcaagtgttagagattaggagctggggctcagagggcagaggccagcatgggggcagaggctgggagacaagcgactgaggaataagctgctactaccacgacaatcactaccctcataactggtgttatgtaccaggcacagtgctagaagctttaggtggagcagcttctttttttttttttttttttttttttgagacggagtctagctccgtgcccaggccagagtgcagtggcgcaatcccggctccctgcaacatccgcctcccgggttcacaccattctcctgcctcagcctcccgagtagctagggactacatgcgcccgccaccacgcccggctaattttttgtattttttagtagggatggggtttcaccgtgttagccaggatggtctcgatctcctgacctcgtgatccgcccgcctcagcctcccagagtgctgggattacaggcgtgagtaggtggagcagcttctttaggcatcgcaatagatctactactggccccatttcacagatgagaaaacagaggcccagagaggggaaaacttgccaaaggtcctctagctgggaagtggagtggggagggcatgaagattgggagaaaggagctgaggacaaggtgggggatcgggggagggtgggaagcagggttctggagaggctccatgctgggagcctccagcaagaggtgtggctgatgcctgcatctggataaacagggttaaggctatggttagtggccaggcctgaatcatcaggcccccacctcttggccccacacagggtgactgggccaagtccttggccagcttcggtgccccttgcccttctgccgaaacatgggcacactgaccagagggcgggagtgtgtggtgagctgaaggatctgggcgacgtggacagacacagagcttgtctgtggccatggccgtgggggctgagtcacagagcaaacactcagggctcacagacacaggagtgtctgtcccattcccaccagaccccctcctccactgccaaggcgctgacctctttctctcaattctgctagtgggtgtgctggaggagaccgagggccgtgcactagtgggattagtaagcctgacttccagggagtccagcttagccccagatgccctggctggaggaggcttccagctcagccatgccagctgggcatgcaggcaggcactgcaaagagtgttgggccgggagacctgagtttcccagcttgggaccagggtgggccgttctctgtgcctgtttcctcatctctaaaatgggcttcgcagtagccatcctgctgcctcattgcaggctgattaggagagcaagtgagcccactcagggaaagaaagttggaaagtaaaaatgtgtctaaagatgtgggcaaatcttcgttagttataaaatgatcccagctgttgcttctcctgttcttgagggtgaaggtggaaaattctctccctccccccaggacctccttggagaactcgagccaggcctgggaatggagctgaattttgttcctttcgccctagagcaactgggggcttcttccttttatccctgattcccggaaggatggagatgcatcaggccctggctccctgccggaccccagccccgtagctctcttcctgaggcagggggtgcctctctccaggtagccgcatgctctctgtcctgagccattttgcctggagcctgcccacactccctgcttcctagtcactttgcagtggaggtcttccccttgacagaaagcacagtgacagtgcccttcccctttctgctgcctgtgctgccacactcaaggttctggccaagcgggtgcacccatttttgccgacccatttgggttgagttccctagtgcaaccctacatgttgccatccaacctcctggccccctaggactcacatgtcacagcttctgtggggacgtcgaggtcagtgctgtccaggccctgggggatgccagggccattgccttggggcatgggggttgccgcctcctccagggagccctcctctggtgctgcctccgcagggtgagtggatcctgttactacctccagcccaggaaggagggatagggtctgggctaggaaaaaagcagatgactgaggtccattttcctggggccttcctgtttgcccagccgtgggccccgccccacagcccagcatgcccactgaaccctcattctttgtctgtctgcatcagttatgcagcccttactctagctgacaacagcaccgggctccaaaatagaaagctcccaaaccacaatctgggagtgagcaagggtgtgcatgcatttgagtgtgtgcacgtgtgcatgtggtgtcgggaggggcagagatggcagaatataaagagaagtagggagaggaggcagaaacacaacacgggagaacagacggacggtcagcaacggagagatagggacaggcatcgagagtgacagggagaatcaaagggacagtgagaggtagaggtaaagggagatagagcatcggactgcgagagattgggcacggaaaagggatccacagtgacccagtgacagacagcctgagacgggagtgagacgcagcaatagcacggaagtcagtaatggagagaaagatagagatggggcaggggcagaggcgacagagaaggtagcactgtgtgatacagagcgcggagggagacgggagaaactgggtcagagaggatgatgatagaggagtcagaggaacctgggggtgaggagcagggaggggctacagtcaggaggaggacaaggagccggccggagcactggggaagaggtgaaccgcagccacatgtaattacagtggctctgtgcaggggcggcaggaggcagaaatggagccaccttcaaacccacagctccccagcctgcaggactagggcccctaggctcagggggaaaagggatgggggatgggaggtgagggagggaggaagaaaggggtccgagcgtccacacactcagccaggggtcaggggcgggcccaggctgtggcaatgaaagggtgtagggtgcagcctgggcctctcatcagacctcagcctatgcagttagttggaaggacaggggtctaaagagggtggccttccacctgccccctccccaaatatcatgttgggagaaggagcaaggagacacagaaacaagagactcagagatgcagaggccaaaagagcgcagggagaggcagggtgacacagagggggacacaaggagaggcagggtgacacagagggggacacggggagaggcagagtgacacagagggggacacgggcagacagggagatgatgagaaacagcagggaagcccaaagagtacacaccccacagagagaccagaaagaggcacatgcagagacagagacacagagagacacagggtagtcttgggaattgaaatggaatcaatcacagagaatagtgaggggttgacacagagagggagagagtgggggtgggggagagaggcaaagagagggagatgagagatcaaagaagagaggagggaggtaattagagggatcagtggaggcttgggcatgcaggcctgggggatgggagttggaagcatgctgaggagaagatcctgtggcccagctgcctccctgggcccagagcacagccttctgtggccatgaccctcagtgaccctcatgacccttgttccaaggggtctggtcccccacagccaggggaatggacgccccagaggccccatgtgggaagcacagagggcggcaggcccagcaggcatgctctcacctgcccagggaaaaaccacagggcttgcctggagacaggagctggggcaatggggagggagggctggcgctcctaggatttgtgcagggcaggagagttatgtgctgggaacccttcccggggcccatggctccacggaggcaggggtgggttcctttcagctccatctgctctttgggcctgttgagagctcccctcttagctgggttaatcattgggaaatcaaatagcttttggacgatcagaggatttggacaaggaggagcaggcaagtggagacgctggtgctagatggtgcctctcctagccctgagcccggtctacaccagctcagatatggctcttgaaggctaagaccaagttgccatgaaaagggaggctcagggtcctaatttccaggaaaccaggggcctgcctagctccggaccctggcccccagaggcaccttgctatggccctgggccctgaactgggggacctgactctcccacagggtgtaatgagacagaaagacctgagtgagaagcagaagatccaagccctacattcaccagttaccagcctggcaaattatcagagttgggttactttgcatggaaagggttgggttactttgcagtcctaatctcatgccacagggtttcaaggaggaaagaaaatgctcatcagggggttgttcacgagcctttcacccacagccctactactcttccctccttcccttcctctcttctttccttcctccctcctttctctctctcttttttttttaatgagtagtttggcttctgacctttccccttccttccttccctccttccctccctccctccctccctccctccttccttccttccttccttccttccttccctccttccctccttccctccttcctgtgctgtgtggtttaacatttattaagcacctacgaggcacccagcaatatgacaagtattgggtatacccgagtgagaaagaccagctcactgcctcggagttctcggttaggggagaggtgggctggtggctcttacatacccagaggtgcaagagttacactggggcatctggaagaatggtggaagcacagaagacgggcacctagcccagatggctgagtgtgtcaagcaggcttcctggggcaggcagtactcacactgagtcttgaccaatcagcagtacagagggggagttttgagaagagcagcaggaatcaagacccccgagtgagccgctacacagagagcaaggaagccacatgctgcggggtggtgttgaggctgggaagcctagaatgatagcagggcatgacaggccttgtggtcatttcccaggcttcctgctgaggtcaccagggctcacagaggtgacactgtgagtcctatggtagagagagccaggacttctgctccctgccctgctccccctcctccccgcagtgttagagagggaggaaggcaaggaagagggtttaaggagcctggagttcacatctccacctgccttacccaaagtgtctctgctctctgggcagcctctcctgacagtcacctacagggctggtgaccttggatctggtgggaacaggaaattacagagtgcagaccaaggcccgaggaggcccatcccacagaaagcctaccaggcatcagaccgtggaggaaaaatgaggaaggaaagaaaaccaagtccaataatcctgacctggagacacacagagggacagagaacctctggagccaggaggggccacagaggggacccagcaaaccagcacggagggcagaagagggagctgtgccagatatccagagacagggaagcagaaggaaaaggaagaagcagctgcaggaagacctggtctgcagaggagacactgcccgggtggcccagacccctaggtgtggactgagaagcagctcctgcttggaacagatggggcagaggcgccaagagcccactttgccattctgtaaccaagagacaccgctgtccagccacagaggggagaacatctcaggggagaaacttctggagggtggaagtgtggggtgggcaggaggcaagggggtggccagcaaaggtgaaggaggccccccgtgtggatgtgcaattcatgtactgcagaaggtgcctgccaagggggtgagcggatgtggctgaagtccttgccctcctagtaggtgccatctgctcacccaactgcgcacctgctccatctgaccaagggggttcctttttctaatctgcaccgggtgccacacatgctggctccgagcagaagcccccagccctgtactcctcctctcaagggtggctatctacaaaggggagatacggaaaggcaacagcccctttgcttcaatacactctcattcctaacatggggtaagattctggtaaatgcctggagctctggaaagacgccccagatgggagtgggagagccatgtttaaatccatgagcccaagaggaaaggccgagactcacaccctcagcaaggactctgtgggttctctctgcttgccatccaccaagttgaggggtggtcctggaccaacagggagtaggggggaacctctttccggtgggatggtttcaagcctgcacagtgcccatgggagtttcagccaaaaaatccctggctggtgtggagagaggcctgtgttccagagctccacggcctactgccttaagtttagccctcgtcattgtctttgtggaccgtggatctgggcttcccacttggaactctgaccgtctctggagagggaaggccagaacctcatatggtcagagagtggtggctggaaccccacacctcaatctttccttggcttggcattcaaggcctcagtccggaccttcaatctatcaatgtaccaggatcctgtgttccacgcagaccggcctccccatggtctgggccattgccggatcttctgaccagtccacccatgcttatattattcctgttgaccagaagatcctacccctcccactctccaaacccaactcatcctggaccaagctcaaacttcacctcttcctctagacagctttctctgacccagttgctaagaatttagctccagtgttccctcttgttaattacaatttgctagtgaaatcccggcttctcaaccagactacagccctcccaactcactcccttggagtggtgtccatattcatctctgcatccccagggggcactcggcaaatgcctactggggagtactttctggagtttggaatgcccctgtcaggggaaggagaaagagaaagaaatgaagactaggggtggcacctggacctgaaccccaagaaagtcagagagggtggactcctttgatgcacacatggttgatgcgaatccaatggtcacactcccaggccaccaagctgaaaactaaagagggcctgagctggccagttagtctgggacaagttggttttattttaggtctgaaggttccaaatccccaggaaattcaatttagaaccatgaacaggaatgtgacgccccaatgctgggcaaaaatgtgcctgtgggctagggagccaggctcccggggctctcaggggtgggtggggaggaggccactaggagagccaagggtgtgggggcttggccacctgcccctaccagatctgccctgagtccccttgtgccctgtctgcatctggggtggctgagggaggaggccgacttgctccctggctgtcctgccagcagagcccctggggcagcgctgtggccttgctgttctgtcagcactcagggagtaaagcgtgggggattctggtctcaaattcaggcatctgtggggttttggctgggtctcctgcggtttgggcttcctgggcagcaggctcattctcccaaggcggtggcagagcgaagccttgagttatgaaagccgcattgtctggcccagcccaggctggggagggggtctgctggggtgctggggggcctcaagttacagcccagagcttaaccctcccagttgcccacgctggccccggttgtgtgcagttagccctctcctcttgctgctggagctgagaatggcttcaacaaggaaggggatcttggaaggaggtagtggagggagagcagagaaaatggataaggggagggagaaagctggagagagtaagaggatgggagagcaggaggctgaggaagggaggaggcaggaaggaggcccagcgggacagggaaggttcccagacacagagaaggacccttccaagtgccctgcccccagctgtccctccgggctgaaggagtccaattcttggaggcgctcatcctgcagaaggccccgttgcaggggccccacagagacagcaggcaatttgaggcttggccaagatgggctgtagacacactggcctcatctatgtgctggctgttggccagacatcttccacttgtcctcactctggtttagaggaccccccacctccacaactaggcgtccataccaagtaggtggggagtggagaggggcctcctagaacaggcaggcaggccggcttcgagggcgcatgtggaggctcaggccagagaagggaaggagcttgtccaaggcaaggcagggagttcgtgtcagaggttcaggaacagaccttcattattcagagtcaaagaggggaaagggggaatggcgctggtggggaggaaggcaacgacttagacagtggagattccaattatgaaatccgggtccacactcctgcacgcggttcccctggccctgaacacatcccagaggttcctgacttctccttgacccggacttccatttgggagcttcggcttaggcatctggccagtgaggggaagggactgagaaccagggccggcgaggcccctactccaaaccccttcagggagtcacaaaccgtacttggcgtgagaggctcccccaggaatcgcgggtaggttacagacggcgccaggcgcgggacggggcatttcacttgggctgaagacactgggttggggtgcgtgtgtgtgcacagggcaggggcggcggggactggccggcacgagagggaaggaaggcgagggagaagggatggcaagaaagaggggaggggctgggtcctgcagccgctcgcggcagacaaaagttttcgggaagcgctgggctctggttgggctgggggaagggaagtagagaaagattcagacaacgccccctcccccacaccaggcccccacaaatatttacacactgggcagaaacagttgagacacaaatcccagacggacagacaccgcggagtgtatgtgtgtgtgtttgtgtgtgtgtgtgtgtgtgtctggtgtcgggagttgcggggagttggagccaacttggcgcagccgcagcctctgttcagggccctgcctccctcgcccagccccctactctccttggaccaagtcctcaaacccagacttttcgtccctacccccaccaagctccctggaacggtctccccgcgtctggggacggagaggagaactaataactggccccttcagccgcccacccgcccctgtccagcttcgctcgccactcccggtcctacctgggcccggggctgcgctgggggctccatagggcgcgtcgcagccagaggggcgctggccgctcacctggtacatcggccccggacctgcggaaaacagggctcagcgggcggcgccggaggcgggcaaggggcgattcccccgcagatgcgcgcctcccacgtccactcactcgtgcgagccgtgctacgctctcttccagccggatccccgcgcggggcccgccatgcgcgcctgctccgggcgcccctgcccaggtcccgctggctcccgggtgctcgcctggcgccccttcccctctcactcgctgctttctcccatttcggcgccagctcacgccgttcgccccttccttcttccttctctccctccagcccccctcgctcctcccctactcgcctctcccctcccctcttccctggcccaccctctccccgccccctcctcgccttctcagtcgcccctctgcgggtcccctcccccgcgccgggcttggcccagccaggagccggacacgtctgtccgcggggcgcccgaggcccgagcccccacaggaagccggctgggcgcgcttcctccgcgctctcggagcggggcctcagtctccccgactccctgctctctgaggcccggagatccgcgggctgcacgttttcctttgcctgtccaaactctgcaaaagtttctggaaaatcaggagaaagagagaaacctcaaccacttcgtggaactgtctgaataattgcggcctccaaatctctttgccccaaagatgggcgcgatcaagtttctcagtcacgttttacccaccccctcggtctcctcccggggtcctaagccagggacagggatctgggctcccaggccacccgcccacagcgccagagttgtctgtccgggaaatccggttagtgaccaaccagcctgccctgtgccgcagcagcccagagcatcctcgaccctcctgcccctaccagctgtgcgtgggaatgtgtgtcagaaaaccgactttgggggcaaagagaggtcctccgaattcagcccttctttgggatccagactgaatccgagggcttctaagatgagggttcggggagaaaggggagggagggagcctctcccggtggggccagccgggcggcgcgtctggatggtgagccgtggtggtaggaagaagccgctgccaggcagtccaagagggttcaggggccctcagcgcgaccccggaacctggtccccgagaatggggaagactttggagcctgcggctctccaggtggggctgggcgggcccgtgggatgatgctcaggtggggcagccccctggggtgacagcgtctcggccgtacttgtctagggccgcctaggagccgcgtctgggctccccgccacgagggccagtgagcacactggaaggcagcggcggcaccaggccaccttttctagtcccgagtccagccgggtctggaagtggagagctgggacgcaggaggccgggcgtcccagctccccacttcttggactctcctagcccccatagtcgctacttacggctatcgcaggtcctggggcgccgtcggggccaggaccgggatggcccccacggcgccggcagcgctctcggcacccgcggccacgtcccagcgatgggctggggtggttgcggcccggaggaaggtggggcgggacaagaagagagtgttccgccccccaggccgggctgctagccgcgggggtctgtcctagtgccccaggagccggccgggatccggctgctgtccgggagctctggagagctgagccaactcccgcttcctggcacgggctgagtcacccggacgggacgcgcccgcgcctgggcctggcggctgctgcattcttacctgcttacctgggcgcgcacgctgggcctcacccacctccgaaggcaatcctcaccgtctctctccgtttcctcccgcgtatagggccccctcccgaaccccagacctcagtgctgcacccctccccctgctttctcgtctcaatccagggcccctaaactctgcatcagctcagtcccggagccttactattccaagtcgcctgcttgatctcaaaagtcctctgaatctggcccagtactaatgtctgttttgttggaaatgtaaattatgctttaaatttaatcacgcatgctggttatacaggtgtgctcattttgtaaggatgcagcaagctgaacatttatgatgcaggcacttgtttgtatgactattatacttgaataaaaagtttttaaaaatcaacacattaaaatcaacattccagttcagagcatgataggatatgatggccaggctggaggcctggcatgggagcccagtttccagacccaccatctactatatttctttggggaaatccctttgcctctcagcctcaggagggatgagcactggggcccaggaccaggactggggtgaggtaagtgagacactcacctggtgtgcaagatttcggggatgccaagataaggaattttttttttggaggcaggattttgctctgtccgccaggctggagtgtggtggtgagatctcagctcattacaatctccacttcccaagttaaagcagctgggactacaggtgcttgccaccacacctggctaattttttttagtagagacggggttttaccgtgttggccaggctggtctggaactcctgacctcaagtgatctgcctgccttggcctctcaaagtgctgagattacaggcatgagccaccgtgcccagactgatgaggaatattttaaggcaatattttaatataccaaatgggcaaactacagttctttgggccagctgccttgttttttttaaataaagttgtattggaaacaggaccaggattaaggtaattaatcacgcaagttcagggtcagatcctgtctttatctaaaatgttggcattttgtttatcatagactttttggcattaatttggatttttatacatattgcaggaaaatattgttttatcttaattactgagttttttgatgcccccttaagttttgaacctgagccaagtgcctcattcactccaggtttcacatgcctcaccctagacccggccctgttattgtctcttcctgaaggacctgtccaggaagccagggtaaatgaggggagatcaaaggtgttcccccacccaacactgtcacacacacacatatgcacagcaccaagtgggctctgcacccaagcccaggcccagcttccccggggcccaccgatcagttcagaataaagcgcaaagtccctcagtctccatgaactgggccccacctgccttggccctcatctccccttacttattccctgccagccatgctacttccttttctcggttaatttgccaggcaccttctcgcctcagggcctttgcccttgctctttcctctgcccagaatgtgcatcccctagatacccacattggccctttcctcgtttcttctgcttatgtcagcttctaagagaggccgtcccagacttctcactctctgcccccaacaccattttattattctacccagactttttcagcacttggcctattctatatttgctcatctgttggtagagtgaaaggccctgagagcagggactggcttgtctactagtgtattccctagagatgtgtctgccacagagagtgcaatacattttccaatttcagaggttggaaaacagaggccagagaggggaaagagctaatgcaagtcatgtagtgagttagtggcaaaaccttaccaaatcccaactttccagactcccacctcagtattctttcctgccttccagggcttattccccactctccaccccagagccttccaggcaacaaaggggacagaactgccttgcacgggctctgcccctcacaatacccttcaaagtggagcaggccagctcacaactcctcccttgcagttcattccgcaagaccacaaggtctggcccagctccagcctctggcgcccacccctccttggtggccagcagaacgcacagctcttcccccacttcctgtctctggcagagggccagtctgctgggctggcttctgcagctggaccacaactgtggtctcagtgcctggagaatggggtcaggacactgggagaatgggaccctcccggaagagggatgcataaattggggcgtgtttgtgtggggtgaggagaagctgctgggtggggattgagagcccccagctctttctttctacccccatctcggatgggcactgagcagagaatggggctctaaccctcccccttcctgaagaaaagaatgtgcagtaggatgaagggtgctctgggccccatgcctgattctagccctccctgctacccctggtgatggaggatgacggtggcgtgtcaatttcagcggtcatgtgttgagcgtgttctatatgacgagcctttgccagatacttctagatttgttatttcctttaatgcctacaacagtcagcatagttattaaccccattttacagatgaggcaactgaggtacaatgaagtgatgtgaagagacttacccactagtaatgggtggagctgggacttggaccatgttttctgaagccaaacacagcactcaccccaatcccaggcatggccttcagcgtgtagaaaggactgtgatgttctctttcatgtgctgcccccctccccaagctagttgctgaagatagggacatggccctctgcatccctcctctgtctcattgtgttggggtaccaggaacttggcagggtatataggaagaatggggcttggatctgtgtcatggagaccaaatttgcatcctggctcaatcacttctaccaccctatgtgattttgagcaaatcacttgaactctccaagcctttagttctcctgtttaaacgtggcaaaggcgttggctgtcagcaaatgggaactcttgcccaccacgtccctccccaggggagggaagcttcaaagggcaacatttctgttatactaagttttatttacaaacccttaacctcatacttatggtattttattttatttatttagagaccttgtctcaatgagctacaggtgcatgccaccatgtctggctaattttattttattttactttatttttgtagagatagagtctcacttagttgtccaggctggtctcaaactgctggcctcaaacaatcctcctgtcttagcctaccaaaatgcagggattacaggccatttcaacaatttttaagtgtacaattcagtggtaataattatatcacaatgttgtgcaaacagcactaccatctatttccaaaacttttcaccacctcaaacagaaactaactattaagcaataactccttctattaatttcttaggtctgtcatgacaaagtatcaaaaactgggtggcataaactggtagcaatttattattgcctgatagagttggaggcaagaagttcaaaatgaaactgtgggcagggctgtgctctctctgacagctctgggggagaagtcttccctgtctctcctagcttctggggcttgccagcactccttgaatcgccttggtttgtggatgcattgctccagtcacacggctgtctctccctgtgtgtcctcacatcagtgtctctctatatatgtctgtgtctgagtccacatttttttttttttgagatgaggtctctctctgttgcccaggttggagtgcagtggcatgatttccactgactgcatcctctctacttcccaggctcaagtgatcctcccacctcagcctcccaagcagttgggattgcaagcgtgcactaccatgcccggctaactcttgtatttttagtagagatggggtttcgccatgttgcccaggctggtctcaaactcctgagctcaggagatctacccgcctcagcctcccaaagtgctgggattacaagcgtgagccgctgtgcccggcatgtccaaatttttgtaaggacaccagtcatattgaattagggatcatattaacctggttaaatctgcaaggactctatttccaaataaggtcacattctgaagtaccgggaggtaggacttaagcatatcttttggatttttatacatattgcaggaaattacacaattcaatccataacactccccagaaaaagctggatcaaagtagaaaagtaaagaagtgagatgaaaagtaagtgtaaatgaacctaatataaataaaagtaaatgtaaatatatgtttcttcctaaaccccactatggagacaatgatgtgctactgaaggaatatatgtatttaacaaacaggcttgccttaccctactggttaagcttttcctggagcccacatttctttgaaaatctgatgaaagctataagcaccctctccaaaaacctcccccttaagaaaatgtagcatttccaatacaagctggggagattcctggacaccccagaaagccccattgaagaatatttgccgtaattggaaggactgctccaagggtggaaactcaggcatctggggagtgctgttggggatgggaagagagaattgcatccacctctgtggtcctgtttccagtctgtaggtgttttttaattatttgtgtatttatttattttttgagatggagtctcgctctgtcacccaggcttgagtgcagtggcgcgatctcgctgcactgcaagctcctcctcccaggttgacgccattctcctgcctcagcctccccagtagctgggactacaggtgcccgccaccacgcccggctaattttttttgtatttttagtagagacggggtttcaccgtgttagccaggatggtcttgatctccgacctcgagatctgcccgccttggcctcctaaaatgctgggagccactgcgcccagcctcaagtctgtaggttttttagggtaatctaacgttattgaagacaataaataaggcaaaatcgatgggaagtatagaaagtgaattgagtcggattatcaaaaagcacttcctagtagccaagagaataagacaggattgtgggtgaggagggaggtggagagtggaggagagcattgggtgggtttttttttgtgtatcctggtctctgaagatgcccatgaactctagttggggtgacaggtggcctggcctaaagcagtcaagctgatgggtgggatgatatcagatttccactaagggggaatcactgagagtttgggtttggagtttcctttctgctctggcccttgcaataagaagaagcaaataagtttcacattaattaccccatttattgccctctatatcaattggagcccaatcaggaaaatagaaggcagtctaggcacctcaaggagaagaccgtttaatttagggagttggttacaaatgtcttggaaaaatgaatgagcaaagggagaaggcgatgctctgagttgagggagctgctactgcccgtgggctggaaccagaagcacacacttgctggttagcagctggaagcactgccactgccgaaacaggcctgctgccactgccgctgccgagacaggacgctgccactgagccacaaccaaggagcctgccctcccagggatgctgctggaacgcctaccctagggccgccatggctgctgccactgcggaagtcacctccagaagcagagaaagctgctattcccttcctcatgccttcccatctctcaccactttatcccattggctgaacttaactggagttcaggaagtgtcatttgcaggctcccaggccctgcaaaagaaagataggaaagaatgaatctcagagccaacaggcaaaggaccagcacaccgtagtagctaaagcggaccccagcctctttctctcctccctcccccagattattgtctttcaacctaactgcttcacagcctttacactagaagtaagtgcattgtttgcaaatgtgttttgtgtctcccctcactagaacagatcgccttgaggacgggattctatcttgtcttctacactttctccaacacttagaacaggtgcctgagccagtgctcaaagaaatgttcttcctgactacttttgtcctctctcaagtagagagaagacagagtctaaccctgttgcccaggctagagtgcagtggcacgattacagctcactgcagcctcaacctctgaagctcaagtgatcatcctaccttggactcccaagtagctgggattacaggtgcacgccaccatgcccagctaattttttttttttttttttttttttgtagagagggagtttcgccatgttgcccaggctggtcgcggactcctgagctcaagctcagcctcccaaagtgctgggattacaggaatgagcccatcccactctctacttttaatatacaaagaaaccaaggtctagaaagctctgacttgcccaaaggcatgcagctgccatgacatgtcctgctggccagcctcagaaaggtcttgggtgaggacagggctgacttggcagctgcccactccctgccatacctctgggatctggctgccccaagcaaactataagccatgacgttgatgcctttttcacgtttccatgtgctcttggagctgagggcaagaaggggtgactcagccgtgacctcctatgggctggtaacttcattctgctccaagaaataggacatcccggtggctctgccaaaagggccatgatggaaatcagggcgtagcaactgaggcagggactgagagacaggcacgaggcccgtgctggcccctccctcctcagttccccagggtggagcgctcagtggcagagtcaccgctatacctatacttacggcgaccatatttcccaaaccaaaagttcttacatgtggttagacacatatgactgtccctatgagggaaatgggagagagaattagacatagtgtctatcctaaggtttttcaacctcagcactattgacattttcgggctggatgattctttgttgagggctgtcctgctcattgtaggatatttagcagcattcatggctgctacccaccagatgccagtaacacccccaacccccagtcatgaaaccaaaaacgcctccactagacattgccaaatgtcccctggccttggggggaggcaggggttcaaaagcactcctgattgagaagtactggtctgttcttgaaacccagcgtgtattctattctggactgtctaggggcctggagatggtgcccagtctgatagagaaatatggcccttgtccctcaagggagacaggcacagtcctgtctctagtctaagggtagaggtagagtcctgcccttggggaactcctgagctaatgggggagattggacagtagtccctagacaggttgaaaacacagtggtcaagagcatggactttggtgccagaatgcctgaattcaaatcctgggtctgccattcatagcataagttacctctttgtgcctcagtttctttatctgtaaaatgggcatagtgatagcatcttttttttttttttttttttttgagccagagtctccctctgttgcccaggctggagtgcaatggcgcaatggcggctcactgcaacctctgcctcctgggctcaagtgattctcctgcctcagcctcctgagtagctgggattacaggcgtgcgccaccacgcctggctaatttttgtatttttggtagagatggggtttcaccatgttggtcaggctggtcttgaatttctgaccttgtgatctgtccgcttcggcctcccaaagtgctgggattacaggcgtgagccaccccacgcagccgatagcatctgtttttagaattttattacatttaaaactttttgtaacaaactttattttttaggacacttttagatttacagaaaaattaagaagtacagagttcccatctatgttactgccagttttcccaattattgacatttgtttcaattaacgaaccaatattgatacattattagtattgttttaaagcccctagttaattcatattttcttagtttttacttgatgttctttttctatgtcaggctcccattcaggacatcacatcatatttagttgtcatgtctccttacgctgctgttggctgtgacagcttcttagacttttcttacttttgatgaccttgagagctttgaggagcactgggcaggtatactgcaggatgtccttctgttggaatttgcctgatgcgtttctcatgattagactgggcttatgggtttctgggaggaagaccacagaggtaaagtacaatagtcatgggccaggcacggtgactcacacctgtaatgccagcactttgggaggctgaggcgggcggatcatgaggtcaggagttcgagaccagcctggacaacatagccgggtgtggtggcatggacctgtagtcccagctactcaggaggctgaggcaggagaatcacttgaacccgggaggcagaggttgcagtgagctgagatcgcgctactgcactccagcctgggtgacagagtgagactccgtctcaaaaacgacaacaacagaaaacaatagtcatcaaatcatatcaatagcacatcctacgaaccatgacttataaccactgatgttaaccttggtcacttggctgagatcgtgtttatcaggtttctccacagtcaagttacccctctcctctccaaactgtactctttggaaggaagtcactatgtgcagcctatgcttaaggagtcgggagctcagagggttttggggcatgttgaataaggttagaaatgtaaagtccttagggcagtgcctgctgtgtggcaagccctatataatgatttactgttagtgtgatgatgccgagacagtctggaggggagatcagtgtccacatagaaaacatgcttaggacagcttgatagatagtgtactgcattaggccaaagatgccccaggagtttatgagtatgttaccatacagggcaagagggactttgtagatgtgatgaagggcgtggaaccttgaaatgggaagattagcctggattatccaggtaggccaatctcatcacataaatctttaaaagtggagagccttgccgggcgcggtggctcacgcctgtaatcccaggactttgggaggccgaggtgggtggatcatgaggttaggagatcgagaccatcctggttaacatggtgaaaccccgtctctgctaaaaaatagaaaaagttagccgggcatgatggcgggtgcctgcagtcccagctactctggaggctgaggcaggagaatggcgtgaacccaggaggtggagcttgcagtgagccaagatcgcgccgctgaactccagcctgggagacagagcgagactccgtctcaaaaaagaaaaaaaaaaaaaagtggagagcgttttctggcagagatcagagagagagtatgacagcctagcagagggcagaggcaggcagcaagtgggggactgtacccttcttggccaccttagagggtagagagagggagctaggccccagaaaggcaggcactctgccaacacttcagcgtagccccatgagacgcgtgatgggcctctgacctgcagaactgcagtaagacaggaaactcacattgtttaaagccgctgatggaagactggcagcgataggaaacgaattcatgtactgacaagcacaaggctggaagtggaaccatagtcctaaagcaaaaatgactacttaccaactacgaatgaatcagccctccatccttgcaagctcagtttttcctaacaataacaaccacgaaaagaaatcaatgagtctaccatttcttgagggacaacttcaggctaagtgctccgctaggccttttaaaatgttgtgtcatgtaatcttcacaccatgtaatactctttctatattaatagcgtagacagagggagagacctcttgtccttccttcttctctcccaggttagctccttgctgataattaactctcaacaagtcaaaataagctcttcagtaagccaaagtccctttaaatccaaagaattagttggagtggtgtgtttactatcttagaggcctcagttcaagagtatctaaaagacagtctcgtaggtttgtcagaacatcacccgaatatctggaatatcctggaaccattcattcattcaatacgcatctgttgagcaccaactcttgagcccctgccctcaagaagctcagtctctgtggggatagtgaggtgtggacaggcatcaccacagcctggagcagtgtgggttgtagccgccttcaggaagcataccgtgtttatttaactggggaggaggcataaggctgtggcaatctgggaaggcttcaaggacgtggcgcatttaacttgggcctttaagaacaggtaggcttcactaagcaaagatagtgccagaggaattccaggtaggacaagcaaacgcacagaggcaggggaacagaggcccatggatcttctatgtctcatggcatccttattgagtaggtgccagtattgtccccattttgtggaagaacaaactgaggcacagagcagttgaatgacctgccctagagaacactcagcttataaatggtaagctgggtttacagctgcagtctgactacagaactcccgctcttagtcttttcttcacatctgctggggaaatgcaagtttagcagggtgaattcagatcatgggtgcaaataagtgaaatgcatttaaccattccctttgtcattcaataaatattgaccacatacccattgggtgctagctctgtgctaggggacttagcagtgccccccaaccaggagctcccatctgaaggaggaaggagatgtgtggatggagacctgcctcactactcagtgagtgccccaagagagggggacagaggaaggaaattgtggatgtgaaaagctggctccggaggaatcctttttttaggaagataagcgagggagccaagtcagtagagtcagggaaaagcagtccaagagccagaagtcaagccaagagggcagaaccacacccacccctaacatctgcaggacccaggaaaccccacgaaccgcctctggctcacagccagcctctttctgttcacactcctggcttgtcttgcagagtgaggagcgtcatgtgaatgagcatgccagtgccagcaatgccttcaggctctggcctataaacagctccacctataaacagctgcccctggttactcctcaggcgaggggacatgtaccagaatcacactttagcctcataaggacaaagccaggaaaaggaggaaaataaaacaaaaccaaaaacaaaggggcatgaagaagcttttggaggtaatggctgtgtttgttaccttgattgtggtgacgttttcacaggtatatgcataagtctaaatgcatcaaatcgtatataggagatgggtgcagttttttgtgtatcaacaacaaagaagaaaaaggaggagcaagaggaggaagaaaaacataaaacagacatataaaaagaaaatagatgatggggctgggggaggggaggaaggggaagtgatgccaacgggtgcaggatttccttttggggagatgaaaaggatctaaacgtgactgtggggatggctcacaaagctgaataaatgaaaaaccgttgaatagtatttaaatctgtgaactgtatgatacataaattacatctcaataaagctgttacaaaaaatagctatatgctggggcacgtggaagcttcaataagcttcaaggaattgaaataatattttagaaaataaaaagaataataggccaggcacggtggctcatgcctgtaatcccagcagtttgggaggccaaagtgggcggattgcgaggtcaagagatcgagaccttcctggccaacatggtgaaaccccgactctaccaaaaatacaaaaatcagctgggcgtggtggcgcgtacctgtagtcccagctacttgggaggctgagggggaattgcttgaacctgggaggctgaggttggagtgagccgagatcacgccactgcactccagcctgacgacagagcaagactccgtctcaaaaaaaaaaaagaataatagggcaggccaggttcagtggctcacgcctgtaatcccacactttgggaggctgaggcaggtggatcacttgaggtcaggagtttgagaccagcctggccaacatggtgaaatcctgtctctactaaaaataaaaaaaattagctgggtgtggtggcacgtgcctgtggtcccagcgactcaggaggctgaggcaggagaatcacttgagcccaggaggtggaggttgcagcagtgagccaagatcgtaccactgcactccagcctggatgacagagcaagactccatctcaaaaaaaaaaaaagaagaagaataggacaaactgagggaggaagcccttgcaggctctagaagagagcctagggctattggggcaaataatgtccaaacattggttacctggcccatggcccagcgacaagttacacgttccagggaggtgtgtttctttgaccccgtgagctccctgctctatcagggaccctggttgtccaggtctaaaggccattttggatagaatcatggaagccctaagaacaggtttcagcctttctccctcttctccagggaggctgagtggagcaaggataaataagaggccactggccgggcgcggtggctcacgcctgtaatctcatcactttgggaggccaaggcgggtggatcacctgagatcaggagttcgaaaccagcctgaccaacatggtgaaacccagtctctactaaaaatagaaaattagccgggcgtgatggcgcatgcctgtaatcccagctactagggaggctgaggcaggagaatcgtttgaacccgggaggtggcggttgcggtgagccgagatcatgccactgcactccagcctaggcaacaagactgaaactccgtctcaaaaaaaaaagaaagaagaaagagaggccacaaggtgcccggggcttggtgagagagcagtgtctgtgttgcaggggcttgtggagacgtcccagggcattaggtggggaatggaaggtggaaggcacagagcactctttcaagaaatttggcagtgagaggaaatatagcaagaggaaaagagctggagagggagggaggacagagggaatgtttttgtttgtttgcatttagagggcagtagacaggagtatgttttcgtctgagggaaaaggagtgtggagagagagagggactgaaaaatcagaggtagagggaagggaatgaaaaggaaatatgaccaaaaaggatcttttttttttttttttcagatggagtttcgctcttgttgcccaggctggagtgcaatggtgcgttctcgccttcccgcaacctccacttcccaggttcaagcgattctcctgcctcagctgggattacaggcatgcgccaccacgcccggctaattttgtatttttagtagagacggggtttcaccatgttggtcaggctggtttctaactcctgacctcaggtgatctgcctgcctcagcctcccaaactgctgggattataggtgtgagccaccctgcccggcccccaaaaagtatctttttacctcatcagccaggggatttgacagccttatgaaaaaagcaggacctctctttctctgaggcaaggtagggggtagattgagggagccctacctggacggtcttgactgtccctgaaataattacatgtattgaacattcactcactgtgtgccaggcactgttttaagtgttaagcatgtcatatcttgctcatttctcacaaccaccctcaaggtcaatacaatcattgttcccttcatttgacagtagggaaaactcaggcacagagaggactggtaactggcccaaagtaatgcattgagttagcaatgctcttagacataggcagagaggcctctgacctgaggtctgaatgtttgaaggctctgcacgtcatagccacccagaaaacaaacttactaacaaaggaagacttcagctactggccatagtgaagttacagagatgagatttactgtcctgccttgaaaaactagggctccagataaagtagatgaaacaatgatttttcagactttgaacaaaggcaactcaggactatgatctctgagaaaagggaaacaaaaaaggtgagccctataattacctccagctcacggcctgaggcagtttgcaggcttcagtacagggacagggaatccaaacagagtttggagtcttgctgattgagaaaacagagttcaagaggccaacgggctggaatttgcagggcagaacaccagagagcagggagctgagcatatatccaaagatctgcagagatgtcttcttaactctttggctgagtactgatttgcacatgcatgaaaggcaaggcctgggaaagaaccacagaaggcagagcagtgcctggggctcacacagggttgagattagtttctgttcccaaaaggcagaacgaaaagaccttgtaatacatgggatatcaggtacaattctcaaacgggtattgccttagtagaggtctaaattaaccttagactaacagctcctctgtatctgtcctaacaaatcttaaaagtaagcatcagaagtaaaaatctgattccaaatgtgttaagtgtgtggccagaaccaagtctgacactacttaaaggaatgcaacaaaatgcagcctcaaacaatgtaaagttcacaatgttcagagtcctgtcaaactacagatcaattacctcataaacataaatgcaaaaattctaaacaaaatttttgcaaatcaagtccaacaacatataaaaagtataaaacaccatggctaagtggggtttatctcaggaacacaaagttggtttaatgtttgaaaatcaatcaaatttaattcactatattaacaaactaaaaagtgaaaaccatgtgatcattgcaatatatgcagaaaaaacatttggtaaatccagtatttattcctgataaacactctcagaaaactaggaatagaaagaaagttcctcaatctgataaagagcatctaaaaacaaacaaagaaacaaacaaacacaacaaaaggcatacaaagaaatagaaagtgtgaccacaaccaatggaaaaatcaatcagtagaaacagaccctgaaatgaagagatgaagaaattagcagaaaaggacattgaaagagatgacataaatatgactcatatattcaagaaggtagagaaaatcatgaatataataatgaaaatgtgatttccaggaacaaaaatatagcatctcaaataaataaaaaaatacagtatattaaataaaaaatacactggagtggataaaaagcaggttagatactataaaataaattattttgaagatatagcaataaaaaaatctaaataaaatacagagagaaaatgagggtggggggaataaacagagcatcagtaacattggaggtaatatcagacaatctaacacgtgtaattggagacccagatagggtgaggagataaaaaatgatatttgaagaaataatggttaagaattttctaaatttgccaggcacagtggctcgtgcccataatcccagtgctttggaaggcagaggtggacagatc

SEQ ID NO: 1889 - DNA, 1557 bp, Homo Sapiens
ctctctctctctctcctgctgcattgtgaagaaactgcttgcttccctctcaccctctgcagtttcctgaggcctccccagccatgcggaacgctgtagaccaagacctggaattaacacatcagaagattctatggggaaacccatttaaaaataggatgcatttttttcttttctgcacagggagaaagtttaagctctcctcactatgagttttcaagtataaaagactttttcttccacgattttgagaacaactgaggactcttgtgaccaggacaacagggaagcttgcagcaagatagctccaggttggattcatgcttcgcaccccaagggctgccagccagagaggaggagaagcaatcactcctgcagtttctgaacactacacagacgccaggtagcttcttcaggagaacagccctctgaggaggcaggaagaggaggcttatctttcagcagccggagctgctgagatctctgggcagattaagctctctctaatggatgggctccagcctggcacattcagtggagagggatccactcatccatcatcaacataatatggtcctccctgcacttcacagtgtcctcttgctattgaaaaggcttttttgccttctcaagtttctttgtcaacagtctacaggaagaagctcaggccgccaccggcagaggtgaatgcaagctcacgttttatttctgactgcttaatcattgcctcgatcactgctcaagctctgcctttgtttccaaaggttacctgtgggaaaacttctttttctatgctgaaattaatagggaggcaaagatgagtccactgataagcagagccttaaaactcacatagagaaacaactttgctggagtgtgtgtgagtgaaccactaaggaatcagatagtgtgatggcagttatcattgcaggttaagacatttctacaaatatttcgacatctccatatactcactcctttcccccctgagtggagagactcagctacccagagaggaagctcaaaaaaaacagaagcttcaaacaaacaaccaaccaaaaaaaaaaaaaactgtgggttcatcagaggtggtagggaagacaaaaacatgggaggagcagctgggcacggtggctcaagcctgtaatcccagcactttgcgaggctgaggtgggtggatcacctgaggtcaggagttcgagaccagcctggccaacatggtgaaaccccatctctactaaaaatacaaaaaattagccgggcgttgtggtacgcacctgtaatcccagctactccggaggctgaggcagcagaatcgcttgaacccaggaggcagaggttgcaacgagccaagatcgcaccattgcactccagcctgggcaacaagagcgaaactccatctaaaaaaaacaaacaagcaaacaaacaaaaaacacgggaggagcaataaaaaggaatccatgctttgatttttttttttagtgagaggaagggaaggctgctgcctctcacttctccctgttttgttgttcttttaagtagcatgtgtcactctgt

SEQ ID NO: 1890 - DNA, 6662 bp, Homo Sapiens
ggcggttaagtcctgtacctaggaaagagggcgagctctggggcgctctccggtgtcatgaggagcttcaaaagagtcaactttgggactctgctaagcagccagaaggaggctgaagagttgctgcccgacttgaaggtgggggtgctgcctggctcgggatacacctggctttccaaactgagctgttttgtgtttgccttttgaagagatggataagagttcctgtccaaccctccagctggttttcccagcagccgatctgatgctgagaggagacaagcttgtgatgccatcctgagggcttgcaaccagcagctgactgctaagctagcttgccctaggcatctggggagcctgctggagctggcagagctggcctgtgatggctacttagtgtctaccccacagcgtcctcccctctacctggaacgaattctctttgtcttactgcggaatgctgctgcacaaggaagcccagaggccacactccgccttgctcagcccctccatgcctgcttggtgcagtgctctcgcgaggctgctccccaggactatgaggccgtggctcggggcagcttttctctgctttggaagggggcagaagccctgttggaacggcgagctgcatttgcagctcggctgaaggccttgagcttcctagtactcttggaggatgaaagtaccccttgtgaggttcctcactttgcttctccaacagcctgtcgagcggtagctgcccatcagctatttgatgccagtggccatggtctaaatgaagcagatgctgatttcctagatgacctgctctccaggcacgtgatcagagccttggtgggtgagagagggagctcttctgggcttctttctccccagagggccctctgcctcttggagctcaccttggaacactgccgtcgcttttgctggagccgccaccatgacaaagccatcagcgcagtggagaaggctcacagttacctaaggaacaccaatctagcccctagccttcagctatgtcagctgggggttaagctgctgcaggtcggggaggaaggacctcaggcagtggccaagcttctgatcaaggcatcagctgtcctgagcaagagtatggaggcaccatcacccccacttcgggcattgtatgagagctgccagttcttcctttcaggcctggaacgaggcaccaagaggcgctatagacttgatgccattctgagcctctttgcttttcttggagggtactgctctcttctgcagcagctgcgggatgatggtgtgtatgggggctcctccaagcaacagcagtcttttcttcagatgtactttcagggacttcacctctacactgtggtggtttatgactttgcccaaggctgtcagatagttgatttggctgacctgacccaactagtggacagttgtaaatctaccgttgtctggatgctggaggccttagagggcctgtcgggccaagagctgacggaccacatggggatgaccgcttcttacaccagtaatttggcctacagcttctatagtcacaagctctatgccgaggcctgtgccatctctgagccgctctgtcagcacctgggtttggtgaagccaggcacttatcccgaggtgcctcctgagaagttgcacaggtgcttccggctacaagtagagagtttgaagaaactgggtaaacaggcccagggctgcaagatggtgattttgtggctggcagccctgcaaccctgtagccctgaacacatggctgagccagtcactttctgggttcgggtcaagatggatgcggccagggctggagacaaggagctacagctaaagactctgcgagacagcctcagtggctgggacccggagaccctggccctcctgctgagggaggagctgcaggcctacaaggcggtgcgggccgacactggacaggaacgcttcaacatcatctgtgacctcctggagctgagccccgaggagacaccagccggggcctgggcacgagccacccacctggtagaactggctcaggtgctctgctaccacgactttacgcagcagaccaactgctctgctctggatgctatccgggaagccctgcagcttctggactctgtgaggcctgaggcccaggccagagatcagcttctggacgataaagcacaggccttgctgtggctttacatctgtactctggaagccaaaatacaggaaggtatcgagcgggatcggagagcccaggcccctggtaacttggaggaatttgaagtcaatgacctgaactatgaagataaactccaggaagatcgtttcctatacagtaacattgccttcaacctggctgcagatgctgctcagtccaaatgcctggaccaagccctggccctgtggaaggagctgcttacaaaggggcaggccccagctgtacggtgtctccagcagacagcagcctcactgcagatcctagcagccctctaccagctggtggcaaagcccatgcaggctctggaggtcctcctgctgctacggattgtctctgagagactgaaggaccactcgaaggcagctggctcctcctgccacatcacccagctcctcctgaccctcggctgtcccagctatgcccagttacacctggaagaggcagcatcgagcctgaagcatctcgatcagactactgacacatacctgctcctttccctgacctgtgatctgcttcgaagtcaactctactggactcaccagaaggtgaccaagggtgtctctctgctgctgtctgtgcttcgggatcctgccctccagaagtcctccaaggcttggtacttgctgcgtgtccaggtcctgcagctggtggcagcttaccttagcctcccgtcaaacaacctctcacactccctgtgggagcagctctgtgcccaaggctggcagacacctgagatagctctcatagactcccataagctcctccgaagcatcatcctcctgctgatgggcagtgacattctctcaactcagaaagcagctgtggagacatcgtttttggactatggtgaaaatctggtacaaaaatggcaggttctttcagaggtgctgagctgctcagagaagctggtctgccacctgggccgcctgggtagtgtgagtgaagccaaggccttttgcttggaggccctaaaacttacaacaaagctgcagataccacgccagtgtgccctgttcctggtgctgaagggcgagctggagctggcccgcaatgacattgatctctgtcagtcggacctgcagcaggttctgttcttgcttgagtcttgcacagagtttggtggggtgactcagcacctggactctgtgaagaaggtccacctgcagaaggggaagcagcaggcccaggtcccctgtcctccacagctcccagaggaggagctcttcctaagaggccctgctctagagctggtggccactgtggccaaggagcctggccccatagcaccttctacaaactcctccccagtcttgaaaaccaagccccagcccatacccaacttcctgtcccattcacccacctgtgactgctcgctctgcgccagccctgtcctcacagcagtctgtctgcgctgggtattggtcacggcaggggtgaggctggccatgggccaccaagcccagggtctggatctgctgcaggtcgtgctgaagggctgtcctgaagccgctgagcgcctcacccaagctctccaagcttccctgaatcataaaacacccccctccttggttccaagcctcttggatgagatcttggctcaagcatacacactgttggcactggagggcctgaaccagccatcaaacgagagcctgcagaaggttctacagtcagggctgaagtttgtagcagcacggataccccacctagagccctggcgagccagcctgctcttgatttgggccctcacaaaactaggtggcctcagctgctgtactacccaactttttgcaagctcctggggctggcagccaccattaataaaaagtgtccctggctcagagccctctaagactcagggccaaaaacgttctggacgagggcgccaaaagttagcctctgctcccctgagcctcaataatacctctcagaaaggtctggaaggtagaggactgccctgcacacctaaacccccagaccggatcaggcaagctggccctcatgtccccttcacggtgtttgaggaagtctgccctacagagagcaagcctgaagtaccccaggcccccagggtacaacagagagtccagacgcgcctcaaggtgaacttcagtgatgacagtgacttggaagaccctgtctcagctgaggcctggctggcagaggagcctaagagacggggcactgcttcccggggccgggggcgagcaaggaagggcctgagcctaaagacggatgccgtggttgccccaggtagtgcccctgggaaccctggcctgaatggcaggagccggagggccaagaaggtggcatcaagacattgtgaggagcggcgtccccagagggccagtgaccaggccaggcctggccctgagatcatgaggaccatccctgaggaagaactgactgacaactggagaaaaatgagctttgagatcctcaggggctctgacggggaagactcagcctcaggtgggaagactccagctccgggccctgaggcagcttctggagaatgggagctgctgaggctggattccagcaagaagaagctgcccagcccatgcccagacaaggagagtgacaaggaccttggtcctcggctccagctcccctcagcccccgtagccactggtctttctaccctggactccatctgtgactccctgagtgttgctttccggggcattagtcactgtcctcctagtgggctctatgcccacctctgccgcttcctggccttgtgcctgggccaccgggatccttatgccactgctttccttgtcaccgagtctgtctccatcacctgtcgccaccagctgctcacccacctccacagacagctcagcaaggcccagaagcaccgaggatcacttgaaatagcagaccagctgcaggggctgagccttcaggagatgcctggagatgtccccctggcccgcatccagcgcctcttttccttcagggctttggaatctggccacttcccccagcctgaaaaggagagtttccaggagcgcctggctctgatccccagtggggtgactgtgtgtgtgttggccctggccaccctccagcccggaaccgtgggcaacaccctcctgctgacccggctggaaaaggacagtcccccagtcagtgtgcagattcccactggccagaacaagcttcatctgcgttcagtcctgaatgagtttgatgccatccagaaggcacagaaagagaacagcagctgtactgacaagcgagaatggtggacagggcggctggcactggaccacaggatggaggttctcatcgcttccctagagaagtctgtgctgggctgctggaaggggctgctgctgccgtccagtgaggagcccggccctgcccaggaggcctcccgcctacaggagctgctacaggactgtggctggaaatatcctgaccgcactctgctgaaaatcatgctcagtggtgccggtgccctcacccctcaggacattcaggccctggcctacgggctgtgcccaacccagccagagcgagcccaggagctcctgaatgaggcagtaggacgtctacagggcctgacagtaccaagcaatagccaccttgtcttggtcctagacaaggacttgcagaagctgccgtgggaaagcatgcccagcctccaagcactgcctgtcacccggctgccctccttccgcttcctactcagctactccatcatcaaagagtatggggcctcgccagtgctgagtcaaggggtggatccacgaagtaccttctatgtcctgaaccctcacaataacctgtcaagcacagaggagcaatttcgagccaatttcagcagtgaagctggctggagaggagtggttggggaggtgccaagacctgaacaggtgcaggaagccctgacaaagcatgatttgtatatctatgcagggcatggggctggtgcccgcttccttgatgggcaggctgtcctgcggctgagctgtcgggcagtggccctgctgtttggctgtagcagtgcggccctggctgtgcatggaaacctggagggggctggcatcgtgctcaagtacatcatggctggttgccccttgtttctgggtaatctctgggatgtgactgaccgcgacattgaccgctacacggaagctctgctgcaaggctggcttggagcaggcccaggggccccccttctctactatgtaaaccaggcccgccaagctccccgactcaagtatcttattggggctgcacctatagcctatggcttgcctgtctctctgcggtaaccccatggagctgtcttattgatgctagaagcctcataactgttctacctccaaggttagatttaatccttaggataactcttttaaagtgattttccccagtgttttatatgaaacatttccttttgatttaacctcagtataataaagatacatcattt

SEQ ID NO: 1891 - DNA, 509 bp, Homo Sapiens
tttttttttggacttagcaaggtttatttggaagggcagagtccaaccaaccccaggtcctgagggtagactcaggtcctgagggaaaggggtggacttcagtgggctttcttgctgtgttgggtgctcttggggaaaggctgcgggcccagccagagctgcagcaggatgacggcatggcatatgtgcagggcagcagagctgcaggatgtggaagggtatgtgttccaggagagctcgatgagccccagcaccaacaacctgagcaggtgtgtgagccagcgtgcaggcatggcccacaggaggtagggcagtgtgtggaaataccagacgtagaactggtagtggagggagcggctgaagcagatgccaatgaagttggaggtgaagagggtagaaacgatctggtttggtgtaaggggcctgggtggaaccttcctttttggaggatccctcagcagcgacaagatacttttccctgtcctgtgccacctgcagagggcaaacag

SEQ ID NO: 1892 - DNA, 14392 bp, Homo Sapiens
gcagacctaaaggagcgttcgctagcagaggcgctgccggtgcggtgtgctacgcgcgcccacctcccggggaaggaacggcgaggccggggaccgtcgcggagatggatcgcgggccggcagcagtggcgtgcacgctgctcctggctctcgtcgcctgcctagcgccggccagtggccaagaatgtgacagtgcgcattttcgctgtggaagtgggcattgcatccctgcagactggaggtgtgatgggaccaaagactgttcagatgacgcggatgaaattggctgcgctgttgtgacctgccagcagggctatttcaagtgccagagtgagggacaatgcatccccagctcctgggtgtgtgaccaagatcaagactgtgatgatggctcagatgaacgtcaagattgctcacaaagtacatgctcaagtcatcagataacatgctccaatggtcagtgtatcccaagtgaatacaggtgcgaccacgtcagagactgccccgatggagctgatgagaatgactgccagtacccaacatgtgagcagcttacttgtgacaatggggcctgctataacaccagtcagaagtgtgattggaaagttgattgcagggactcctcagatgaaatcaactgcactgagatatgcttgcacaatgagttttcatgtggcaatggagagtgtatccctcgtgcttatgtctgtgaccatgacaatgattgccaagacggcagtgatgaacatgcttgcaactatccgacctgcggtggttaccagttcacttgccccagtggccgatgcatttatcaaaactgggtttgtgatggagaagatgactgtaaagataatggagatgaagatggatgtgaaagcggtcctcatgatgttcataaatgttccccaagagaatggtcttgcccagagtcgggacgatgcatctccatttataaagtttgtgatgggattttagattgcccaggaagagaagatgaaaacaacactagtaccggaaaatactgtagtatgactctgtgctctgccttgaactgccagtaccagtgccatgagacgccgtatggaggagcgtgtttttgtcccccaggttatatcatcaaccacaatgacagccgtacctgtgttgagtttgatgattgccagatatggggaatttgtgaccagaagtgtgaaagccgacctggccgtcacctgtgccactgtgaagaagggtatatcttggagcgtggacagtattgcaaagctaatgattcctttggcgaggcctccattatcttctccaatggtcgggatttgttaattggtgatattcatggaaggagcttccggatcctagtggagtctcagaatcgtggagtggccgtgggtgtggctttccactatcacctgcaaagagttttttggacagacaccgtgcaaaataaggttttttcagttgacattaatggtttaaatatccaagaggttctcaatgtttctgttgaaaccccagagaacctggctgtggactgggttaataataaaatctatctagtggaaaccaaggtcaaccgcatagatatggtaaatttggatggaagctatcgggttacccttataactgaaaacttggggcatcctagaggaattgccgtggacccaactgttggttatttatttttctcagattgggagagcctttctggggaacctaagctggaaagggcattcatggatggcagcaaccgtaaagacttggtgaaaacaaagctgggatggcctgctggggtaactctggatatgatatcgaagcgtgtttactgggttgactctcggtttgattacattgaaactgtaacttatgatggaattcaaaggaagactgtagttcatggaggctccctcattcctcatccctttggagtaagcttatttgaaggtcaggtgttctttacagattggacaaagatggccgtgctgaaggcaaacaagttcacagagaccaacccacaagtgtactaccaggcttccctgaggccctatggagtgactgtttaccattccctcagacagccctatgctaccaatccgtgtaaagataacaatgggggctgtgagcaggtctgtgttctcagccacagaacagataatgatggtttgggtttccgttgcaagtgcacattcggcttccaactggatacagatgagcgccactgcattgctgttcagaatttcctcattttttcatcccaagttgctattcgtgggatcccgttcaccttgtctacccaggaagatgtcatggttccagtttcggggaatccttctttctttgtcgggattgattttgacgcccaggacagcactatctttttttcagatatgtcaaaacacatgatttttaagcaaaagattgatggcacaggaagagaaattctcgcagctaacagggtggaaaatgttgaaagtttggcttttgattggatttcaaagaatctctattggacagactctcattacaagagtatcagtgtcatgaggctagctgataaaacgagacgcacagtagttcagtatttaaataacccacggtcggtggtagttcatccttttgccgggtatctattcttcactgattggttccgtcctgctaaaattatgagagcatggagtgacggatctcacctcttgcctgtaataaacactactcttggatggcccaatggcttggccatcgattgggctgcttcacgattgtactgggtagatgcctattttgataaaattgagcacagcacctttgatggtttagacagaagaagactgggccatatagagcagatgacacatccgtttggacttgccatctttggagagcatttattttttactgactggagactgggtgccattattcgagtcaggaaagcagatggtggagaaatgacagttatccgaagtggcattgcttacatactgcatttgaaatcgtatgatgtcaacatccagactggttctaacgcctgtaatcaacccacgcatcctaacggtgactgcagccacttctgcttcccggtgccaaatttccagcgagtgtgtgggtgcccttatggaatgaggctggcttccaatcacttgacatgcgagggggacccaaccaatgaaccacccacggagcagtgtggcttattttccttcccctgtaaaaatggcagatgtgtgcccaattactatctctgtgatggagtcgatgattgtcatgataacagtgatgagcaactatgtggcacacttaataatacctgttcatcttcggcgttcacctgtggccatggggagtgcattcctgcacactggcgctgtgacaaacgcaacgactgtgtggatggcagtgatgagcacaactgccccacccacgcacctgcttcctgccttgacacccaatacacctgtgataatcaccagtgtatctcaaagaactgggtctgtgacacagacaatgattgtggggatggatctgatgaaaagaactgcaattcgacagagacatgccaacctagtcagtttaattgccccaatcatcgatgtattgacctatcgtttgtctgtgatggtgacaaggattgtgttgatggatctgatgaggttggttgtgtattaaactgtactgcttctcaattcaagtgtgccagtggggataaatgtattggcgtcacaaatcgttgtgatggtgtttttgattgcagtgacaactcggatgaagcgggctgtccaaccaggcctcctggtatgtgccactcagatgaatttcagtgccaagaagatggtatctgcatcccgaacttctgggaatgtgatgggcatccagactgcctctatggatctgatgagcacaatgcctgtgtccccaagacttgcccttcatcatatttccactgtgacaacggaaactgcatccacagggcatggctctgtgatcgggacaatgactgcggggatatgagtgatgagaaggactgccctactcagccctttcgctgtcctagttggcaatggcagtgtcttggccataacatctgtgtgaatctgagtgtagtgtgtgatggcatctttgactgccccaatgggacagatgagtccccactttgcaatgggaacagctgctcagatttcaatggtggttgtactcacgagtgtgttcaagagccctttggggctaaatgcctatgtccattgggattcttacttgccaatgattctaagacctgtgaagacatagatgaatgtgatattctaggctcttgtagccagcactgttacaatatgagaggttctttccggtgctcgtgtgatacaggctacatgttagaaagtgatgggaggacttgcaaagttacagcatctgagagtctgctgttacttgtggcaagtcagaacaaaattattgccgacagtgtcacctcccaggtccacaatatctattcattggtcgagaatggttcttacattgtagctgttgattttgattcaattagtggtcgtatcttttggtctgatgcaactcagggtaaaacctggagtgcgtttcaaaatggaacggacagaagagtggtatttgacagtagcatcatcttgactgaaactattgcaatagattgggtaggtcgtaatctttactggacagactatgctctggaaacaattgaagtctccaaaattgatgggagccacaggactgtgctgattagtaaaaacctaacaaatccaagaggactagcattagatcccagaatgaatgagcatctactgttctggtctgactggggccaccaccctcgcatcgagcgagccagcatggacggcagcatgcgcactgtcattgtccaggacaagatcttctggccctgcggcttaactattgactaccccaacagactgctctacttcatggactcctatcttgattacatggacttttgcgattataatggacaccatcggagacaggtgatagccagtgatttgattatacggcacccctatgccctaactctctttgaagactctgtgtactggactgaccgtgctactcgtcgggttatgcgagccaacaagtggcatggagggaaccagtcagttgtaatgtataatattcaatggccccttgggattgttgcggttcatccttcgaaacaaccaaattccgtgaatccatgtgccttttcccgctgcagccatctctgcctgctttcctcacaggggcctcatttttactcctgtgtttgtccttcaggatggagtctgtctcctgatctcctgaattgcttgagagatgatcaacctttcttaataactgtaaggcaacatataatttttggaatctcccttaatcctgaggtgaagagcaatgatgctatggtccccatagcagggatacagaatggtttagatgttgaatttgatgatgctgagcaatacatctattgggttgaaaatccaggtgaaattcacagagtgaagacagatggcaccaacaggacagtatttgcttctatatctatggtggggccttctatgaacctggccttagattggatttcaagaaacctttattctaccaatcctagaactcagtcaatcgaggttttgacactccacggagatatcagatacagaaaaacattgattgccaatgatgggacagctcttggagttggctttccaattggcataactgttgatcctgctcgtgggaagctgtactggtcagaccaaggaactgacagtggggttcctgccaagatcgccagtgctaacatggatggcacatctgtgaaaactctctttactgggaacctcgaacacctggagtgtgtcactcttgacatcgaagagcagaaactctactgggcagtcactggaagaggagtgattgaaagaggaaacgtggatggaacagatcggatgatcctggtacaccagctttcccacccctggggaattgcagtccatgattctttcctttattatactgatgaacagtatgaggtcattgaaagagttgataaggccactggggccaacaaaatagtcttgagagataatgttccaaatctgaggggtcttcaagtttatcacagacgcaatgccgccgaatcctcaaatggctgtagcaacaacatgaatgcctgtcagcagatttgcctgcctgtaccaggaggattgttttcctgcgcctgtgccactggatttaaactcaatcctgataatcggtcctgctctccatataactctttcattgttgtttcaatgctgtctgcaatcagaggctttagcttggaattgtcagatcattcagaaaccatggtgccggtggcaggccaaggacgaaacgcactgcatgtggatgtggatgtgtcctctggctttatttattggtgtgattttagcagctcagtggcatctgataatgcgatccgtagaattaaaccagatggatcttctctgatgaacattgtgacacatggaataggagaaaatggagtccggggtattgcagtggattgggtagcaggaaatctttatttcaccaatgcctttgtttctgaaacactgatagaagttctgcggatcaatactacttaccgccgtgttcttcttaaagtcacagtggacatgcctaggcatattgttgtagatcccaagaacagatacctcttctgggctgactatgggcagagaccaaagattgagcgttctttccttgactgtaccaatcgaacagtgcttgtgtcagagggcattgtcacaccacggggcttggcagtggaccgaagtgatggctacgtttattgggttgatgattctttagatataattgcaaggattcgtatcaatggagagaactctgaagtgattcgttatggcagtcgttacccaactccttatggcatcactgtttttgaaaattctatcatatgggtagataggaatttgaaaaagatcttccaagccagcaaggaaccagagaacacagagccacccacagtgataagagacaatatcaactggctaagagatgtgaccatctttgacaagcaagtccagccccggtcaccagcagaggtcaacaacaacccttgcttggaaaacaatggtgggtgctctcatctctgctttgctctgcctggattgcacaccccaaaatgtgactgtgcctttgggaccctgcaaagtgatggcaagaattgtgccatttcaacagaaaatttcctcatctttgccttgtctaattccttgagaagcttacacttggaccctgaaaaccatagcccacctttccaaacaataaatgtggaaagaactgtcatgtctctagactatgacagtgtaagtgatagaatctacttcacacaaaatttagcctctggagttggacagatttcctatgccaccctgtcttcagggatccatactccaactgtcattgcttcaggtatagggactgctgatggcattgcctttgactggattactagaagaatttattacagtgactacctcaaccagatgattaattccatggctgaagatgggtctaaccgcactgtgatagcccgcgttccaaaaccaagagcaattgtgttagatccctgccaagggtacctgtactgggctgactgggatacacatgccaaaatcgagagagccacattgggaggaaacttccgggtacccattgtgaacagcagtctggtcatgcccagtgggctgactctggactatgaagaggaccttctctactgggtggatgctagtctgcagaggattgaacgcagcactctgacgggcgtggatcgtgaagtcattgtcaatgcagccgttcatgcttttggcttgactctctatggccagtatatttactggactgacttgtacacacaaagaatttaccgagctaacaaatatgacgggtcaggtcagattgcaatgaccacaaatttgctctcccagcccaggggaatcaacactgttgtgaagaaccagaaacaacagtgtaacaatccttgtgaacagtttaatgggggctgcagccatatctgtgcaccaggtccaaatggtgccgagtgccagtgtccacatgagggcaactggtatttggccaacaacaggaagcactgcattgtggacaatggtgaacgatgtggtgcatcttccttcacctgctccaatgggcgctgcatctcggaagagtggaagtgtgataatgacaacgactgtggggatggcagtgatgagatggaaagtgtctgtgcacttcacacctgctcaccgacagccttcacctgtgccaatgggcgatgtgtccaatactcttaccgctgtgattactacaatgactgtggtgatggcagtgatgaggcagggtgcctgttcagggactgcaatgccaccacggagtttatgtgcaataacagaaggtgcatacctcgtgagtttatctgcaatggtgtagacaactgccatgataataacacttcagatgagaaaaattgccctgatcgcacttgccagtctggatacacaaaatgtcataattcaaatatttgtattcctcgcgtttatttgtgtgacggagacaatgactgtggagataacagtgatgaaaaccctacttattgcaccactcacacatgcagcagcagtgagttccaatgcgcatctgggcgctgtattcctcaacattggtattgtgatcaagaaacagattgttttgatgcctctgatgaacctgcctcttgtggtcactctgagcgaacatgcctagctgatgagttcaagtgtgatggtgggaggtgcatcccaagcgaatggatctgtgacggtgataatgactgtggggatatgagtgacgaggataaaaggcaccagtgtcagaatcaaaactgctcggattccgagtttctctgtgtaaatgacagacctccggacaggaggtgcattccccagtcttgggtctgtgatggcgatgtggattgtactgacggctacgatgagaatcagaattgcaccaggagaacttgctctgaaaatgaattcacctgtggttacggactgtgtatcccaaagatattcaggtgtgaccggcacaatgactgtggtgactatagcgacgagaggggctgcttataccagacttgccaacagaatcagtttacctgtcagaacgggcgctgcattagtaaaaccttcgtctgtgatgaggataatgactgtggagacggatctgatgagctgatgcacctgtgccacaccccagaacccacgtgtccacctcacgagttcaagtgtgacaatgggcgctgcatcgagatgatgaaactctgcaaccacctagatgactgtttggacaacagcgatgagaaaggctgtggcattaatgaatgccatgacccttcaatcagtggctgcgatcacaactgcacagacaccttaaccagtttctattgttcctgtcgtcctggttacaagctcatgtctgacaagcggacttgtgttgatattgatgaatgcacagagatgccttttgtctgtagccagaagtgtgagaatgtaataggctcctacatctgtaagtgtgccccaggctacctccgagaaccagatggaaagacctgccggcaaaacagtaacatcgaaccctatctcatttttagcaaccgttactatttgagaaatttaactatagatggctatttttactccctcatcttggaaggactggacaatgttgtggcattagattttgaccgagtagagaagagattgtattggattgatacacagaggcaagtcattgagagaatgtttctgaataagacaaacaaggagacaatcataaaccacagactaccagctgcagaaagtctggctgtagactgggtttccagaaagctctactggttggatgcccgcctggatggcctctttgtctctgacctcaatggtggacaccgccgcatgctggcccagcactgtgtggatgccaacaacaccttctgctttgataatcccagaggacttgcccttcaccctcaatatgggtacctctactgggcagactggggtcaccgcgcatacattgggagagtaggcatggatggaaccaacaagtctgtgataatctccaccaagttagagtggcctaatggcatcaccattgattacaccaatgatctactctactgggcagatgcccacctgggttacatagagtactctgatttggagggccaccatcgacacacggtgtatgatggggcactgcctcaccctttcgctattaccatttttgaagacactatttattggacagattggaatacaaggacagtggaaaagggaaacaaatatgatggatcaaatagacagacactggtgaacacaacacacagaccatttgacatccatgtgtaccatccatataggcagcccattgtgagcaatccctgtggtaccaacaatggtggctgttctcatctctgcctcatcaagccaggaggaaaagggttcacttgcgagtgtccagatgacttccgcacccttcaactgagtggcagcacctactgcatgcccatgtgctccagcacccagttcctgtgcgctaacaatgaaaagtgcattcctatctggtggaaatgtgatggacagaaagactgctcagatggctctgatgaactggccctttgcccgcagcgcttctgccgactgggacagttccagtgcagtgacggcaactgcaccagcccgcagactttatgcaatgctcaccaaaattgccctgatgggtctgatgaagaccgtcttctttgtgagaatcaccactgtgactccaatgaatggcagtgcgccaacaaacgttgcatcccagaatcctggcagtgtgacacatttaacgactgtgaggataactcagatgaagacagttcccactgtgccagcaggacctgccggccgggccagtttcggtgtgctaatggccgctgcatcccgcaggcctggaagtgtgatgtggataatgattgtggagaccactcggatgagcccattgaagaatgcatgagctctgcccatctctgtgacaacttcacagaattcagctgcaaaacaaattaccgctgcatcccaaagtgggccgtgtgcaatggtgtagatgactgcagggacaacagtgatgagcaaggctgtgaggagaggacatgccatcctgtgggggatttccgctgtaaaaatcaccactgcatccctcttcgttggcagtgtgatgggcaaaatgactgtggagataactcagatgaggaaaactgtgctccccgggagtgcacagagagcgagtttcgatgtgtcaatcagcagtgcattccctcgcgatggatctgtgaccattacaacgactgtggggacaactcagatgaacgggactgtgagatgaggacctgccatcctgaatattttcagtgtacaagtggacattgtgtacacagtgaactgaaatgcgatggatccgctgactgtttggatgcgtctgatgaagctgattgtcccacacgctttcctgatggtgcatactgccaggctactatgttcgaatgcaaaaaccatgtttgtatcccgccatattggaaatgtgatggcgatgatgactgtggcgatggttcagatgaagaacttcacctgtgcttggatgttccctgtaattcaccaaaccgtttccggtgtgacaacaatcgctgcatttatagtcatgaggtgtgcaatggtgtggatgactgtggagatggaactgatgagacagaggagcactgtagaaaaccgacccctaaaccttgtacagaatatgaatataagtgtggcaatgggcattgcattccacatgacaatgtgtgtgatgatgccgatgactgtggtgactggtccgatgaactgggttgcaataaaggaaaagaaagaacatgtgctgaaaatatatgcgagcaaaattgtacccaattaaatgaaggaggatttatctgctcctgtacagctgggttcgaaaccaatgtttttgacagaacctcctgtctagatatcaatgaatgtgaacaatttgggacttgtccccagcactgcagaaataccaaaggaagttatgagtgtgtctgtgctgatggcttcacgtctatgagtgaccgccctggaaaacgatgtgcagctgagggtagctctcctttgttgctactgcctgacaatgtccgaattcgaaaatataatctctcatctgagaggttctcagagtatcttcaagatgaggaatatatccaagctgttgattatgattgggatcccaaggacataggcctcagtgttgtgtattacactgtgcgaggggagggctctaggtttggtgctatcaaacgtgcctacatccccaactttgaatccggccgcaataatcttgtgcaggaagttgacctgaaactgaaatacgtaatgcagccagatggaatagcagtggactgggttggaaggcatatttactggtcagatgtcaagaataaacgcattgaggtggctaaacttgatggaaggtacagaaagtggctgatttccactgacctggaccaaccagctgctattgctgtgaatcccaaactagggcttatgttctggactgactggggaaaggaacctaaaatcgagtctgcctggatgaatggagaggaccgcaacatcctggttttcgaggaccttggttggccaactggcctttctatcgattatttgaacaatgaccgaatctactggagtgacttcaaggaggacgttattgaaaccataaaatatgatgggactgataggagagtcattgcaaaggaagcaatgaacccttacagcctggacatctttgaagaccagttatactggatatctaaggaaaagggagaagtatggaaacaaaataaatttgggcaaggaaagaaagagaaaacgctggtagtgaacccttggctcactcaagttcgaatctttcatcaactcagatacaataagtcagtgcccaacctttgcaaacagatctgcagccacctctgccttctgagacctggaggatacagctgtgcctgtccccaaggctccagctttatagaggggagcaccactgagtgtgatgcagccatcgaactgcctatcaacctgccccccccatgcaggtgcatgcacggaggaaattgctattttgatgagactgacctccccaaatgcaagtgtcctagcggctacaccggaaaatattgtgaaatggcgttttcaaaaggcatctctccaggaacaaccgcagtagctgtgctgttgacaatcctcttgatcgtcgtaattggagctctggcaattgcaggattcttccactatagaaggaccggctcccttttgcctgctctgcccaagctgccaagcttaagcagtctcgtcaagccctctgaaaatgggaatggggtgaccttcagatcaggggcagatcttaacatggatattggagtgtctggttttggacctgagactgctattgacaggtcaatggcaatgagtgaagactttgtcatggaaatggggaagcagcccataatatttgaaaacccaatgtactcagccagagacagtgctgtcaaagtggttcagccaatccaggtgactgtatctgaaaatgtggataataagaattatggaagtcccataaacccttctgagatagttccagagacaaacccaacttcaccagctgctgatggaactcaggtgacaaaatggaatctcttcaaacgaaaatctaaacaaactaccaactttgaaaatccaatctatgcacagatggagaacgagcaaaaggaaagtgttgctgcgacaccacctccatcaccttcgctccctgctaagcctaagcctccttcgagaagagacccaactccaacctattctgcaacagaagacacttttaaagacaccgcaaatcttgttaaagaagactctgaagtatagctataccagctatttagggaataattagaaacacacttttgcacatatattttttacaaacagatgaaaaaagttaacattcagtactttatgaaaaaaatatatttttccctgtttgcctataggtggaggtatcctgtgtgtctttttttacttatgccgtctcatatttttacaaataattatcacaatgtactatatgtatatctttgcactgaagttgtctgaaggtaatactataaatatattgtatatttgtaaattttggaaagattatcctgttactgaatttgctaataaagatgtctgctgaaaaaaaa

SEQ ID NO: 1893 - DNA, 3854 bp, Homo Sapiens
agaattcttgctacagtcaggagaaagccgaaagctgcacgggtactgaatcttctacgactgaattagaagaataatgactgtacaattaactatcaacctctgttcatttaagcacagtttttacagagctcaggagaaatatggaacttgattggcgtgtttttatttgatggtgtcagcaaatagatgattttaaagacaggtggtagggaaaaataagagaaggggaaaaaaaaagaaagaaaatgcaatttgagacattgcgccaggtctgcaattctgttttatctcattttcatggggttttttcatccccaccaaatatcttacaaaatgagctttttggacaaacactgaacaatgcaaggaaaagaagcccatctgtgtccagagatcagaatagaagatacgaccaaagggaagaaagagaggaatattcacagtatgctacttcggataccgcaatgcctagatctccatcagattatgctgataggcgatctcaacatgaacctcagttttatgaagactctgatcatttaagttatagggactccaacaggagaagtcataggcattccaaagaatatattgtagatgatgaggatgtggaaagcagagatgaatacgaaaggcaaaggagagaggaagagtaccagtcacgctaccgaagtgatccgaatttggcccgttatccagtaaagccacaaccctatgaagaacaaatgcggatccatgctgaagtgtcccgagcacggcatgagagaaggcatagtgatgtttctttggcaaatgctgatctggaagattccaggatttctatgctaaggatggatcgaccatcaaggcaaagatctatatcagaacgtagagctgccatggaaaatcagcgatcttattcaatggaaagaactcgagaggctcagggaccaagttcttatgcacaaaggaccacaaaccatagtcctcctacccccaggaggagtccactacccatagatagaccagacttgaggcgtactgactcactacggaaacagcaccacttagatcctagctctgctgtaagaaaaacaaaacgggaaaaaatggaaacaatgttaaggaatgattctctcagttcagaccagtcagagtcagtgagacctccaccaccaaagcctcataaatcaaagaaaggcggtaaaatgcgccagatttcgttgagcagttcagaggaggaattggcttccacgcctgaatatacaagttgtgatgatgttgagattgaaagtgagagtgtaagtgaaaaaggggacagtcaaaagggaaaaagaaaaactagtgagcaggcagttttgtcggactctaacaccaggtctgagagacaaaaggaaatgatgtactttggtggccactctttggaagaggatttggaatggtctgaacctcagattaaggactctggggtagatacgtgtagtagcacaacccttaacgaggagcatagccatagtgataagcaccctgtaacctggcaaccatctaaagatggagatcgtttaattggtcgcattttattaaataagcgtctaaaagatggaagtgtacctcgagattcaggagcaatgcttggcttgaaggttgtaggaggaaagatgactgaatcaggtcggctttgtgcatttattactaaagtaaaaaaaggaagtttagctgatactgtaggacatcttagaccaggtgatgaagtattagaatggaatggaagactactgcaaggagccacatttgaggaagtgtacaacatcattctagaatccaaacctgaaccacaagtagaacttgtagtttcaaggcctattggagatataccgcgaatacctgatagcacacatgcacaactggagtccagttctagctcctttgaatctcaaaaaatggatcgtccttctatttctgttacctctcccatgagtcctggaatgttgagggatgtcccacagttcttatcaggacaactttcaataaaactatggtttgacaaggttggtcaccaattaatagttacaattttgggagcaaaagatctcccttccagggaagatgggaggccaaggaatccttatgttaaaatttactttcttccagacagaagtgataaaaacaagagaagaactaaaacagtaaagaaaacattggaacccaaatggaaccaaacattcatttattctccagtccaccgaagagaatttcgggaacgaatgctagagattaccctttgggatcaagctcgtgttcgagaggaagaaagtgaattcttaggcgagattttaattgaattagaaacagcattattagatgatgagccacattggtacaaacttcagacgcatgatgtctcttcattgccacttccccacccttctccatatatgccacgaagacagctccatggagagagcccaacacggaggttgcaaaggtcaaagagaataagtgatagtgaagtctctgactatgactgtgatgatggaattggtgtagtatcagattatcgacatgatggtcgagatcttcaaagctcaacattatcagtgccagaacaagtaatgtcatcaaaccactgttcaccatcagggtctcctcatcgagtagatgttataggaaggactagatcatggtcacccagtgtccctcctccacaaagtcggaatgtggaacaggggcttcgagggacccgcactatgaccggacattataatacaattagccgaatggacagacatcgtgtcatggatgaccattattctccagatagagacagggattgtgaagcagcagatagacagccatatcacagatccagatcaacagaacaacggcctctccttgagcggaccaccacccgctccagatccactgaacgtcctgatacaaacctcatgaggtcgatgccttcattaatgactggaagatctgcccctccttcacctgccttatcgaggtctcatcctcgtactgggtctgtccagacaagcccatcaagtactccagtcgcaggacgaaggggccgacagcttccacagcttccaccaaagggaacgttggatagaaaagcaggaggtaaaaaactaaggagcactgtccaaagaagtacagaaacaggcctggccgtggaaatgaggaactggatgactcgacaggcaagccgagagtctacagatggtagcatgaacagctacagctcagaaggaaatctgattttccctggtgttcgcttggcctctgatagccagttcagtgatttcctggatggccttggccctgctcagctagtgggacgccagactctggcaacacctgcaatgggtgacattcaggtaggaatgatggacaaaaagggacagctggaggtagaaatcatccgggcccgtggccttgttgtaaaaccaggttccaagacactgccagcaccgtatgtaaaagtgtatctattagataacggagtctgcatagccaaaaagaaaacaaaagtggcaagaaaaacgctggaacccctttaccagcagctattatctttcgaagagagtccacaaggaaaagttttacagatcatcgtctggggagattatggccgcatggatcacaaatcttttatgggagtggcccagatacttttagatgaactagagctatccaatatggtgattggatggttcaaacttttcccaccttcctccctagtagatccaaccttggctcctctgacaagaagagcttcccaatcatctctggaaagttcaactggaccttcttactctcgttcatagcagctgtaaaaaaattgttgtcacagcaaccagcgttac

SEQ ID NO: 1894 - DNA, 319 bp, Homo Sapiens
  misc_feature (18)..(18): n is a, c, g, or t
  misc_feature (115)..(115): n is a, c, g, or t
  misc_feature (164)..(164): n is a, c, g, or t
  misc_feature (187)..(187): n is a, c, g, or t
  misc_feature (209)..(209): n is a, c, g, or t
  misc_feature (225)..(225): n is a, c, g, or t
  misc_feature (262)..(262): n is a, c, g, or t
aacgaagcaatgactttntcagggagaaagatttgcatccatgctgaggaaatagacagggccagtaatcacacagcaacaatcatctgtaacttgcagaaattcaatgtatgantaagtgtttaaagcctagatagagggcaattatctggttatctgttttncatatttctatcagagataaaancctctttagggaaatttatgangggccatttgaaaganggtttccctcttttgtagaaaagaattctcttaaaanttaaaacaaatttgggaggctgggggatttttgagagtttaaaagagtgaggaagat

SEQ ID NO: 1895 - DNA, 2784 bp, Homo Sapiens
accaaaccgtcctctacagcctcctggccccggcgcaggctgcccgtactgcccgtggcatgagggagccggaagagctgatgcccgattcgggtgctgtgtttacatttgggaaaagtaaatttgctgaaaataatcccggtaaattctggtttaaaaatgatgtccctgtacatctttcatgtggagatgaacattctgctgttgttaccggaaataataaactttacatgtttggcagtaacaactggggtcagttaggattaggatcaaagtcagccatcagcaagccaacatgtgtcaaagctctaaaacctgaaaaagtgaaattagctgcctgtggaaggaaccacaccctggtgtcaacagaaggaggcaatgtatatgcaactggtggaaataatgaaggacagttggggcttggtgacaccgaagaaagaaacacttttcatgtaattagcttttttacatccgagcataagattaagcagctgtctgctggatctaatacttcagctgccctaactgaggatggaagactttttatgtggggtgacaattccgaagggcaaattggtttaaaaaatgtaagtaatgtctgtgtccctcagcaagtgaccattgggaaacctgtctcctggatctcttgtggatattaccattcagcttttgtaacaacagatggtgagctatatgtgtttggagaacctgagaatgggaagttaggtcttcccaatcagctcctgggcaatcacagaacaccccagctggtgtctgaaattccggagaaggtgatccaagtagcctgtggtggagagcatactgtggttctcacggagaatgctgtgtatacctttgggctgggacaatttggtcagctgggtcttggcacttttctttttgaaacttcagaacccaaagtcattgagaatattagggatcaaacaataagttatatttcttgtggagaaaatcacacagctttgataacagatatcggccttatgtatacttttggagatggtcgccacggaaaattaggacttggactggagaattttaccaatcacttcattcctactttgtgctctaattttttgaggtttatagttaaattggttgcttgtggtggatgtcacatggtagtttttgctgctcctcatcgtggtgtggcaaaagaaattgaattcgatgaaataaatgatacttgcttatctgtggcgacttttctgccgtatagcagtttaacctcaggaaatgtactgcagaggactctatcagcacgtatgcggcgaagagagagggagaggtctccagattctttttcaatgaggagaacactacctccaatagaagggactcttggcctttctgcttgttttctccccaattcagtctttccacgatgttctgagagaaacctccaagagagtgtcttatctgaacaggacctcatgcagccagaggaaccagattatttgctagatgaaatgaccaaagaagcagagatagataattcttcaactgtagaaagccttggagaaactactgatatcttaaacatgacacacatcatgagcctgaattccaatgaaaagtcattaaaattatcaccagttcagaaacaaaagaaacaacaaacaattggggaactgacgcaggatacagctcttactgaaaacgatgatagtgatgaatatgaagaaatgtcagaaatgaaagaagggaaagcatgtaaacaacatgtgtcacaagggattttcatgacgcagccagctacgactatcgaagcattttcagatgaggaagtagagatcccagaggagaaggaaggagcagaggattcaaaaggaaatggaatagaggagcaagaggtagaagcaaatgaggaaaatgtgaaggtgcatggaggaagaaaggagaaaacagagatcctatcagatgaccttacagacaaagcagaggatcatgaattttctaaaactgaggaactaaaactagaagatgtggatgaggaaattaatgctgaaaatgtggaaagcaagaagaaaactgtgggagatgatgaaagtgttcctacaggttatcacagtaaaacagaaggagcagaaagaaccaatgatgatagctcagctgaaactattgaaaagaaagaaaaagccaacctagaggaacgggccatttgtgagtacaatgaaaacccaaaaggatacatgcttgatgatgcagatagcagttcattagaaatcctagaaaacagtgaaacaacaccaagcaaagacatgaaaaaaacaaagaagatttttctgttcaaaagagtcccctcaataaatcaaaagattgtcaagaataacaatgagccgctcccagagataaaatccataggagaccagatcattttaaaaagtgataataaagatgccgaccagaaccacatgagtcagaatcatcagaatatcccaccaacaaatacagagagaagatcaaaatcctgtacaatactataaatatatatttatgttttcacagtcaccaagtgtattgtaatgtatacttgaaaaatgttataacttatgaagtaaagtttctgatagtagtctttaaaagatataagacttaatatgttttattcagcttctataagtgtgaccagttttgatatttatttatgctaatatttttaacaagtcatttcaaaatatgtgtatctcaaattctccctaaagtgttgtggccttaactgttcagtattgcaataaaaaatatatttttatatgtggaaaa

SEQ ID NO: 1896 - DNA, 364 bp, Homo Sapiens
ccagctccttcgtccctgatcctcaagcggttccctcccgtctcagctcagcggatcccccagagtggaggaggcctctccatgaggaggggagcagcccaaggcacctgtcctctgacccaccggcagcgagtgcgcaggtgtgagtgtaagttcatgtaggagagtgtatgcgtgtgcgcctgtgccctgcttgcaggcaagcagggctccctcatgtagcccggccttccccctgctgggggtccaccacatcgctgctctttctcacagtctgcctctgatgagggcgaattgctatgacattccaagctccaataaagactgtcccagactttgaaaaaaaaaaaaaaaaaaaaaaaaa

SEQ ID NO: 1897 - DNA, 798 bp, Homo Sapiens
  misc_feature (24)..(24): n is a, c, g, or t
  misc_feature (688)..(688): n is a, c, g, or t
  misc_feature (694)..(694): n is a, c, g, or t
  misc_feature (700)..(700): n is a, c, g, or t
  misc_feature (721)..(721): n is a, c, g, or t
  misc_feature (764)..(764): n is a, c, g, or t
  misc_feature (766)..(766): n is a, c, g, or t
tagaaggatgagaaggaaataaantgttataatcagataaggctggttataaaagagtaatgtattacctcaatttttgactgactttgtaaaagccaataactggtttaatgtttatcttgatagactttaaatgtatcaagtcttaattgtattttaaattgaagccttacatttttaaaacagattttgtatttttcttgtggaggtctttgctctaataacacacacacactgtctctctctctctctctctctctaattctaggcacacatttagttagatgtgaagcatttaattcattgggagctaggtcagctgccagatgagttgcaaaaacagaaaaaaacctacccattgaataacttctttgaatttggagataagttttcttttacttaaaatgaatatattaattctagaggggcaaaactagcaatgcttatgcaagtgacggtgctgctcttgttccacccccacccagatggtctctgagtgcgccgtcctgggcagggcacacggtctggagctgagagggtggagcaagagtgcactgactccgagccgagggcaggagtggctcaacttggtctcgtcttgcacttagtgcaaatccaataattaagatgcctagacttctgcccttggtcacagtaaccaccacattttggaagactttttcctggnggcatnctagangaccgacttttgcagccttgnctttcagctgactttgctgcaggggggtgcctggcccggggtntnctgacgtccctgcactggttattttgattcct

SEQ ID NO: 1898 - DNA, 2119 bp, Homo Sapiens
ggcacgagtaggggtggcgggtcagtgctgctcgggggcttctccatccaggtccctggagttcctggtccctggagctccgcacttggcgcgcaacctgcgtgaggcagcgcgactctggcgactggccggccatgccttcccgggctgaggactatgaagtgttgtacaccattggcacaggctcctacggccgctgccagaagatccggaggaagagtgatggcaagatattagtttggaaagaacttgactatggctccatgacagaagctgagaaacagatgcttgtttctgaagtgaatttgcttcgtgaactgaaacatccaaacatcgttcgttactatgatcggattattgaccggaccaatacaacactgtacattgtaatggaatattgtgaaggaggggatctggctagtgtaattacaaagggaaccaaggaaaggcaatacttagatgaagagtttgttcttcgagtgatgactcagttgactctggccctgaaggaatgccacagacgaagtgatggtggtcataccgtattgcatcgggatcttaaaccagccaatgttttcctggatggcaagcaaaacgtcaagcttggagactttgggctagctagaatattaaaccatgacacgagttttgcaaaaacatttgttggcacaccttattacatgtctcctgaacaaatgaatcgcatgtcctacaatgagaaatcagatatctggtcattgggctgcttgctgtatgagttatgtgcattaatgcctccatttacagcttttagccagaaagaactcgctgggaaaatcagagaaggcaaattcaggcgaattccataccgttactctgatgaattgaatgaaattattacgaggatgttaaacttaaaggattaccatcgaccttctgttgaagaaattcttgagaaccctttaatagcagatttggttgcagacgagcaaagaagaaatcttgagagaagagggcgacaattaggagagccagaaaaatcgcaggattccagccctgtattgagtgagctgaaactgaaggaaattcagttacaggagcgagagcgagctctcaaagcaagagaagaaagattggagcagaaagaacaggagctttgtgttcgtgagagactagcagaggacaaactggctagagcagaaaatctgttgaagaactacagcttgctaaaggaacggaagttcctgtctctggcaagtaatccagaacttcttaatcttccatcctcagtaattaagaagaaagttcatttcagtggggaaagtaaagagaacatcatgaggagtgagaattctgagagtcagctcacatctaagtccaagtgcaaggacctgaagaaaaggcttcacgctgcccagctgcgggctcaagccctgtcagatattgagaaaaattaccaactgaaaagcagacagatcctgggcatgcgctagccaggtagagagacacagagctgtgtacaggatgtaatattaccaacctttaaagactgatattcaaatgctgtagtgttgaatacttggccccatgagccatgcctttctgtatagtacacatgatatttcggaattggttttactgttcttcagcaactattgtacaaaatgttcacatttaatttttctttcttcttttaagaacatattataaaaagaatactttcttggttgggcttttaatcctgtgtgtgattactagtaggaacatgagatgtgacattctaaatcttgggagaaaaaataatattaggaaaaaaatatttatgcaggaagagtagcactcactgaatagttttaaatgactgagtggtatgcttacaattgtcatgtctagatttaaattttaagtctgagattttaaatgtttttgagcttagaaaacccagttagatgcaatttggtcattaataccatgacatcttgcttataaatattccattgctctgtagttcaaatctgttagctttgtgaaaattcatcactgtgatgtttgtattctttttttttttctgtttaacagaatatgagctgtctgtcatttacctacttctttcccactaaataaaagaattcttcagtta

SEQ ID NO: 1899 - DNA, 181 bp, Homo Sapiens
  misc_feature (18)..(18): n is a, c, g, or t
  misc_feature (44)..(44): n is a, c, g, or t
  misc_feature (75)..(75): n is a, c, g, or t
  misc_feature (97)..(97): n is a, c, g, or t
tggggacaagcatttggncacactcgctacaagattggttagtnattatggatgatgaagtctgtcggaaaattnaaatcttaattgtccacctggncttgcaaaggcacagattccccgtccacagctcacgaccagatgcaccagcaggagtccacatcgaggacgtcctccgggcact

SEQ ID NO: 1900 - DNA, 630 bp, Homo Sapiens
ggacacagccaaaccacatcaggcaacttgtgcaatttttttcttctgttgttacttaggatcgttcctgtgaatatcaaattcatcattgaggggatggaagaggctggctctgttgccctggaggaacttgtggaaaaagaaaaggaccgattcttctctggtgtggactacattgtaatttcagataacctgtggatcagccaaaggaagccagcaatcacttatggaacccgggggaacagctacttcatggtggaggtgaaatgcagagaccaggattttcactcaggaacctttggtggcatccttcatgaaccaatggctgatctggttgctcttctcggtagcctggtagactcgtctggtcatatcctggtccctggaatctatgatgaagtggttcctcttacagaagaggaaataaatacatacaaagccatccatctagacctagaagaataccggaatagcagccgggttgagaaatttctgttcggatactaaggaggagattctaatgcacctctggaggtacccatctctttctattcatgggatcgagggcgcgttgatgagcctggaactaaaacagtcatacctggccgagttataggaaaattttcaatc

SEQ ID NO: 1901 - DNA, 2629 bp, Homo Sapiens
acttgtcatggcgactgtccagctttgtgccaggagcctcgcaggggttgatgggattggggttttcccctcccatgtgctcaagactggcgctaaaagttttgagcttctcaaaagtctagagccaccgtccagggagcaggtagctgctgggctccggggacactttgcgttcgggctgggagcgtgctttccacgacggtgacacgcttccctggattggcagccagactgccttccgggtcactgccatggaggagccgcagtcagatcctagcgtcgagccccctctgagtcaggaaacattttcagacctatggaaactacttcctgaaaacaacgttctgtcccccttgccgtcccaagcaatggatgatttgatgctgtccccggacgatattgaacaatggttcactgaagacccaggtccagatgaagctcccagaatgccagaggctgctccccgcgtggcccctgcaccagcagctcctacaccggcggcccctgcaccagccccctcctggcccctgtcatcttctgtcccttcccagaaaacctaccagggcagctacggtttccgtctgggcttcttgcattctgggacagccaagtctgtgacttgcacgtactcccctgccctcaacaagatgttttgccaactggccaagacctgccctgtgcagctgtgggttgattccacacccccgcccggcacccgcgtccgcgccatggccatctacaagcagtcacagcacatgacggaggttgtgaggcgctgcccccaccatgagcgctgctcagatagcgatggtctggcccctcctcagcatcttatccgagtggaaggaaatttgcgtgtggagtatttggatgacagaaacacttttcgacatagtgtggtggtgccctatgagccgcctgaggttggctctgactgtaccaccatccactacaactacatgtgtaacagttcctgcatgggcggcatgaaccggaggcccatcctcaccatcatcacactggaagactccagtggtaatctactgggacggaacagctttgaggtgcgtgtttgtgcctgtcctgggagagaccggcgcacagaggaagagaatctccgcaagaaaggggagcctcaccacgagctgcccccagggagcactaagcgagcactgcccaacaacaccagctcctctccccagccaaagaagaaaccactggatggagaatatttcacccttcagatccgtgggcgtgagcgcttcgagatgttccgagagctgaatgaggccttggaactcaaggatgcccaggctgggaaggagccaggggggagcagggctcactccagccacctgaagtccaaaaagggtcagtctacctcccgccataaaaaactcatgttcaagacagaagggcctgactcagactgacattctccacttcttgttccccactgacagcctcccacccccatctctccctcccctgccattttgggttttgggtctttgaacccttgcttgcaataggtgtgcgtcagaagcacccaggacttccatttgctttgtcccggggctccactgaacaagttggcctgcactggtgttttgttgtggggaggaggatggggagtaggacataccagcttagattttaaggtttttactgtgagggatgtttgggagatgtaagaaatgttcttgcagttaagggttagtttacaatcagccacattctaggtaggtaggggcccacttcaccgtactaaccagggaagctgtccctcatgttgaattttctctaacttcaaggcccatatctgtgaaatgctggcatttgcacctacctcacagagtgcattgtgagggttaatgaaataatgtacatctggccttgaaaccaccttttattacatggggtctaaaacttgacccccttgagggtgcctgttccctctccctctccctgttggctggtgggttggtagtttctacagttgggcagctggttaggtagagggagttgtcaagtcttgctggcccagccaaaccctgtctgacaacctcttggtcgaccttagtacctaaaaggaaatctcaccccatcccacaccctggaggatttcatctcttgtatatgatgatctggatccaccaagacttgttttatgctcagggtcaatttcttttttcttttttttttttttttttctttttctttgagactgggtctcgctttgttgcccaggctggagtggagtggcgtgatcttggcttactgcagcctttgcctccccggctcgagcagtcctgcctcagcctccggagtagctgggaccacaggttcatgccaccatggccagccaacttttgcatgttttgtagagatggggtctcacagtgttgcccaggctggtctcaaactcctgggctcaggcgatccacctgtctcagcctcccagagtgctgggattacaattgtgagccaccacgtggagctggaagggtcaacatcttttacattctgcaagcacatctgcattttcaccccacccttcccctccttctccctttttatatcccatttttatatcgatctcttattttacaataaaactttgctgcca

SEQ ID NO: 1902 - DNA, 320 bp, Homo Sapiens
tttttttttttttgagacagggtctcgccaggttagtctccaacttctaggctcaagtgatcctcccgcctcagcctcccaaagtgctgggattacaggcatgagccaccatgcccagccagacatcttaatatgcactatctactatattataggctcttgagaaacatttcattccacagaatggttctgatttatccccagtgttgatgctaccaagaggaaaagattcactacaaaggtagttcaccttttccaagtgtcaaatattccatattacctttgaaaaccagagattattaggttttaatcccactgat

SEQ ID NO: 1903 - DNA, 477 bp, Homo Sapiens
cggcgtcctcggcgggtgcggcgggtgcggtgcgttcctggcggctgcgaaagtcctgcagggcgcggcggttctggaaatcgatgagcgccacgcgatggccgcgttccagcagctctcgcccgcgcagcaagtacgatctccttgtggtcggtggtgacgatggtgaagtacacgtacttgcccgtgcgctccacgcagtccaccttgaggatggagtggaagcgcacgtccttggggcgcgcgcggagggctggcggggaacaggctcaggcggtcggaggtgagcaccccgcgcttcttcttccatagctggaagaggctgtcgctgcgcttctccaactcgccctcgcgtacaccatcgtcgggggatttcatgtcgtgccgagcgcgggactgggagcggcaatgcgggcggtgacggcgccggctctgctcctcgtggccccggcgcggcctttatagctgccctcgtgc

SEQ ID NO: 1904 - DNA, 406 bp, Homo Sapiens
ttttttttttttttttttggcaggtaaaatgtagttttattcagcagctatctcatcagcagctctcacactgtccacctttacctaggctgtcttctccagatctgcagctcctctcagcagccagctctgtggctcctgcacccccatgcttgcaggtgcactccctggctacagggtcagcggcttaactctccctctgggcacaagctgagccatgtcctggctcccctctatctatctgccagatggtcactctcccttacaggggtcaatagcttcactctctctgggtgctagtgcacaccacgtggagccatgcccatccgagcccaagaacatctgtacagcgtcacgagggcagttataccttttccaaacaatagtggctttgagcaagtatgaa

SEQ ID NO: 1905 - DNA, 438 bp, Homo Sapiens
cggccgcttttttcacattaagaaaaagaaaatcaaactgctacaatttatttaactctttctttcacaggaaatataagtatgtaatgtaaacaccgacacgtgaaataaagtacaaggatcaggaagacaagtgaattggacaatactcttgctttaacactttactgcttcctgatttcatttgcagcatgaatcacctggttatacagactggcagaaggcaacattcagatttacagatacaccagaaagcctctgaaatccaacgatgccatacggaagtctgatctttctgttgcaaaaaaaattaaagctgggcacatgtccatttatccatttacccaaggcatttaatgtaggagcataagaatgcactgattaacacgtgagctttaatatgcttgtggaggccaagattaaattgtacctcttctc

SEQ ID NO: 1906 - DNA, 4051 bp, Homo Sapiens
atggcccgaccgccgccactaccggggcctgagggggcctggcggagcccgagcgcggcccggcccgcagcgtggggccccgagcgcggtgaagagattgttttctgaaagctgcgttggaggctgtgacagagctgagagcctgtgtggagcggatggggaggctttctcaataacatggccctttgccattagccttgccatgaccacatttttcaccagcgtccccccctggattcaagatgcaaagcaggaggaggaagtgggctggaaactagttcccaggcctcggggccgggaggcggagagtcaagtgaagtgccaatgtgaaatttcgggaacacctttctcaaatggggagaagctgaggcctcacagcctcccgcaaccagagcagagaccatatagctgccctcagctgcactgtggcaaggcttttgcttccaaatacaagctgtataggcacatggccacccactcagcccagaaaccccaccagtgtatgtactgtgataagatgtttcaccgcaaggaccatctgcggaaccatctgcagacccatgatcctaacaaagaggccctccactgctctgagtgcggtaagaattacaatacgaagctgggctaccggcgccacctggccatgcatgctgccagcagcggtgacctcagctgcaaggtgtgcctgcagacctttgagagtacccaggccctgctagagcacctgaaggcccactcacgccgggtagcaggcggtgccaaggagaagaagcacccctgtgaccactgcgaccggcggttctatactcgtaaggatgtacggcggcacctagtggtgcacacaggccgtaaggacttcctgtgccagtactgtgcccagcggtttggccgtaaggaccacctgacgcgtcatgtcaagaagagccactcgcaggagctgctcaagatcaagacagagcccgtggacatgttaggcctactcagctgcagctccacagtcagtgtgaaggaagagctgagccctgtgctgtgcatggcctctcgggacgtaatggggaccaaggccttccctggcatgttgcccatgggcatgtatggtgcccacatccctaccatgcccagcacgggcgtgccacactccctggtgcacaacacgctgcccatgggtatgagctaccctctggaatcctcacctatctcttccccagctcagctccctccaaaataccagcttggatctacctcatacttgcccgacaaattgcccaaagtggaggtggatagttttctggcggagcttcctggaagcctgtctctctcatccgctgaaccccagcccgcctcacctcagccggcggcagctgcggccctcctagatgaagcactgcttgccaagagccccgccaacctctctgaggccctctgcgctgctaatgtggacttctcccacctactgggctttcttccactcaacctgcccccgtgtaacccacctggggccacaggaggcctggtcatgggctactcccaggctgaggcacagcccctgcttaccactttgcaagctcagcctcaagattccccaggagctgggggaccactgaactttgggcctctgcactccttgcctcctgtcttcacgtctggcctgagtagcaccaccctgcctcgtttccatcaagcattccagtagcccccacagaggccctcagctcagtttttggctctgttatggagccttagtacccaccccgtctgtgtcccccatgaaggcagctgagctttcagagctgggttcaaaaaaaaaaattccagtgtctgtatacaggagcacttggtttgggggttcaggctctaggatcgattccagaaggagccttgagccccaaccccgtgaaaagatctcataccgtaggacttcaggtattatttacttttatttttttgacctgaatcgggagccacacttggccctcttcctctccaaagcgccagaacctccttctctttggagaatggggaggcctcttggagacacagagggtttcaccttggatgacctctagagaaattgcccaagaagcccaccttctggtcccaacctgcagaccccacagcagtcagttggtcaggccctgctgtagaaggtcacttggctccattgcctgcttccaaccaatgggcaggagagaaggcctttatttctcgcccacccattcctcctgtaccagcacctccgttttcagtcagtgttgtccagcaacggtaccgtttacacagtcacctcagacacaccatttcacctcccttgccaagctgttagccttagagtgattgcagtgaacactgtttacacaccgtgaatccattcccatcagtccattccagttggcaccagcctgaaccatttggtacctggtgttaactggagtcctgtttacaaggtggagtcggggcttgctgacttctcttcatttgaggtcacatttttcccccgtggggaaataaactgactttggactgcttcagtctctgccatcttccatgactgcatttgttcctgcctgcctcggcggtatccacagaagacaggcaagaggattggagcagttttctcacaggtctgcaattctgtttttctccaagtacattatgaccccctcatccttctcttgaactggagaggggaagaaatgaaaggcatgcccacgtccgtcacctccccatcccctagtccccaccttgaacatcatgagctgttgttattagtcttggaagcagagtctgggttggtgtggatagcaaaggaggaagtctgagcccctcattggtcttcctcccacctgtcccttttccgggaagttgtggaattgttggaagaagagtttgcagaaggttaggaatgggtagatagctaagtcctaatctatgggtacattgttgtgtcccaaaccaaaattttccttatccacaatgtcccttctgtctcttccactttacagtggactcggccactgtgcataggcttctctgctctccatcaaatcacttccactttcctgtgcccccacccccgcctccagttttccgctagtatccggcaaggtttcttgcaacaaatgattagttcttttcttctgactcgtggggctccctgctgcagagagcacagcccttgcctggagcccaggaaccccatccttgcttcatctcagttcttcatgggcttcactcttcccactcacggaagggaggtagctcagggacctccactgtgggacccttgagatgcttccactctgattcagaaacacacttctacctctttactgttaactcttaacagatgcagtcagcagtttctgggcacttctctcagtaggtgcctcatgctgacttctccactagggtttcaggacaaactaccaaggaattgcctcagcctcctaccagtcctccctcacccaccttctgtctaggttcacttggtttgtcatcaggaactgagcaggtccaggactcagctttctgcttcagcctaagccagtactccttgtttgaggtaaaagccttaaaatttagctccctagctcttgattagaagcaatttggagtaagtgtgttttgatttaggcagggtagcttgggatacctttttaaaaacaccagatattaaaatgtctggcaaggttagaatcagactagatgatttgcttctaaaaattagtttcagtgagtcccagggactaattaaggtttattttaaaaagtgtctaccttggtacgcagccacctcctgcatgctgtgcatgttattgggacttgtattataggcgatggtatgtgagaatccagttgggactcgctgttgccatcctctttgttgtatctggttttcatcactagactcagcaacccttctcaccttaactgccaccttccctacactctcagtttacagaggccactgggcctctggctgcagaatacaaagtcccgggctgttagaggagtcctttcctctctgcctgccctttcctgtccctccctc

SEQ ID NO: 1907 - DNA, 1500 bp, Homo Sapiens
tcacagcagctgtggctggggagcccagatgaagtgtggctctatcttgtatgtgagcacacccacattttcactgccattatctgggacagcagaaccaggtttggctcaacagatttctctttccacccatctattgcaggtgtagtggtcttgctgcttctccagggaggatctgcctacaaactggtttgctactttaccaactggtcccaggaccggcaggaaccaggaaaattcacccctgagaatattgaccccttcctatgctctcatctcatctattcattcgccagcatcgaaaacaacaaggttatcatcaaggacaagagtgaagtgatgctctaccagaccatcaacagtctcaaaaccaagaatcccaaactgaaaattctcttgtccattggagggtacctgtttggttccaaagggttccaccctatggtggattcttctacatcacgcttggaattcattaactccataatcctgtttctgaggaaccataactttgatggactggatgtaagctggatctacccagatcagaaagaaaacactcatttcactgtgctgattcatgagttagcagaagcctttcagaaggacttcacaaaatccaccaaggaaaggcttctcttgactgcgggcgtatctgcagggaggcaaatgattgataacagctatcaagttgagaaactggcaaaagatctggatttcatcaacctcctgtcctttgacttccatgggtcttgggaaaagccccttatcactggccacaacagccctctgagcaaggggtggcaggacagagggccaagctcctactacaatgtggaatatgctgtggggtactggatacataagggaatgccatcagagaaggtggtcatgggcatccccacatatggacactccttcacactggcctctgcagaaaccaccgtgggggcccctgcctctggccctggagctgctggacccatcacagagtcttcaggcttcctggcctattatgagatctgccagttcctgaaaggagccaagatcacgcggctccaggatcagcaggttccctacgcagtcaaggggaaccagtgggtgggctatgatgatgtgaagagtatggagaccaaggttcagttcttaaagaatttaaacctgggaggagccatgatctggtctattgacatggatgacttcactggcaaatcctgcaaccagggcccttaccctcttgtccaagcagtcaagagaagccttggctccctgtgaaggattaacttacagagaagcaggcaagatgaccttgctgcctggggcctgctctctcccaggaattctcatgtgggattccccttgccaggatggcctttggatctctcttccaagcctttcctgacttcctcttagatcatagattggacctggttttgttttcctgcagctgttgacttgttgccctgaagtacaataaaaaaaattcattttgctccagta

SEQ ID NO: 1908 - DNA, 8332 bp, Homo Sapiens
  misc_feature (91)..(92): n is a, c, g, or t
  misc_feature (313)..(313): n is a, c, g, or t
  misc_feature (318)..(318): n is a, c, g, or t
  misc_feature (320)..(320): n is a, c, g, or t
  misc_feature (903)..(903): n is a, c, g, or t
  misc_feature (3874)..(3874): n is a, c, g, or t
  misc_feature (3896)..(3896): n is a, c, g, or t
  misc_feature (4325)..(4325): n is a, c, g, or t
  misc_feature (4327)..(4327): n is a, c, g, or t
  misc_feature (4737)..(4737): n is a, c, g, or t
  misc_feature (4756)..(4756): n is a, c, g, or t
  misc_feature (4767)..(4767): n is a, c, g, or t
  misc_feature (4792)..(4792): n is a, c, g, or t
  misc_feature (5481)..(5481): n is a, c, g, or t
  misc_feature (6519)..(6520): n is a, c, g, or t
  misc_feature (6695)..(6695): n is a, c, g, or t
  misc_feature (6767)..(6768): n is a, c, g, or t
  misc_feature (6894)..(6894): n is a, c, g, or t
taggagatacacctaatgtaaatgacgagttaatgggtgcagcacaccaacatggcacatgtatacatatgtaacaaacctgcacgttgtnncatgtatcctagaacttacagtataatatatatatattaaaaatatatatatataacctactcatttagtgtcatagttttttttttaatgctcaagagaagcctgactattgctaaaataggtctatccccgtgagagtttcatacctcatgacatctttaggataccctttctgtggtccaagcagctctctaaaggctgtttcccaggatcgaaaaangagtngnggggatgaggaggaggcccagggattcccgtggcaccaaggaagaaggtgagcttccacaggacctctgtctaagtctgcccgggctgccataacaaagtgccgcagaggctgagtgtcttaaacagcagaaatgtatttctcacagctctggaggctggaagtctgaaatcaaggtgcggggtcttccctcgcacatggctgcatcctcctggtttcctcttctctctaggacaccagtcatattgcattagggcccaccctaagtacctcattttaccgtaattgcctctgtaaaggccttatctccaaatacagtcacatctgaggtgccagtcgtcagggattccacacaacttcagggaacacaatttggccctaacagcctgtccccacacccactgcacttagcttcatagtgcacattagcacatcactgaggtggccccacaaaccatgattcgtaatgtctaaccctgtttctcaggtacttgataacagatcacttttctcccagaaggcagcaaacgttcccccgataaccaggggacaccctgcttagcagatgctaaactgcccctgtntggaggccgccaccgggccgctgcaccgtccagtacagaaccactgggcacatatggacatttaattaaaactagctggccgggcgcggtggctcacgcctgtaatccagcactttgggaggccgaggcaggcggatcatgaggtcaggagttcgagaccagcctgaccaacatggtgaaacccgtctctactaaaaatacaaaaagtagccaggtggtgcgcacgcctgtaatcccagctactcaggaggctgaggcaggagaattgcttgaacccgggatgggtcagaggttgcagtgagccaagatggcaccactgcactccagcctgggggacacagcgagactccttctcaaacaaacaaaaaaacaaacaagctaattaggtggggcacagtgctcatgcctataatcccagcactttgggaggccgaggtgggcggatcacttgaggtcaggagtttgagaccagcctggccaacatggtgacaccccgtctctactaaaaatacaaaaattagccaggcgtgggcacggtgatggacgcctgtaatctcagccacttgagaggctgaggcaggagaatcccttgaacctgggaggtggaggttgcagtgagccaagactgcaccactgcactccagcctgggcaacagagctagactcagtctcaaaaatatataaataaacaaacaaaataaaattagctaattagaaatcagccccttggtggtatcagctagatagcgactatcatattggcagggcagatagtggacattcccattgtcacagaaaactctgttcagaccttcctttttggaagctcctcccttgacttgcctgccggggctttctctgacctatccgtgctgcttcagcctcctgggggcaatgataagggtgaggttatctgggtcctcggccgatgcttgcattgagaccattcctgcctctaagtgctcccatgcaaaacaagcaggccactgtcaccaaagcctccagcacctgctcagcgtggcctagtccttccccagagtacatgctggggccgcgcagggctagtgcacacgctctctcttgcagaggatcagcacggccaccggtgacggcaaacattactgctacccgcacttcacctgcgccgtggacacagagaacatccgcagggtgttcaacgactgccgcgacatcatccagcggatgcacctcaagcagtatgagctcttgtgaggacttggccgccaccctgcgacggagcggcgcccccggactgcctgactgccagccccatgccatggtaggaggcagagtctctagttccatctcgctgccgtctgtcccgttctgtgtcgaccaccaagcctctggctacctctgtcccctcaggtttggttgtgtagcttctgttgtcattgaatacggcttcccgcagcatcccacccccaaaccaccgactctcattgccgacactgcagcagaatctctccgggtgggagcccaattattcattctccctttattgattcatcgaggagaacttggtagatggggagaaaaacacagttggtttttttttccacgttatcaaccgtgactgcaagagcgttcgtgcatgccctgagccacggccgtctctgattctccctttatgaagctgcaggctgacgagagatggtcccttcccattgccttagcccaagacttggagtcgaccccaagcgacagagtgaccagaaacccttttacagtcacattcagagtcgctgctggcctcaggcatttgaattagagctactttgagcctcttaggcagaaaacctaccacattcactactgcaaaatgtgtcctgtctaaaaatgattctctaaactttccctatacttaggcatagtcttctttcttagattctctttgttgttgtccctattgctggtttattacactgtacagaccacaaaatgtaatattcttttgtataactactaaagaaaaatccttgtagatctttgtgccttcaccatggctatctatacctgtacatgaaatgtgtttgtattgtgctgaagagcttaatgtcaacattacctgctgcttactctgaaaaaaggaatgaatggtagctgtagaatttaggatattttatcaggttggcactttataaaatactccctgatttaaaaaattgtaagttatacacgttaatcatccacattctatcgacaatgtaccaacatcacaagctgttgcaaccacctgctgttacttctctgagctgtaaaaacctgaactcaattcaggggcacaaattgcaatctaatcttttcagggaaccagggatttttttctctctctctagacaatatgtttcctcattagtctgctaatgaaacacttcttcaagttccccaagtgggaacaggtccatcattcccttagtcaaaactttggacacaggctacgtcatacaagtaagcaaacagtaagagaaaaacaaaatgtggccaggcgcggtggctcacgcctgtaatcccagcactttgggaggccgaggcaggcggatcacgaggccaggagatcaagaccatcctggctaacatggcgaaaccctgtctctaccaaaaatacaaaaattagccaggcgtggtggcgggcacctgtaatctcagctactcgagaggctgaggcaggagaatctcttgaacctgggaggtggagattgcagtgagccgaggtcgtgccattgcactccagcctggacatcaaagtgagactcaggccaaaaaaaaaaaaaaaaaaaaccttgacgtgtcaatgtttgtgtcttggccttaggagaatgaggatgacagcttcacttgccttttgaagaagaaacattacaaaaccttaacctgaagtataagtcaaaagatacggctctttctcacacttgcaagacttacaaatacagcctcaaacattatgacncaccaacaatatctagaaaganagaactggtgtagcaatgaatgcttcatattctagctgtagccacagagttgagggtagtttttgtaggtctaaaataatctataaagatgtccaaagttaaattttcaacaatacaaatctagagaagtgacagcctacattacttcattactcttcttttagtctttagtctttaatattttaaagtttactctataaatcagcattttgtaatcctttataaactcatccagatttaaatgctactttttcatgaagaaaggatgataactttatagacagtcagtgcaacacacacattttatctcatcaccgtcttactgcctccccatccactgtctcataaagccctcagctgaactaagataaataatacaatggaaattattttcagttccccttgcactgtcaaagtaaaacaagaaancngaaaagctgcacccccagcaagaaagggaagtatgctgttgtatgcatcattactcaacaattaccctctaactaaacatcctgtttaagagtttaattcaaacaacagccagactgttaagaaaaaaaacaaaaagaataacttttatctggcttacaattattaaagcatttattttcaggtaccaaaagccatatcccattccactttttaagtttcttttgatcactgacaggcattaacagatgtagcaacgtggtctcctatagagaaaattacacttatctaaaaatctgattccattaattgatcaagtataaaaatctacgaaaacaatatgttctgcacatcacatctgtacttttttttttttaaatatattttttcgagacggagtctcactctgttncccaggctagagtgcagtngcatgatcttngcctcactgcaacctccgcctcccnggctcaagggattctcctgcctcagccctcagctggtattataggcacttgctaccatgcttggctaatttttgtatttctagcggagacgaggtttcaccatgttggccaggctggtcttgaactcctgacctcaagtgatccacccgcctcagcctcccaaagtgctgggattacaggtgtgagccactgttgcgcggaccacatctgtacttttaagggtacagctttacagtacataggaatttgagaaccacttcacaggaagagggaaacagcccaatatttatttagatacacataatcccaagagagagctggggccaccaggccttcctgggggaaccaaggactgtcgtgcatgtgagtgacgacattaatagcatttacatactgtacagatgcaacctttgatgatacatatatttgataaaaatgagaaaacagatttgttgtagagtacctatccacttttatagcatgagaacagtacaatcaactatttatttttcagttactcatttcagtgattgagaatttctgtgctgtgcagagagacggcctgtaattggtctcatcatccacttgattctaacatgatctctgcccaaagttccatttcttgggctttgatatttataatggcgcctgctcttcatcttgtcttacgctttccgagcaagttcaanccagaaagaaaaggtgaggctagaagccaaagtgagtgagtgtgaggaccacaaggaagcccaccactccacagtagatgatcaaaaccacatcctcacgtgggaggtagcacttggagagggtgtagtctgtgggcgtgatgctaccctggaaaggagaagggaaagttatgctgagagcaccaggcacacgttgaacaccgcagtcttagaaacagcagagggaagactgccttctcaggtcccctcaggtgaggcagggaacgggccctcctcacctgagaccaagggggcccagccttctccctgcacagctcacccccgaccagcccaggctccagcaggagagacaagtaaggcccaagagagcctgagtggaaaatgtctgggacactgacctgtcaaaactggcccctggctcactgggttcccatcaaatatagtgggggatccataacagagattcagagaggcaccgtggagttccagggtcatcggtcagcgaggaacaaggagggaaaggtgtcttcctgccccttgatgctcaactaacatctgttcctagaaatacatgtgtccaggtcgtctccatgggcttttctttgcagatacttttatgtggaacaacagtggcaaatgttttcatttactttactttgaatttgaaaatgttagggattactccacctttttatgaagtaaaagaacctgtcgtaccagcatcatgagctggatgcaggagcccatggctgaaaggagttaaaacgcccagtggtcattaagtgaaacatcttttatcaacctgcaaaagctgcagcgttctctgccaggtcaaatgggcatgtttagaaaataagagaagatggctgagtatagctaatgaataaatggttgtttctttagaaaaattaacacacacagagtgtaagaggagaggatacgccctcctgaaggataaagtccacctggagctgcctgcctcgcttctcacattaactgcccaggaatgtcatgctgattggttcccggaagtgtttnncaaggggcagtgtatggagctacgtgtagaaggagagaaatttgtgtgtggcttttgtaaattttgaccgattgcagcaattaaatagttgattactgtgttgatttaaatacttatgaaagctttcagacaaaaataaactttcacgtacatgatgaaactggggttgtttctnttcctccaactgaaagatgggacgctgagctcggggactcggccccgtggtgcacctcgctaggcgctgtgnntggccacttgagaaccaggcgcggctggagccaccacagcagctgacagtggccgagaagacagcaaagctaggctgttagctgcatcctcaaccaggctctcaccgctcagcagacggccgctgnatcgcttctttccttaaattacatactaaatccttattttgaaggactggtttatttttttccttaaaaatcctttggtttatttacactaaatcaaaggtaaggtcagccctttgttctcatcccagattttatatactttttacggtattttatctttataaatattttatacatttatcttataaatatttcttatatttatatattatgtataatgtaatatgtattatataaatctatataagaaaatgcattttaattttaattaagtccctaaaaaattgacttttcagttccattcacatttctaaatacatttaagttcggtgaaaaactctgaatacaaagaatagctgagactattactgacttgagggtaggaaacagaagtaggtttactggaaaaaaaaaaagcgattaaatgaaaatctgagatactgtgaaagccaggcctccacccctgtccccccaggtgataactaagtcatgaacgtttcagcaaacacctgctctagcctgggcactctgcttgttgacatgcaaggtgatgagagtcacactgtgacatgaattagcatcacgacaccctggcaaaccttttgtgatgcctcccgtgaaagcacgtcatagttctccttaaatgggatgtcctttcctctgcaggagcagcgtcttccccagaacagttagcatcacttctccgatacagaggataatgctgtccggggtggagagaggagttcaggcggctatcgtgaaaccacaggctgcctcgtgtctgccatgagccctttcctcccccacgtcacctgcaggaggacaggggcagacgtgggcagcagaggcccaggtccacaccggctggagccacgtgcctgctgggtacaagtcaggccattaatccgcacacctgaccctcatcaaagggcaagaagcgctagggggctgagtgagcaaccgaagcggacgaacacgggacagaaggcacctgtggcattcagatgctctcctacctctcgggagcagttcagtctgtgagaaacttcaatgagctctgcttctgtttcagagcagatgccacagccatccccgttcagcgccacgctgttgaccatcacaaagctgaagcgagggaaacgcaggtgaggccgctgggggtatcagtgctttcttttccctactgttcccatgaaaagaaagctaagcatccagtgcaaagaaacaagcccagagcagctttcaatccacccagaataatttggtgtatttttaaatatgagtcaatattaacaaaaatagcattactgggagttctgtcttaagacacgatcgaagggtttttgaccctaaacttgtgagaaatcccagattacagaagctctgcagttagactatgtctaagcctcatcctccaaccagaacctcatctgttaca

SEQ ID NO: 1909 - DNA, 1972 bp, Homo Sapiens
ctgaacaggaagcagttcgctcgcgcctaggttggcgcgggctgggaggtgttccagccctttaagatgttgcgcgtggtgagctggaacatcaatgggattcggagacccctgcaaggggtggcaaatcaggaacccagcaactgtgccgccgtggccgtggggcgcattttggacgagctggatgcggatatcgtctgtctccaggaaaccaaagtgaccagggatgcactgacagagcccctggctatcgttgagggttataactcctatttcagcttcagccgcaaccgtagcggctattctggtgtagccaccttctgtaaggacaatgctaccccagtggctgctgaagaaggcctgagtggcctgtttgccacccagaatggggatgttggttgctatggaaacatggatgagtttacccaagaggaactccgggctctggatagtgagggcagggccctcctcacacagcataagatccgcacatgggaaggtaaggagaagaccttgaccctaatcaacgtgtactgcccccatgcggaccctgggaggcctgagcggctagtctttaagatgcgcttctatcgtttgctgcaaatccgagcagaagccctcctggcggcaggcagccatgtgatcattctgggtgacctgaatacagcccaccgccccattgaccactgggatgcagtcaacctggaatgctttgaagaggacccagggcgcaagtggatggacagcttgctcagtaacttggggtgccagtctgcctctcatgtagggcccttcatcgatagctaccgctgcttccaaccaaagcaggagggggccttcacctgctggtcagcagtcactggcgcccgccatctcaactatggctcccggcttgactatgtgctgggggacaggaccctggtcatagacacctttcaggcctctttcctgctgcctgaggtgatgggctctgaccactgccctgtgggtgcagtcttgagtgtgtcctctgtgcctgcaaaacagtgcccacctctgtgcacccgcttcctccctgagtttgcaggcacccagctcaagatccttcgcttcctagttcctctcgaacaaagtcctgtgttggagcagtcgacgctgcagcacaacaatcaaacccgggtacagacatgccaaaacaaagcccaagtgcgctcaaccaggcctcagcccagtcaggttggctctagcagaggccagaaaaacctgaagagctactttcagtcctcccctagctgtccccaagcctctcctgacatagagctgcctagcctaccactgatgagcgccctcatgaccccgaagactccagaagagaaggcagtggccaaagtggtgaaggggcaggccaagacttcagaagccaaagatgagaaggagttacggacctcattctggaagtctgtgctggcggggcccttgcgcacacccctctgtgggggccacagggagccatgtgtgatgcgtactgtgaagaagccaggacccaacttgggccgccgcttctacatgtgtgccaggccccggggtcctcccactgacccctcctcccggtgcaacttcttcctctggagcaggcccagctgaaccaatggaggcctggggacatctggcatggtcacccctgcacatgatctgaggccagctccccttccctgagctgcctcctgcttctccctcaaagtctcctacccttctcttcctcttttaagccctctcttcctcgctttccttcctacctagctccttgttggtgagcttcttgtgccttaatcctgtgacccagccccttacaccactttccaccttcctgtccgaagtacacggacactagctgccccaggaagttgtgtgattttaaatcacttctgtctttgctggaaagtgtatttgtgcataaataaagtctgtgtatttgttaaaaaaaaaaaaaaaa

SEQ ID NO: 1910 - DNA, 345 bp, Homo Sapiens
agcttcctgacatgttaagagaatacattaaagagaaaatactgttttttaatcctaaaatttttcttccactaagataaaccaaatgtgcttacatatatgtaaacccatctatttaaacgcaaaggtgggttgatgtcagtttacatagcagaaagcattcactatcctctaagatttgtttctgcaaaactttcattgctttagaattttaaaatttcaccttgtacaatggccagcccctaaagcaggaaacatttataatggattatatggaaacatcctcccagtacttgcccagcccttgaatcatgtggcttttcagtgaaaggaaagattcttttt

SEQ ID NO: 1911 - DNA, 4998 bp, Homo Sapiens
  misc_feature (4581)..(4581): n is a, c, g, or t
  misc_feature (4874)..(4874): n is a, c, g, or t
  misc_feature (4913)..(4914): n is a, c, g, or t
atgaggacacttgggacttgcctggcgactttggccggacttttgctaactgcggcgggcgagacgttctcaggtggctgcctctttgatgagccgtatagcacatgtggatatagtcaatctgaaggtgatgacttcaattgggagcaagtgaacaccttgactaaaccgacttctgatccatggatgccatcaggttctctcatgctggtgaatgcctctgggagacctgaggggcagagagcccacctgctcttaccccaacttaaggaaaatgacacccactgcatcgattttcactattttgtgtccagcaagagtaattctcctccggggttactcaatgtctacgtgaaggtcaataacgggccactggggaatcctatctggaatatatctggagacccaacacgtacatggaacagggcagaactggccattagtactttctggcctaacttttatcaggtgatttttgaagtgataacttctggacatcaaggctatctcgctatcgatgaggtgaaggtgttaggacatccatgtaccaggactcctcacttcctgcggattcagaatgtggaagttaatgctggccagtttgctaccttccagtgcagtgccatcggcaggaccgtggcaggagacaggctctggttacagggcattgatgtgcgagatgctcctctgaaggaaatcaaggtgaccagctcccgacgcttcattgcttcatttaatgttgtgaataccaccaaacgagatgctggaaagtaccgctgcatgattcgcactgaaggaggtgttggaatatcaaactatgcagagttggtagttaaagaaccacccgttcctattgccccacctcagctcgcctctgtaggagccacctacctgtggatacagctcaacgccaactccatcaatggggatgggcccattgtggcccgagaggtggagtactgcacggccagtgggagctggaatgaccggcagccagtcgattccacgagctataaaattggacaccttgacccagatacagaatatgagattagtgtgctcctgaccaggccaggggagggtggcactggctctcctggtccagctctcaggacaagaacaaagtgtgctgatcccatgcgaggcccaagaaaactagaagtagtggaggtcaaatctcggcaaatcactatccgctgggagccatttggatataatgtaactcgttgccacagttataatctcactgtccactactgttaccaagttggaggacaagaacaagtgcgagaagaagtaagctgggatacagaaaattcacaccctcaacacacgatcactaacctgtcaccatacaccaatgtcagtgtgaaactgatcctcatgaacccagagggccggaaggaaagccaagaactcatagtgcagacagatgaagacctcccaggtgctgttcccactgaatccatacaaggaagtacctttgaagagaagatatttcttcagtggagagaaccaactcaaacatatggtgtaatcactttatatgagatcacctacaaagcagtcagttcctttgacccagaaatagatttatccaatcagagtggaagagtttcaaagctgggaaatgaaacccattttctgttttttggactgtatccggggaccacatactcctttaccatccgagctagcacagctaagggttttgggcctccagcaacaaaccagttcaccaccaaaatatcagcaccctctatgccagcttatgaacttgagacacctttgaatcaaactgacaataccgtgacagtcatgctgaaacctgcccacagcagaggagcacctgtcagtgtctatcaaatagttgttgaggaagaacgtcctcgaagaactaaaaagacgacagaaatcttaaagtgctacccagtgccaattcacttccagaatgcttctctgctgaactcacagtactactttgctgcagaatttcctgcagacagcctccaagctgcgcagccttttacaattggtgataataagacatataatggatactggaacactccccttctcccctataaaagctacagaatttatttccaagctgctagtagagccaatggggaaaccaaaatagactgtgtccaagtggccacaaaaggagctgccactccgaaaccagtcccagaacccgagaaacagacagaccatacagttaaaattgctggagtcatcgcgggcatcttgctgttcgtgattatatttcttggagttgtgttggtaatgaagaaaaggaaactggccaagaagcggaaagagaccatgagcagcacccgacaggagatgactgtgatggtgaactcaatggacaagagctatgctgagcagggcacaaactgcgacgaggctttctcattcatggacacgcacaatctgaatgggagatctgtgtcttcaccatcgtccttcacaatgaaaacaaatacactgagcacatcggtgcctaattcctattacccagatgaaacccacacaatggccagcgataccagcagcctggtgcagtcccatacttacaagaagcgagagccggccgacgtgccctatcagactgggcagctccaccccgccatccgggtggcagacctccttcagcacatcacacagatgaagtgtgcggagggctacggcttcaaggaggaatacgagagcttctttgaagggcagtctgcaccatgggactcggctaagaaagatgagaacagaatgaagaacagatacgggaatatcattgcatacgatcattcccgagtgaggctgcagacaatagaaggagacacaaactcagactatatcaatggcaattatatcgatggttatcatcgacccaatcattacattgctacccaagggccaatgcaggaaaccatctatgacttctggaggatggtgtggcacgaaaacactgcaagtatcatcatggtgaccaatcttgtggaagtgggaagggtcaaatgctgcaaatactggccagatgacacagagatatataaagacattaaagttaccctaatagaaacagaactactggcagaatatgtgataagaacatttgctgttgaaaagagaggtgtgcatgaaatccgagagatcagacagtttcacttcactggctggccggatcatggggtcccctaccatgccaccggcctgctgggattcgtgcggcaagtcaagtccaagagcccgcccagtgcaggcccactggtggtgcactgcagtgctggtgcagggaggactggctgtttcatcgtcattgatatcatgttggacatggccgaaagggaaggggtcgtagacatctacaactgcgtcagggagctgcggtcacggagggtgaacatggtgcaaacagaggagcagtatgtgtttatccacgatgcgatcctggaagcctgtctttgtggggacacctctgtgcctgcttcccaagttaggtctctgtattatgacatgaacaaactggatccacagacaaactcaagccagattaaagaggaattccggacgctaaacatggtgacaccaacgctgcgagtagaggactgcagcatcgcactgttgccccggaaccatgagaaaaaccggtgcatggacatcctgcccccagaccgctgcctgcccttcctcatcaccatcgatggggagagcagcaactacatcaatgctgccctcatggacagctataaacagccttcagcttttatagtcacccagcatcctttgccaaacacagtgaaagacttttggagactggtcctggattatcactgcacatccgtagttatgctaaatgatgtggatcctgcccagttgtgtccacagtactggccagaaaacggagtacacagacacggccccatccaggtggaatttgtctctgctgacctggaagaggacatcatcagcaggatattccgcatttacaatgccgccagaccccaagatggatatcggatggtgcagcaattccagttcctgggctggccgatgtacagggacacaccagtgtctaagcgctccttcttgaagctcattcgccaggtggacaagtggcaagaggaatacaatggcggggaaggcccgaccgttgtgcactgcttgaacgggggaggccgcagtgggacgttctgcgccatcagcatcgtatgtgagatgctccggcaccagagaaccgtggatgtctttcacgctgtgaagacactgaggaacaacaagcccaacatggtcgacctcctggatcagtacaagttctgctacgaggtggccctggaatacttgaattctggctgatggtgtaaacagctctgcaaacaatccctttcataccacaaagccaagacgttccatggtatttgtgcaaaagagatgaagacttctcaatatgcttattttgctttgactaattggctctttttaagagccaagaaagtgtttctaaaattgcttgcactgcccaatcccagtaatgctgctgcctgacagaaacacacacacagccacagttgccaaatncccgtactccttgccacggttctagagcagcgtagacagctggtaaactgaagagcacaactatattcttatgaaggaatttgtacctttggggtattattttgtggcccgtgaccctcgttattgttacagctgagtgtatgtttttgttctgtggagaatgctatctggcattatggtaatatattattttaggtaatatttgtactttaacatgttgcataatatatgcttatgtagctttccaggactaacagataaatgtgtaataacaaagatatgttgtatgagtngtcgtttctgtcagatttgtattgtttccaagggaaaannttgggggaggactcagttcacaaaatgcaaaactcaacgatcagattcacggacccagagcttttccatgtgtttatattgtaa

SEQ ID NO: 1912 - DNA, 576 bp, Homo Sapiens
gatgacgacatggtcgtaaatccgccatcttcctgcggcgcgttgcgacatggagggcgcgatggcagtgcgggtgacggcttctcatacggcagaagcccaggccgaagccgggcgggaagcgggcgagggtgcagttgcggcggtggcggcggccttggcccccagcggcttcctcggcctcccggcgcccttcagcgaggaagatgaggacgatgtgcacagatgcggccgctgccaggcagagttcaccgccttggaggattttgttcagcacaagattcagaaggcctgccagcgggcccctccggaggccctgcctgccacccctgccaccacagcattgctgggccaggaggtggtgccggcagcaccaggcccagaggagcccatcactgtggcccacatcgtggtggaggcggcctctctggcagcagacatcagccacgcatctgaccttgttggtggtgggcacatcaaagaggtcatcgtggctgctgaggcggagctgggagacggtgagatggccgaggccccgggcagccctcaccagcaggggctggggctcgcagggga

SEQ ID NO: 1913 - DNA, 459 bp, Homo Sapiens
gagagagagagagagagagagagagagagagagagagagagagagagagagagagagagactctttgtctggagctttgaggagatgttttccttcactttagtttcaaacccaagtgagtgtgtgcacttctgcttctttagggatgccctgtacatcccacaccccaccctcccttcccttcatacccctcctcaacgttcttttactttatactttaactacctgagagttatcagagctggggttgtggaatgatcgatcatctatagcaaataggctatgttgagtacgtaggcttgtggaaagatgaaaatggtttggaggtgtaaaacaatgtccttcgctgaggccaaagtttccatgtaagcgggatccgttttttggaaattggttgaagtcactttgatttctttaaaaaacatcttttcaatgaaatgtgttaccatttcatattca

SEQ ID NO: 1914 - DNA, 406 bp, Homo Sapiens
  misc_feature (218)..(218): n is a, c, g, or t
  misc_feature (323)..(323): n is a, c, g, or t
  misc_feature (338)..(338): n is a, c, g, or t
  misc_feature (382)..(382): n is a, c, g, or t
tttttttttttttttttttttttgtgtgtggtttttctttttttaatgtctgctgttaataaaatatttttacagagaccaaaaagtcagaatagtgcaaaacatctcaacaccatgcattcatgaccacttctcgtttgtgttaaacatttgttccaagtcacatatttacagagaaatgaaggcgtctgtgcagacactggaccgacggggtagantcaaaacaaaacaaaaaacaaacaacgttttgatttcacatctgcaatcacatgctaagagttgtgtgggaggggaagcctccccgggactgcttggccggtttntgggggtctgagggngcacgagacaggggtgggacaggggtcaagtcccccgggctgtntggttggggatgatcaggggaccc

SEQ ID NO: 1915 - DNA, 457 bp, Homo Sapiens
  misc_feature (404)..(404): n is a, c, g, or t
tttttttttttttattttcattttaaaaaaaggaaaaagttttattacgaaactagtttgtataaaacagggttatacatatttttgtaagtttgtaataaaacagtaagaaaaaaaaggcagtaatagaaatctccaaaaggcaacctatcaaaaccaactggctgccactttgagtttggacagtagctgcataaactttgttcttcttgaacagtatttaataacatcattaatacattaacaacatttctataaagtaagacacattggtgctgaagtacaactggtggcctcttgatctcacctatgaggagagttctttacaaaaccacatagggaaaattgcagttgtaaggtgaactacacatctaaaatatgcagaggtaatagcattacatgtntaagtatcaagatatacacattttaaaccatttgtacaaaacttctataaatt

SEQ ID NO: 1916 - DNA, 6735 bp, Homo Sapiens
gcctgcagagagaggcactttgcaccacagacagatagcaagaagggaaagacagagagtgagaaaaaagaggagtcagtcgctcctggggaagggagagagtgagactgggagaaagagaagcacagaaagtgtgtgtaaaacggagtaaagaaagaaaaaaaaaaaactacccttaaagcacatttaaaaaaaaaaaactctggcaattcaagaaagaaacaggctacgtttaaagagcatagagacaatgaaaggctaaagaaaattttaaaatctctgccacagtctcataggtgcttggaaatgaaagtagaactgcctgtctttaacggactctgacagaggtaactggattagggacgagtacgccagctttttttttttttttttttttttttttaacatcttaaatcctgaaaaaaaaaaaaaaaaaaaaaaaaaggcagcagctccgaattgaatgaattgatgggcacactccaactgctgggctggagagactggacttagtcttgccatttctgcttctttgaaagaggagacaacttgggcttccttttaatttagttttttttccccttctcccccaacccccaaccttcccccttacctcccccaccccctttatcaccaccccccttttaaataagagggtgaaggggaaccagagcgcacaagggaactgactcaggaggcagagaagatgggcatcctcagcgtagacttgctgatcacactgcaaattctgccagtttttttctccaactgcctcttcctggctctctatgactcggtcattctgctcaagcacgtggtgctgctgttgagccgctccaagtccactcgcggagagtggcggcgcatgctgacctcagagggactgcgctgcgtctggaagagcttcctcctcgatgcctacaaacaggtgaaattgggtgaggatgcccccaattccagtgtggtgcatgtctccagtacagaaggaggtgacaacagtggcaatggtacccaggagaagatagctgagggagccacatgccaccttcttgactttgccagccctgagcgcccactagtggtcaactttggctcagccacttgacctcctttcacgagccagctgccagccttccgcaaactggtggaagagttctcctcagtggctgacttcctgctggtctacattgatgaggctcatccatcagatggctgggcgataccgggggactcctctttgtcttttgaggtgaagaagcaccagaaccaggaagatcgatgtgcagcagcccagcagcttctggagcgtttctccttgccgccccagtgccgagttgtggctgaccgcatggacaataacgccaacatagcttacggggtagcctttgaacgtgtgtgcattgtgcagagacagaaaattgcttatctgggaggaaagggccccttctcctacaaccttcaagaagtccggcattggctggagaagaatttcagcaagagatgaaagaaaactagattagctggttaaaggtatgattataagagagcttattgttttaaaaagttatataaaggcaaggaaattaagaactgaatccatatttcaacagagccctattggcttactgaaagacaggagtttatctatcggaagaacatgaatctctaacagctccatacttctttcactactcaaatggcattgggctgagtaagtaaccatatcacctctcttcttagtaaaaagccctatgtgaaaagatcccaagatggagaggaagaaacgctaattcagcatgtgttcattctgcattgagaaggaactgatacatctgatgcatgctttgagaccagaagaaaagacttacctgaataattactacattagggaagctactgtctacgttaagataaagggtattgccttggctctatttggcatggatggagcccagttggaaaattcccaaatattacaacaagtccttgaacccaggccatgtggttagacgttggtgttaaggttagaccttatgttagagtcatttctgatgttccagcttctagccatgtagtgctctcagtcttcataccccagaaattattggtatatttgtagataccgagaatgatccctcagtctgagaggttagaatgatcatctgtaatctgagggttaatttctaggcaggtggagagagtggtaaaaaagaaatgaaattgacaagctaggaaagaggaggcagaaagatttggaaaattcacagagtttcacccttaagctgtagagagtgggtcacatttgttagccacggaaacatagaaacatacacaaggccagaaaaagaagaaggagctcaactaaaagtggcatagagaatacacatataaaaacaatatatttgtcatatgctcctagagaggagaaaggggtgattgaaagaaaaaaaaatacttaaatatttgtaattgtgaggggtttcttttggaaataattacttttgaaccatgtatgtggtatgtatattttcagtgggttaattataccccatgatacctattaaaggaaaaccagtgggtctggtggtgctggtcttttcctccccattcctacaatttctatgtggcccaagtcattcctaatcttggtctctatagcagtgttctctctgaatgctgagctgaagaaattatacgtacatacacacatacatacatacatacaaatatatgtatatatattctcagctgctgcgggaggtaggtaccatggccattcagcacagccttgatttcctcccaaagtaggtgagctatagtgaagaataggtgcaaacaaacaagcttacttccattgcaaaatagaagaagaggaagttagagataattctgatcaatcattttggaggctttgttataaggcaacccccggtatatcatggaatttccattgacatttgaatttggacttggatcttcccttggtcccattagctgaggtttagtaatctaaagtccctatagtatatgattataatgctattttaaaaaatatatatataaaatatttttttctttttaaaatagacactatagttttacccataagtaatatttaaagattatagctcccaaaagaatggaccaaccactttcgtatcataatttctttttggtaaatatgagactattatgaaatcatagtatatgattgtatttaaaggtacaatcaaaggatcttttgtccattccattaataactgaataaaaaataaataaaatggatagaaaaaaactaaagttgaaaatacattcttaaactagttgtctgaaatgagaaaagagtgagaactaggtgtgcaagaaccaaacgtattttattttattttttaaatgggagcaacatatcagtcgtgtcaccagctggtatattgtgtaaatattaaagctccattgggactgatttttcatggcaacatcagctttctaatgttctaaattctataaaaaccacccacaaagaaacaaagcaaatttcattatctaatgagttgctggaaaatcatattgagaataattatttcagattcctcagttgttaacttctacattcaagggcttatctctgcccccattgatttttaacctcaaaatggtgtgagatttactgtggaaccctaaagcagtaaaataaaaaacctggttgcagcacattcacactgttgtccttaaaattccccttttttctctatgtacgataaagtaacagtatgtcagataagccggtggggggatgagattaggctgaggcagtgctagtcaactgggggaaaaggatgatggaaaaatcacccagttgtgctatatttttaaagaaggaggtcgtttatgtgtgcagacaattctccctgaggttagcccaatggagaaatgaagcagaggaaggaaacatagaaagacatgggctatcagggaggaagatgttcaatagaacatgcaagaatttctggaagaaaggctgtggaagggccaatggagaaaatgaatggacaaagctcaggaatccctacgctatgtagaatgttcttggtgttatcagggttaagccctgtaattatgtaacctatttatcgcaacatgaatttttatgatttcttgtgatgtattcttttatgaaattaacaagaactcattattttgaggtagaggaaaatcaatgctttatctgatatgctgagaaattattagattgccaatactcatgtgcgtttcatgtgttttataaggtttgttcctttgaagaattgtagttcttagtcccacagggaaatgtgtatctatttatatatcatagtataaatctatgatatatttatatcatatataaaagtctgagttctctttcttagtccctaatcatgtttctcccataggctgtgtttacatggagctatcggtttagccttttaagcttcattagcttgtctattattgaaatagtttccaagaaattttagatattatcataacatctgggtctactcaaacacttattgtttgaaagacttatgtcttggacctatcaaaaactgactttatttattgcttagtgaaaatactagtgggatcaacaatgattttcttgaatgggcatgaatggagatgcccgcacagtaatgtagaaatgtttcatacagctattaaaatgtaactgacctccttagaggcagattagtaactgttcctactttgtatagctaagtgacagtcacttaacttacatgactttcttttttcacattgggtctctggtcctgtgtcttcacctcatttatagcacgtctccttgatttttggtagtatcaacttcccagtgatctgttcagttaagttcttctcccgttaaccaggaagtgcttattctctcatcacagtgggaagaatagcctattgtctttcattttgcctgagtgtattttactatttgggctctgaaataaaaattatgaaatatggtgaggtcacatgttggtgctgccttgctgcataaaattctaggagggcaggttaggagacagttatgtatggcctttcgggaaaattcaaagggtgggattacaagggtgttcctcaggcatgcccctatgggccctatgtggaagcaagaagaattgactgatttacaggacttctctttatgtcaatcttaagaggatggatgaatctggacatttgttccacccgacctctgactgatggtttggaaaataactttaattaggatcatatgaccattgaaaaaggaaaaatgtagactctgacttccgtcccactgaaggattaatgaaaacctttactagcatttagagcttttcagaacatccccactgtcatgtgtctcagcagtggagactgcaagtaaggcttttaattttaggaggtttttttttttttttttttttcccctaaatggtatggccaaaagtcagagttaaaatatatatagttagattccaacttcctccttcactctaaaaatagaatccaaacccactcttcatatatgcttccagaatggggcttaagtaccaatctctgctttgcaatgggcacaatcttggtcatgtcctgaggctctctaagaaaagagaggatctaggatgggagagctagaaagttgctaactgggaagaacaaggccctgaggggttggtctaccaatctgggaagatttgaaaacaaacttctcgcaactgaaggaaggctgaaggctgctgcaagtcattgagtgactttaggatgagcaaaacattgggccacttcctaatgccctatgtgtatagtaccagaagcaaggtctcagacttaacagacccagctctgttccaaggtgagtctgaaccaatagaaagcaaacatgtgcagatatccaaacaagactgctcatgcaagtcggggctggctacccgtcttaggcagcaacagcagagctccagggagcttattcaatatttactgagacttcgaagacccagcagatgtttaatgaagtcactattttggctcaaaccctccacttctccccctcccctcaaaaagccaacaggtaaacacataaatgaaagaaacccacagaaggggatgggaaataaagaaaattctctcaagacttctccaggcccatgtcactggtcagcgtggtttttatgtgtattaggattgggggatgtgaagaaataagtatccagtactttataaccaaagcaattaaatgatattggggtagggaatgttggccagttttgtttagttttgccatcacattgtcacccagacctcacctagccccaagtaatcgggcgccccgaagagggagacagagatgtgccagagttgacccagtgtgcggatgataactactgacgaaagagtcatcgacctcagttagtggttggatgtagtcacattagtttgcctctccccatctttgtctccctggcaaggagaatatgcgggacatgatgctaagagccctgggtaaatgtggtgagaatgcacgcgtgcatatgctacacatatgtgcttctcagttgcagaaaatgaactgctttgggagattatcagtagaaagagtgttatcatattggtgctgagtgctatgtgtgcttatacaatttgttcttgtattttaataaactttgaataaaagaataaaaaaaaaaaaaaaaaaaaaaa

SEQ ID NO: 1917 - DNA, 4240 bp, Homo Sapiens
cagcagagctggattggggtgttgagtccaggctgagtagggggcagcccactgctcttggtccctgtgcctgctgggggtgccctgccctgaactccaggcagcggggacagggcgaggtgccaccttagtctggctggggaggcggacgatgaggagtgatggggcaggcatgcggccactccatcctctgcaggagccagcagtacccggcagcgcgaccggctgagccgcggggccagcaggtcttcctcaagccggacgagccgccgccgccgccgcagccatgcgccgacagcctgcaggacgccttgctgagtctgggctctgtcatcgacatttcaggcctgcaacgtgctgtcaaggaggccctgtcagctgtgctcccccgagtggaaactgtctacacctacctactggatggtgagtcccagctggtgtgtgaggaccccccacatgagctgccccaggaggggaaagtccgggaggctatcatctcccagaagcggctgggctgcaatgggctgggcttctcagacctgccagggaagcccttggccaggctggtggctccactggctcctgatacccaagtgctggtcatgccgctagcggacaaggaggctggggccgtggcagctgtcatcttggtgcactgtggccagctgagtgataatgaggaatggagcctgcaggcggtggagaagcataccctggtcgccctgcggagggtgcaggtcctgcagcagcgcgggcccagggaggctccccgagccgtccagaaccccccggaggggacggcggaagaccagaagggcggggcggcgtacaccgaccgcgaccgcaagatcctccaactgtgcggggaactctacgacctggatgcctcttccctgcagctcaaagtgctccaatacctgcagcaggagacccgggcatcccgctgctgcctcctgctggtgtcggaggacaatctccagctttcttgcaaggtcatcggagacaaagtgctcggggaagaggtcagctttcccttgacaggatgcctgggccaggtggtggaagacaagaagtccatccagctgaaggacctcacctccgaggatgtacaacagctgcagagcatgttgggctgtgagctgcaggccatgctctgtgtccctgtcatcagccgggccactgaccaggtggtggccttggcctgcgccttcaacaagctagaaggagacttgttcaccgacgaggacgagcatgtgatccagcactgcttccactacaccagcaccgtgctcaccagcaccctggccttccagaaggaacagaaactcaagtgtgagtgccaggctcttctccaagtggcaaagaacctcttcacccacctggatgacgtctctgtcctgctccaggagatcatcacggaggccagaaacctcagcaacgcagagatctgctctgtgttcctgctggatcagaatgagctggtggccaaggtgttcgacgggggcgtggtggatgatgagagctatgagatccgcatcccggccgatcagggcatcgcgggacacgtggcgaccacgggccagatcctgaacatccctgacgcatatgcccatccgcttttctaccgcggcgtggacgacagcaccggcttccgcacgcgcaacatcctctgcttccccatcaagaacgagaaccaggaggtcatcggtgtggccgagctggtgaacaagatcaatgggccatggttcagcaagttcgacgaggacctggcgacggccttctccatctactgcggcatcagcatcgcccattctctcctatacaaaaaagtgaatgaggctcagtatcgcagccacctggccaatgagatgatgatgtaccacatgaaggtctccgacgatgagtataccaaacttctccatgatgggatccagcctgtggctgccattgactccaattttgcaagtttcacctatacccctcgttccctgcccgaggatgacacgtccatggccatcctgagcatgctgcaggacatgaatttcatcaacaactacaaaattgactgcccgaccctggcccggttctgtttgatggtgaagaagggctaccgggatcccccctaccacaactggatgcacgccttttctgtctcccacttctgctacctgctctacaagaacctggagctcaccaactacctcgaggacatcgagatctttgccttgtttatttcctgcatgtgtcatgacctggaccacagaggcacaaacaactctttccaggtggcctcgaaatctgtgctggctgcgctctacagctctgagggctccgtcatggagaggcaccactttgctcaggccatcgccatcctcaacacccacggctgcaacatctttgatcatttctcccggaaggactatcagcgcatgctggatctgatgcgggacatcatcttggccacagacctggcccaccatctccgcatcttcaaggacctccagaagatggctgaggtgggctacgaccgaaacaacaagcagcaccacagacttctcctctgcctcctcatgacctcctgtgacctctctgaccagaccaagggctggaagactacgagaaagatcgcggagctgatctacaaagaattcttctcccagggagacctggagaaggccatgggcaacaggccgatggagatgatggaccgggagaaggcctatatccctgagctgcaaatcagcttcatggagcacattgcaatgcccatctacaagctgttgcaggacctgttccccaaagcggcagagctgtacgagcgcgtggcctccaaccgtgagcactggaccaaggtgtcccacaagttcaccatccgcggcctcccaagtaacaactcgctggacttcctggatgaggagtacgaggtgcctgatctggatggcactagggcccccatcaatggctgctgcagccttgatgctgagtgatcccctccaggacacttccctgcccaggccacctcccacagccctccactggtctggccagatgcactgggaacagagccacgggtcctgggtcctagaccaggacttcctgtgtgaccctggacaagtactaccttcctgggcctcagctttctcgtctgtataatggaagcaagacttccaacctcacggagactttgtaatttgcttctctgagagcacaggggtgaccaatgagcagtgggccctactctgcacctctgaccacaccttggcaagtctttcccaagccattctttgtctgagcagcttgatggtttctccttgccccatttctgccccaccagatctttgctcctttccctttgaggactcccaccctttgggtctccaggatcctcatggaaggggaaggtgagacatctgagtgagcagagtgtggcatcttggaaacagtccttagttctgtgggaggactagaaacagccgcggcgaaggccccctgaggaccactactatactgatggtgggattgggacctgggggatacaggggccccaggaagaagctggccagaggggcagctcagtgctctgcagagaggggccctggggagaagcaggatgggattgatgggcaggagggatccccgcactgggagacaggcccaggtatgaatgagccagccatgcttcctcctgcctgtgtgacgctgggcgagtctcttcccctgtctgggccaaacagggagcgggtaagacaatccatgctctaagatccattttagatcaatgtctaaaatagctctatggctctgcggagtcccagcagaggctatggaatgtttctgcaaccctaaggcacagagagccaaccctgagtgtctcagaggccccctgagtgttccccttggcctgagccccttacccattcctgcagccagtgagagacctggcctcagcctggcagcgctctcttcaaggccatatccacctgtgccctggggcttgggagaccccataggccgggactcttgggtcagcccgccactggcttctctctttttctccgtttcattctgtgtgcgttgtggggtgggggagggggtccacctgccttacctttctgagttgcctttagagagatgcgtttttctaggactctgtgcaactgtcgtatatggtcccgtgggctgaccgctttgtacatgagaataaatctatttctttctaccaaaaaaaaaaaaaaaaaaa

SEQ ID NO: 1918 - DNA, 3273 bp, Homo Sapiens
gaattcggcacgagcgagtcgcgacgtcgtcggcaagcggccgccttccacgtaacgcgcgccggcgggggagggcgttggcgcggagccgacgggaacgtccgcgctgcggagcagggcagggaagccgggaggcgggcccggcccgagcttgtccttgtcgcgcaggtactccgagcactatgtcgtccccggcgtcgaccccgagccgccgcggcagccggcgtggaagggccacccccgcccagacgcctcggagtgaggatgccaggtcatctccctctcagagacgtagaggcgaggattccacctccacgggggagttgcagccgatgccaacctcgcctggagtggacctgcagagcactgctgcgcaggacgtgctgttttccagccctccccaaatgcattcttcagctatccctcttgactttgatgttagttcaccactgacatacggcactcccagctctcgggtagagggaaccccaagaagtggtgttaggggcacacctgtgagacagaggcctgacctgggctctgcacagaagggcctgcaagtggatctgcagtctgacggggcagcagcagaagatatagtggcaagtgagcagtctctaggccaaaaacttgtgatctggggaacagatgtaaatgtggcagcatgcaaagaaaactttcagagatttcttcagcgttttattgaccctctggctaaagaagaagaaaatgttggcatagatattactgaacctctatacatgcaacgacttggggagattaatgttattggtgagcaatttttaaatgtgaactgtgaacacatcaaatcatttgacaaaaatttgtacagacaactcatctcttacccacaggaagttattccaacttttgacatggctgtcaatgaaatcttctttgaccgttaccctgactcaatcttagaacatcagattcaagtaagaccattcaacgcattgaagactaagaatatgagaaacctgaatccagaagacattgaccagctcatcaccatcagcggcatggtgatcaggacatcccagctgattcccgagatgcaggaggccttcttccagtgccaagtgtgtgcccacacgacccgggtggagatggaccgcggccgcattgcagagcccagtgtgtgcgggcgctgccacaccacccacagcatggcactcatccacaaccgctccctcttctctgacaagcagatgatcaagcttcaggagtctccggaagacatgcctgcagggcagacaccacacacagttatcctgtttgctcacaatgatctcgttgacaaggtccagcctggggacagagtgaatgttacaggcatctatcgagctgtgcctattcgagtcaatccaagagtgagtaatgtgaagtctgtctacaaaacccacattgatgtcattcattatcggaaaacggatgcaaaacgtctgcatggccttgatgaagaagcagaacagaaacttttttcagagaaacgtgtggaattgcttaaggaactttccaggaaaccagacatttatgagaggcttgcttcagccttggctccaagcatttatgaacatgaagatataaagaagggaattttgcttcagctctttggcgggacaaggaaggattttagtcacactggaaggggcaaatttcgggctgagatcaacatcttgctgtgtggcgaccctggtaccagcaagtcccagctgctgcagtacgtgtacaacctcgtccccaggggccagtacacgtctgggaagggctccagtgcagttggcctcactgcgtacgtaatgaaagaccctgagacaaggcagctggtcctgcagacaggtgctcttgtcctgagtgacaacggcatctgctgtatcgatgagttcgacaagatgaatgaaagtacaagatcggtattgcatgaagtcatggaacagcagactctgtccattgcaaaggctgggatcatctgtcagctcaatgcgcgcacctctgtcctggcagcagcaaatcccattgagtctcagtggaatcctaaaaaaacaaccattgaaaacatccagctgcctcatactttattatcaaggtttgatttgatcttcctcatgctggaccctcaggacgaagcctatgacaggcgtctggctcaccacctggtcgcactgtactaccagagcgaggagcaggcagaggaggagctcctggacatggcggtgctaaaggactacattgcctacgcgcacagcaccatcatgccgcggctaagtgaggaagccagccaggctctcatcgaggcttatgtagacatgaggaagattggcagtagccggggaatggtttctgcataccctcgacagctagagtcattaatccgcttagcagaagcccatgctaaagtaagattgtctaacaaagttgaagccattgatgtggaagaggccaaacgcctccatcgggaagctctgaagcagtctgcaactgatccccggactggcatcgtggacatatctattcttactacggggatgagtgccacctctcgtaaacggaaagaagaattagctgaagcattgaaaaagcttattttatctaagggcaaaacaccagctctaaaataccagcaactttttgaagatattcggggacaatctgacatagcaattactaaagatatgtttgaagaagcactgcgtgccctggcagatgatgatttcctgacagtgactgggaagaccgtgcgcttgctctgaagccttgtgagcaaggaaggctccctgcatgtcatgcaattctgcacgccacatgggtgtggtcatgcaatcatcagttggccgccatcagtgtaaatagagcttaaagtcatggtttggctgcataaaaaattttctaacttgggttcaatatttgtagtgaagtatctgttttcatttttttcacgttataaataaaaatactatgctggccgggcgcggtggctcacacctgtaatcccagcactttgggaggccaatgtgggtggatcatgaggtcaggagttcaagaccagcctagccaagatggtgaaaccccgtctctagtaaagataacaaaaaattagctgggcttgatggcatgcgcctgtaatcccagctactcgggaggttgaggcaggagatcgcttaaacccaggcggcagaggttgcagtgagccaagatcgcgccactgcactccagcctcagcaatagagtgagactgtctcaaaaaaaaaa

SEQ ID NO: 1919 - DNA, 289 bp, Homo Sapiens
  misc_feature (233)..(233): n is a, c, g, or t
tttttttttttttttttttttttttgctgatatatatatttattgacataaaagctcacaacatatattgtttggtgaaaaaatacagatagaacagcacttatatttcatcacttttatctatgcatatatctatctgggtacataggtatagggaaatatcactcatcaaagggttgacaatgattatataagggtggagagatttgggtaatttggacttcactttttgnaccttttttattgttcaaatatttaacaataaattataccactttcacaaagaata

SEQ ID NO: 1920 - DNA, 480 bp, Homo Sapiens
tttttttttttttttttggttaagaggttgtgaacatacatatttatttataatacaaaatgaagattggagggaaaagtgctttaaaaaatagcatgtaagtgtataaatgaaattgttgcttcttctccgatacaattttgattgggtgagcattatttgcttttacaataatgctttattttgttttttgcattgcattgcactaacctgtccattaatacaaacagaaaaagaaggtggaggacgtgcccagccgcgtggtcagcgtgccgaacctcgcctcctatgcaaagaactttctgagtggcgatctgagttccaggattaatgcccctccaataactacatcacccagcttggacccaagccccagctgtggccggacctacaaacccaaccagtctacagatgcaaaaactgccacaaggtttgggggatgttggggacaggggcccttattctatttccctgtagata

SEQ ID NO: 1921 - DNA, 488 bp, Homo Sapiens
caggattatgtttacaattgatccaggtgtttgtttctaacttctgtaatacatacaatgcaaaaaaaaaaaaaaaaatggccacaacagttgcacagtgcccaccctatggcctagcttcaggtacttcagttgaagtctaaactcaggtaacttggaatgtatatcatattgggatattaaatatttcacagctaaaaagctaaagagggaacatcactcttttgcctttccttattttatgcatttccctttcctcattacattccacattcttagaataagaagtgcattcaatcctaggagaatgataatcctggacatgggtgaacatgaggagaaccagcaaaatctgtggtgtttgacatcactttgtcatgtggttacaagtaaaacaactgttgcattcactgtttcaacatgtgtacatgtggcttttttaaaagttcaggtgttgctcagtaaaggactgtgacaatgttgcaaat

SEQ ID NO: 1922 - DNA, 444 bp, Homo Sapiens
gcattgtgggcactgtagtttccgccgcgtttatggccgcgttaagtctgagtgccgctttgagttgttgaatgaagtgaacttcatttgtcagcgttcggttcatgaactggaatgtaagaggcaccagaggattcctgctctgtcccctggtttgcggcttgcgacgttggacatccccggattgttgtttaatagaggaaactcacctgccttcttgcttttaagtagccccaaaagcagaaccttgatttgtctgtaaggaagaaacacaaaccttttaaaaagttccacttcgactctgcaccgccgacccccaatctctttaattttgccatagaagaggggttttttcaacatctctctcactatctggtgctgatctcactgcataatgactttctatttgtttggtattcgaagctttccgaagctttggaagag

SEQ ID NO: 1923 - DNA, 105 bp, Homo Sapiens
tttactgactctcccggcgcagtcaccggcgcggtctatggctgcgacttctctaatgtctgctttggctgcccggtcgctgcagccttcgcacagctgctccct

SEQ ID NO: 1924 - DNA, 769 bp, Homo Sapiens
cgcggagacatgaaacatcggctaaggagcgaaggccgggtggttagcagttccgctggctagtgtgtacgcgtagagcttctcccggcgccgccgctcggctcccatagcgcccgcgacagcggtccggacgccgccgaacatggactccgccggccaagatatcaacctgaattctcctaacaaaggtctgctgtctgactccatgacggatgttcctgtcgacacaggtgtggctgcccggactcctgctgttgagggtctgacagaggctgaggaggaggagctcagggctgagcttaccaaggtggaagaggaaattgtcactctgcgccaggtcctggcagccaaggagaggcactgtggagagctcaagaggaggctgggcctctccaccctgggggagctgaaacagaacctgtccaggagctggcatgacgtgcaggtctctagcgcctatgtgaaaacttctgagaaacttggagagtggaatgagaaagtgacccagtcagacctctacaagaagactcaggaaactctttcacaggcaggacagaagacttcagctgccctgtccacagtgggctctgccatcagcaggaagcttggagacatgaggaactctgcgaccttcaagtcgtttgaggaccgagttgggaccataagtctaaggttgtgggtgaccagagagaacggcagttggacaactcccttcctcagcggggagtggttgacaaagcccctgtcggatcccgaactttctaagcct

SEQ ID NO: 1925 - DNA, 379 bp, Homo Sapiens
  misc_feature (248)..(248): n is a, c, g, or t
  misc_feature (260)..(260): n is a, c, g, or t
acgcgtgggcggacgcgtggggccagctgcctgcgctgctcgccagcttgctcgcactcggctgtgcggcggggcaggcatgggagccgcgcgctctctcccggcgcccacacctgtctgagcggcgcagcgagccgcggcccgggcgggctgctcggcgcggaacagtgctcggcatggcagggattccagggctcctcttccttctcttctttctgctctgtgctgttgggccaagtgagcccttnacagtgcccccntggaaacccacttggcctgcataccgcctcccttgtcgtcttgcccccagtctacccttcaatttagccaagccagactttggagccgaagccaaattagaagtatcttctttcatgtg

SEQ ID NO: 1926 - DNA, 4157 bp, Homo Sapiens
ctccagcctcctggagaagatgacgtccagcgacaaggacttcaggttcatggccaccagcgacctgatgtcggagttgcagaaggactccatccagctggacgaggacagcgagcgcaaggtggtgaagatgctgctccggctcctggaggacaagaacggtgaggtgcagaacctggctgtcaagtggctgggtgtcccgctgggcgccttccacgccagcctcctgcactgtctgctgccacagctgagcagcccgcgcctggcggtgcgcaagcgggcggtcggagcgcttggccacctggcgaccgcctgcagcaccgacctcttcgtcgagctcgctgaccacctactggaccggctgcccggcccgcgggtgcccaccagcccgactgccatccgcaccctgatccaatgtttgggcagcgtcggccgccaggccggccaccgcctcggggctcacctggaccgcctggtgcccctggtggaggatttctgcaacctggatgatgatgagctccgggagtcctgcctccaggcttttgaggccttcttgaggaagtgccccaaggaaatgggtcctcacgtgcccaacgtgaccagcctctgcctccaatacataaaacacgaccccaactacaactacgacagtgatgaggatgaggagcagatggagacagaggatagtgaattcagtgagcaagagagtgaagacgagtacagcgatgacgatgacatgagctggaaggtgcgccgggcagctgccaagtgcatcgcagccttgatcagctcgcggcctgacctgctgcccgatttccactgcaccctggcacctgtgctcatccgccgcttcaaagaacgcgaggagaacgtcaaggctgacgtcttcactgcttacatcgtgctgctgcggcaaacacggcccccgaagggatggctggaggccatggaggaacccacccagaccggcagcaacctccatatgctacgtggacaggtgccccttgtggtcaaggccctgcagcggcagcttaaagatcggagcgtcagagcccgccagggatgcttcagcctcctcaccgagctggcgggtgtcctcccaggcagcctggccgagcatatgcctgtgctggtatcaggcatcatcttctcgctggccgaccgctccagctcctccaccatccggatggatgccctggccttcttgcaggggctgctgggcaccgaaccagctgaggccttccacccacacttgcctatcctcctgccacctgtgatggcctgtgtggctgactctttctacaagattgcagccgaggccctggtggtgctgcaggagctggtgcgggccctgtggccgctgcacaggcctcggatgctggatcctgagccatatgttggagagatgtctgctgtcaccctggcgcgacttcgtgccactgacctggaccaggaggtgaaggagcgggccatttcctgcatgggccaccttgtaggccacctgggtgaccggcttggggatgacctggagcccacgttactgctcctcctggaccgcctgcggaatgagatcacccggctgcccgccatcaaggcgcttacgctggtggccgtatccccactacagcttgacctacagcccatcctggccgaggcactgcacattctggcctcattcctgcggaagaaccagcgggctttgcgactggccacactggcagccctggacgccctggcccagagccagggcctcagcctcccaccgtctgccgtgcaggccgtgctggctgagctgcctgccctggtcaacgagagcgacatgcatgtggcccagctggctgtggacttccttgccacagtgacccaggcccagccagcctctttggtggaggtcagtggccctgtgctctcagagctgctgcggctgctgcgttcgcccctgttgccagccggagttctggcagctgctgaaggcttcctgcaggccctggtagggacccgtcccccgtgtgtggactatgccaaactcatcagcctgctcactgcgcctgtttatgagcaggctgtggatggtgggcctggcctgcacaagcaggtgttccactcattggcccggtgtgtggcagccctctcagctgcctgtccccaagaggcggcaagcacagccagtcgcctggtctgcgatgccaggtcgccccactccagcacgggggtcaaggtcctggcattcttgtcgctggctgaggtgggtcaggtggctgggccaggcccccagcgggagctgaaggcggtgctcctggaagctttggggtcacccagtgaggatgtgagggctgcagcctcgtatgcactgggccgtgtgggtgctggcagcctgcccgacttcctgcccttcctgctggagcagatcgaggctgagccccgacgacagtacctgctgctgcactcactcagggaggccctgggggccgcccagcctgacagcctgaagccctacgccgaggacatctgggccttgctgttccagcgctgcgagggtgctgaggagggcacccggggggtggtggccgagtgcattgggaagctggtccttgtgaacccttcgttccttctgccccgcttgcggaagcagcttgctgcaggtcggccacacacccggagcaccgtcatcacagcggtcaagttccttatctcggaccagccccatcccattgaccccctcctgaagagcttcatcgctgtgcacaacaagccctcgctagtccgggacctgctggatgacatcctgcccctcctctaccaggagacaaagatccggcgggacctcatccgagaggtggagatggggccctttaaacatacagtggacgatgggctggacgtgcggaaggcggcctttgaatgcatgtattcactgcttgagagctgcctgggccagctggatatctgtgagttcctgaaccatgtggaggacgggctgaaggaccactacgacatccggatgctgaccttcatcatggttgcccggctggccaccctgtgtcctgcacctgtcctgcagagggtggaccgactcattgagccactaagggccacctgcactgccaaggtcaaagctggttctgtgaagcaggagtttgaaaagcaagatgaactgaagcgctctgcaatgagggcagtggctgccctgctgaccatccccgaggtggggaaaagccccatcatggccgacttctcttcccaaatcagatccaaccctgaacttgctgccctctttgaaagcatccagaaggattccgcttcagcccccagcacagactcaatggagctcagctagtcccctcagcaccaaggtgggccctcgcttaagagaaaggagcccacccaagtccgaggcctccccatcccaccatcgcaggtctctacttttgcccttccaccatctcactgggggccctgtcgctcctggtcagggcttacagtgccttctccagggacccaactcaaaggcccccagcccaagctgtgaggctgccaacagttgggccccttccttaactcaggacagtcatccaaagaaatagggtgaggaagttttccagtgacttcacactgtacccctccatagtctgtctggttccttcagagggtgtctctgcctcacaaactagtagtatttagaaataggctgtgctgtcagctgtaaaagatcaggaggcagcagacaccactctggtttcttcactgcattcagcaatgcctgaagttagtgctcaggccgggcatctcaaaagaaaagatacttgagttattcacattttaaaattcaaaacggttcatttttaagtggcagtgatgaatcagaaatttggaagatgatacgggtttcttttttccagggaggaggaatgggttgggtagggaactggacaggcttggacctcatgtttcatttctaatttcaaaatacttattagcaaattgggcaacaatgggcatcttccatgccaccacccaggcataaccagttggtttgtttccttctgaggaaggtttcaaatgtgtctagtgttcagtattgaggacaaagaaatacaagtggcaggcccaagtattttctgtgatatcccaggttaataaagattagattctaagtt

SEQ ID NO: 1927 - DNA, 318 bp, Homo Sapiens
tgggtgcatgcgctcgcatcatggcggctgagtgggcttctcgtttctggctttgggctacgctgctgattcctgcggccgcggtctatgaagaccaagtgggcaagtttgattggagacagcaatatgttgggaaggtcaagtttgcctccttggaattttcccctggatccaagaagttggttgtagccacagagaagaatgtgattgcagcattaaattcccgaactggggagatcttgtggcgccatgttgacaagggcacggcagaaggggctgtggatgccatgctgctgcacggacaggatgtgatcactg

SEQ ID NO: 1928 - DNA, 707 bp, Homo Sapiens
tggcacgagggtgctgaattagcacacgcacgtgcagcgcgcacagacgcgcgcacacacacacacatacacgctctgctgcatttggacaaaccatgcctgccagagtgtagcagaggtgaggaagcaggtgggcagcttgcctgacccggcttttcaggagagcgtgtctccaacagagagtctccacactctagttcagggttatcgacctgcctcaatgagatgacagactcatttgggaggggtgttgcaaacaagttttcagtgagaatagttaagttccagagcttgtaaaggattcagtgactgacacttcagtaaattaggccaggcacattggcttatgcctgtaattccaacactttggaaggccgaggtgggcggatcatttgaggtctggagttcgagaccagcctgaccaacatggtgaaaccccgtctctactaaaaatacaaaaattagccaggtgtggtagtgcacatctgtaatcccagctacttgggaggtggaggcaggagaattgcttgaaccctggaggttgcaatgagctgagatcacactacttcactccagcctgggtgacagagcaagactcggtctcaaacaaacaaaaacttatggcgatgcaggttttcatgctcaaacgcttgcattcaggtatgctttcttttttgagagagacaaatgggtcacaactggcaccc

SEQ ID NO: 1929 - DNA, 474 bp, Homo Sapiens
tttttttttttttttttacatgtaggtatatatgtattagccagctgttgccatgtgacgaattacccccccgccaaaggttggcagcttaacacaacaaacatttatcatctcatccatgttctgagcattaggaactcaggagctgctgagccggctgttcccgtgatcagtgtttgaagtataagagtctaagattcaggattcaggtactgggatccagttgttctggtggagggatccacaaagcttggactatccagggaattcaactgatagaattgcagtgagatgttggccaggacagcaagatcctcttccaagctcagttacatggctattggctgagttccttaccacatggtcctctccataaggctgctcatggcatgaccaccggcttgtgcctgcatgcgggtccggaccaaggccagcgggtaactggctatctggccgcaggtgctggatatggta

SEQ ID NO: 1930 - DNA, 1745 bp, Homo Sapiens
ccgtcgcccggatcccctgagctgcccgccatcccacgtgaccgcgccgccccccagctccaccgctgagcccgctcgccatggccctcttcggggccctcttcctagcgctgctggcaggcgcacatgcagagttcccaggctgcaagatccgcgtcacctccaaggcgctggagctggtgaagcaggaggggctgcgctttctggagcaagagctggagactatcaccattccggacctgcggggcaaagaaggccacttctactacaacatctctgaggtgaaggtcacagagctgcaactgacatcttccgagctcgatttccagccacagcaggagctgatgcttcaaatcaccaatgcctccttggggctgcgcttccggagacagctgctctactggttcttctatgatgggggctacatcaacgcctcagctgagggtgtgtccatccgcactggtctggagctctcccgggatcccgctggacggatgaaagtgtccaatgtctcctgccaggcctctgtctccagaatgcacgcggccttcgggggaaccttcaagaaggtgtatgattttctctccacgttcatcacctcagggatgcgcttcctcctcaaccagcagatctgccctgtcctctaccacgcagggacggtcctgctcaactccctcctggacaccgtgcctgtgcgcagttctgtggacgagcttgttggcattgactattccctcatgaaggatcctgtggcttccaccagcaacctggacatggacttccggggggccttcttccccctgactgagaggaactggagcctccccaaccgggcagtggagccccagctgcaggaggaagagcggatggtgtatgtggccttctctgagttcttcttcgactctgccatggagagctacttccgggcgggggccctgcagctgttgctggtgggggacaaggtgccccacgacctggacatgctgctgagggccacctactttgggagcattgtcctgctgagcccagcagtgattgactccccattgaagctggagctgcgggtcctggccccaccgcgctgcaccatcaagccctctggcaccaccatctctgtcactgctagcgtcaccattgccctggtcccaccagaccagcctgaggtccagctgtccagcatgactatggacgcccgtctcagcgccaagatggctctccgggggaaggccctgcgcacgcagctggacctgcgcaggttccgaatctattccaaccattctgcactggagtcgctggctctgatcccattacaggcccctctgaagaccatgctgcagattggggtgatgcccatgctcaatgagcggacctggcgtggggtgcagatcccactacctgagggcatcaactttgtgcatgaggtggtgacgaaccatgcgggattcctcaccatcggggctgatctccactttgccaaagggctgcgagaggtgattgagaagaaccggcctgctgatgtcagggcgtccactgcccccacaccgtccacagcagctgtctgagccctcaatccccaagctggcagctgtcattcaggaccccaacccctctcagcccctcttttcccacattcatagcctgtagtgccccctctaacccccagtgccacagagaagacgggatttgaagctgtacccaatttaattccataatcaatctatcaattacagtccgtccaccacctc

SEQ ID NO: 1931 - DNA, 6972 bp, Homo Sapiens
cgcccccgcctctgagctcccttcccatggcggccctagtgttggaggacgggtcggtcctgcggggccagccctttggggccgccgtgtcgactgccggggaagtggtgtttcaaaccggcatggtcggctaccccgaggccctcactgatccctcctacaaggcacagatcttagtgctcacctatcctctgatcggcaactatggcatccccccagatgaaatggatgagttcggtctctgcaagtggtttgaatcctcgggcatccacgtagcagcactggtagtgggagagtgctgtcctactcccagccactggagtgccacccgcaccctgcatgagtggctgcagcagcatggcatccctggcttgcaaggagtagacactcgggagctgaccaagaagttgcgggaacaggggtctctgctggggaagctggtccagaatggaacagaaccttcatccctgccattcttggaccccaatgcccgccccctggtaccagaggtctccattaagactccacgggtattcaatacagggggtgcccctcggatccttgctttggactgtggcctcaagtataatcagatccgatgcctctgccagcgtggggctgaggtcactgtggtaccctgggaccatgcactagacagccaagagtatgagggtctcttcttaagtaatgggcctggtgaccctgcctcctatcccagtgtcgtatccacactgagccgtgttttatctgagcctaatccccgacctgtctttgggatctgcctgggacaccagctattggccttagccattggggccaagacttacaagatgagatatgggaaccgaggccataaccagccctgcttgttggtgggctctgggcgctgctttctgacatcccagaaccatgggtttgctgtggagacagactcactgccagcagactgggctcctctcttcaccaacgccaatgatggttccaatgaaggcattgtgcacaacagcttgcctttcttcagtgtccagtttcacccagagcaccaagctggcccttcagatatggaactgcttttcgatatctttctggaaactgtgaaagaggccacagctgggaaccctgggggccagacagttagagagcggctgactgagcgcctctgtccccctgggattcccactcccggctctggacttccaccaccacgaaaggttctgatcctgggctcagggggcctctccattggccaagctggagaatttgactactcgggctctcaggcaattaaggccctgaaggaggaaaacatccagacgttgctgatcaaccccaatattgccacagtgcagacctcccaggggctggccgacaaggtctattttcttcccataacacctcattatgtaacccaggtgatacgtaatgaacgccccgatggtgtgttactgacttttgggggccagactgctctgaactgtggtgtggagctgaccaaggccggggtgctggctcggtatggggtccgggtcctgggcacaccagtggagaccattgagctgaccgaggatcgacgggcctttgctgccagaatggcagagatcggagagcatgtggccccgagcgaggcagcaaattctcttgaacaggcccaggcagccgctgaacggctggggtaccctgtgctagtgcgtgcagcctttgccctgggtggcctgggctctggctttgcctctaacagggaggagctctctgctctcgtggccccagcttttgcccataccagccaagtgctagtagacaagtctctgaagggatggaaggagattgagtacgaggtggtgagagacgcctatggcaactgtgtcacggtgtgtaacatggagaacttggacccactgggcatccacactggtgagtccatagtggtggcccctagccagacactgaatgacagggagtatcagctcctgaggcagacagctatcaaggtgacccagcacctgggaattgttggggagtgcaatgtgcagtatgccttgaaccctgagtctgagcagtattacatcattgaagtgaatgccaggctctctcgcagctctgccctggccagtaaggccacaggttatccactggcttatgtggcagccaagctagcattgggcatccctttgcctgagctcaggaactctgtgacagggggtacagcagcctttgaacccagcgtggattattgtgtggtgaagattcctcgatgggaccttagcaagttcctgcgagtcagcacaaagattgggagctgcatgaagagcgttggtgaagtcatgggcattgggcgttcatttgaggaggccttccagaaggccctgcgcatggtggatgagaactgtgtgggctttgatcacacagtgaaaccagtcagcgatatggagttggagactccaacagataagcggatttttgtggtggcagctgctttgtgggctggttattcagtggaccgcctgtatgagctcacacgcatcgaccgctggttcctgcaccgaatgaagcgtatcatcgcacatgcccagctgctagaacaacaccgtggacagcctttgccgccagacctgctgcaacaggccaagtgtcttggcttctcagacaaacagattgcccttgcagttctgagcacagagctggctgttcgcaagctgcgtcaggaactggggatctgtccagcagtgaaacagattgacacagttgcagctgagtggccagcccagacaaattacctatacctaacgtattggggcaccacccatgacctcacctttcgaacacctcatgtcctagtccttggctctggcgtctaccgtattggctctagcgttgaatttgactggtgtgctgtaggctgcatccagcagctccgaaagatgggatataagaccatcatggtgaactataacccagagacagtcagcaccgactatgacatgtgtgatcgactctactttgatgagatctcttttgaggtggtgatggacatctatgagctcgagaaccctgaaggtgtgatcctatccatgggtggacagctgcccaacaacatggccatggcgttgcatcggcagcagtgccgggtgctgggcacctcccctgaagccattgactcggctgagaaccgtttcaagttttcccggctccttgacaccattggtatcagccagcctcagtggagggagctcagtgacctcgagtctgctcgccaattctgccagaccgtggggtacccctgtgtggtgcgcccctcctatgtgctgagcggtgctgctatgaatgtggcctacacggatggagacctggagcgcttcctgagcagcgcagcagccgtctccaaagagcatcccgtggtcatctccaagttcatccaggaggctaaggagattgacgtggatgccgtggcctctgatggtgtggtggcagccatcgccatctctgagcatgtggagaatgcaggtgtgcattcaggtgatgcgacgctggtgacccccccacaagatatcactgccaaaaccctggagcggatcaaagccattgtgcatgctgtgggccaggagctacaggtcacaggacccttcaatctgcagctcattgccaaggatgaccagctgaaagttattgaatgcaacgtacgtgtctctcgctccttccccttcgtttccaagacactgggtgtggacctagtagccttggccacgcgggtcatcatgggggaagaagtggaacctgtggggctaatgactggttctggagtcgtgggagtaaaggtgcctcagttctccttctcccgcttggcgggtgctgacgtggtgttgggtgtggaaatgaccagtactggggaggtggccggctttggggagagccgctgtgaggcatacctcaaggccatgctaagcactggctttaagatccccaagaagaatatcctgctgaccattggcagctataagaacaaaagcgagctgctcccaactgtgcggctactggagagcctgggctacagcctctatgccagtctcggcacagctgacttctacactgagcatggcgtcaaggtaacagctgtggactggcactttgaggaggctgtggatggtgagtgcccaccacagcggagcatcctggagcagctagctgagaaaaactttgagctggtgattaacctgtcaatgcgtggagctgggggccggcgtctctcttcctttgtcaccaagggctaccgcacccgacgcttggccgctgacttctccgtgcccctaatcatcgatatcaagtgcaccaaactctttgtggaggccctaggccagatcgggccagcccctcctttgaaggtgcatgttgactgtatgacctcccaaaagcttgtgcgactgccgggattgattgatgtccatgtgcacctgcgggaaccaggtgggacacataaggaggactttgcttcaggcacagccgctgccctggctgggggtatcaccatggtgtgtgccatgcctaatacccggccccccatcattgacgcccctgctctggccctggcccagaagctggcagaggctggcgcccggtgcgactttgcgctattccttggggcctcgtctgaaaatgcaggaaccttgggcaccgtggccgggtctgcagccgggctgaagctttacctcaatgagaccttctctgagctgcggctggacagcgtggtccagtggatggagcatttcgagacatggccctcccacctccccattgtggctcacgcagagcagcaaaccgtggctgctgtcctcatggtggctcagctcactcagcgctcagtgcacatatgtcacgtggcacggaaggaggagatcctgctaattaaagctgcaaaggcacggggcttgccagtgacctgcgaggtggctccccaccacctgttcctaagccatgatgacctggagcgcctggggcctgggaagggggaggtccggcctgagcttggctcccgccaggatgtggaagccctgtgggagaacatggctgtcatcgactgctttgcctcagaccatgctccccataccttggaggagaagtgtgggtccaggcccccacctgggttcccagggttagagaccatgctgccactactcctgacggctgtaagcgagggccggctcagcctggacgacctgctgcagcgattgcaccacaatcctcggcgcatctttcacctgcccccgcaggaggacacctatgtggaggtggatctggagcatgagtggacaattcccagccacatgcccttctccaaggcccactggacaccttttgaagggcagaaagtgaagggcaccgtccgccgtgtggtcctgcgaggggaggttgcctatatcgatgggcaggttctggtacccccgggctatggacaggatgtacggaagtggccacagggggctgttcctcagctcccaccctcagcccctgccactagtgagatgaccacgacacctgaaagaccccgccgtggcatcccagggcttcctgatggccgcttccatctgccgccccgaatccatcgagcctccgacccaggtttgccagctgaggagccaaaggagaagtcctctcggaaggtagccgagccagagctgatgggaacccctgatggcacctgctaccctccaccaccagtaccgagacaggcatctccccagaacctggggacccctggcttgctgcacccccagacctcacccctgctgcactcattagtgggccaacatatcctgtccgtccagcagttcaccaaggatcagatgtctcacctgttcaatgtggcacacacactgcgtatgatggtgcagaaggagcggagcctcgacatcctgaaggggaaggtcatggcctccatgttctatgaagtgagcacacggaccagcagctcctttgcagcagccatggcccggctgggaggtgctgtgctcagcttctcggaagccacatcgtccgtccagaagggcgaatccctggctgactccgtgcagaccatgagctgctatgccgacgtcgtcgtgctccggcacccccagcctggagcagtggagctggccgccaagcactgccggaggccagtgatcaatgctggggatggggtcggagagcaccccacccaggccctgctggacatcttcaccatccgtgaggagctgggaactgtcaatggcatgacgatcacgatggtgggtgacctgaagcacggacgcacagtacattccctggcctgcctgctcacccagtatcgtgtcagcctgcgctacgtggcacctcccagcctgcgcatgccacccactgtgcgggccttcgtggcctcccgcggcaccaagcaggaggaattcgagagcattgaggaggcgctgcctgacactgatgtgctctacatgactcgaatccagaaggaacgatttggctctacccaggagtacgaagcttgctttggtcagttcatcctcactccccacatcatgacccgggccaagaagaagatggtggtgatgcacccgatgccccgtgtcaacgagataagcgtggaagtggactcggatccccgcgcagcctacttccgccaggctgagaacggcatgtacatccgcatggctctgttagccaccgtgctgggccgtttctaggggcctggcttcctcagcctcttctctttaggcccagctgctgggcaaggaattccagtgcctcctacgggggcagcacacttagatattcctggacatccagattgctcacatgtgctgaccacacttcaggctctggactggagctctctggcatgggggtggggcctcagatgctggggcccagtctgccccatcttcattcctgcaccttaaacctgtacagtcatttttctactgacttaataaacagccgagctgtcccttg

SEQ ID NO: 1932 - DNA, 744 bp, Homo Sapiens
aaagaggacgccatgattggttggcgctggggcggcggacggtggaagggcctggcgagtctaggttttacgcctgtgctggactttctccttccatgtttccaggccgtggggggctacagagggcgagaagtcggctcagcggaaacctggatttggttctaagccgtggggttgagaaggggtgaccggaagtgatcgtgggactgaccggaagcgaggcctggaggggaaagagagagcgagacctgggagggagggggcctccagcagaaaggggcgggggaaaaggtgcaaaagcagcgtgggagcgccgggctggcttcctgcggctgctgctggtctgactgggaagcagcaagccaccactacgaactctcaagaggagtgggagtgcgggagtccagagctgcctctgggaagtctgcagtagttgagcaaaggggtcctcacgttcctgagagctgggcaggggggattttggaacctggggcagccaagaacgagcagccaagggtacgggagattagttgtgcacagagcagtgctggtcgggcttgggggtggctggtgggcactgcgtgggaaaccttggtttgtagttttcttggtttgcgttactcctgttgggtagaattaccctccgcgcctttgtacaagacacggtgtctcctggggcaaggaaggagccaggatggcctgggctctgaagctgcctctggccgacgaagtgattgaatccgg

SEQ ID NO: 1933 - DNA, 168153 bp, Homo Sapiens
gatccaaagctgaatattataaatagttataatcacattcatcaaaaagttcaaagtgagagtgggctaaaaaataagtaggagtcagaaagagagagtaggagattgggtaaaatgataaaataatgagaaaaagaaataatttctatgtatcaggtaggagagagaagctatttcctagggctttgggggaaatgaatttcccacaccaaaggtggagtagattgaaaaaccgatagattgctcttcactccttcactgaggttctgaaactgtaggcattgaatgctgcattaaagatacatgtgcatcttattcctcataagtaaattacattgttttattactatgctgtgtggcccaaaaggcaagcaataatttttagtggctgagaagaaactagtttcacaaacaaggggcactttgaaaaaacaaatgtactcaaaaagacaatgttgctctgggctttatttagaattaaattccagaactcactcaaaactgcagaaccagtactcaaatttggtaccccttttgctcatccttcctaaagtcacccttcacacacaaatctttccaccctcctctccaggcattttaaatagctgcaggattagaaattgcaaaacagatgcctccggccaaaagcaccaagttttgctgataaattttcctgaaatcacacaaatggaaaaaacggaagtcagaagtgtacattttatattcagcagctaaagtctgaaatctcaggttataagtaaattattttgtgattaaatcctaatctcatcaatttaaagaaccaaaaacccagctcaataatccaccacaatcttaccttgaaaatgtggttctcttatttgaatgtcttcttccagtactaattcgatttcttttcctgaaaattctgccacatggtgctactttcggacatttaatatatttcatttataattactctcacgtgtaaatggtatctttaaataatatgtgcaggagttcttaataagttttcacaactctccttataaagcaaagctattcatttttagagagtttgaacgttttggtgttaatttgataaataacagctattggacaactgaagagaataaccactcacaggcaatcttctctttgtacttgattttaaaatattaatatttcattcatggtgtcttctcaaattaaatttctcagggttactggacctcagatactaaaaggacaaagaaaagggacagatgagaacagctacgaagcgatagtgaaaacatatggtgtccatcttgtaagcataaggctccctggtattgctgccactctccctgtgctcgggaaagctggaagaagccagtaggcaatctggtgtctcgtcagaagagtgccagaaacaggtgttgctgacctaaccctttcctcctaccacagattctcttggtaaatcctacactcgttaccatagcattgctttcaaacacacttatcagatgaaaaccaagtgttccaaaataacagtttatatggagtcaaaatgctgaaaattgctgtgattggttttttctttctctttttttttttcagtttttagaatcgggtaattttaaaattacaataaaatgcacacattttaagtgttccctgcgtgagtgttgatggttgtatacaccgatgtagcaccacccaaaacaagatacaaaacgtttcaatcactccagaagttttcctccttctccttttcagtcaaaccacactgtactgatttccattgccatagacaattttgcctgtctttgaacataatatactgtatatattctttacatctggcttttttttgccaatatatatttttaagactcattcttactgttgcatgttatcactagctcattccttttcattacagagtaatatttaactgtataaatataccacaatttgcttactcattttctaggaaatggatatttaagtgtttccagatgttcttggaacagtctcatataagactttgtgtagacgtatgtgatcatatcacctggataaatacctaggagtggaattcctgagacacaatatgtttaacttttaagaatgtggcaaacctttccccacaatcgttgtaatattttactctactgacttgttagtatttatctttctccatatcctcatcaatatttggtgctgtcagtcttagccattccagtgagtgtgaaatgctaactcattatgattctaaattgcatctctctgacgacttatgatgttgaatagcttttcaggtgttcattagcctcatcctatgtaggacatcttattcccaaattttcttttgctaagtgtctttccagactttggcccattttttactgagctgtttatctttttattgttgactcgtaaaagttatttatatattctggatatgacctattcatgaaaaataagtgatgagaattttcaaagtctgtcgattgcctgttcactttcttttaatgagcagaaattaaattttattgaaaatcaaatattctttgacaggtgaaatgtttttaattctaatacatttttgcataccccagggttacaaagatattatttattttcttcaaaaagctttttgattataatgtttatatttaagtttatgatctatttctacgtaatttttgtgttttgggtgaggtaagatcagagatcattttttgttttctaatggatagccaatctttcttgcatcatttgttttttttttgtttgattgtttattttggtttttttgagacggaagctcactctgtcgcccaggctggagtgcagtggcgagatctctgctcactgcaaaatccctgcctcccaggttccagcgattctcctgcctcagcctccgaggtagctgggactacaggagtccgccacagtgtccggctaacttttgtatttttagtagagatggggtttcaccatgttggccaggctggccttgaattcctgacctcaggtgatctgcctgcctcaggctcccaaagtgctgggattataggcatgagccaccgtgcccggccacatcatttgttttaagaaaatattttctttattaatctaatttgccactctggtcagatatcaatgtatgtttgtatgtatgtatcatatacgtgtgtatatatcacatatatctgtatgtgccaatttctggattttgtattctgcttcatcaatctattatttcgccaacatcatattcacttgattacagtgacattgtattaagtcctgaaatcaaatagtgtaaatccatcaactttgttcttctttatcaatattattttggttagtctagattctttgcactttctaactcacttcaaaagagcctgtttctaggtattttgggtttttgatgctattgtggacaatattttaaatagcattttatagttgtttattgttagtaattagaaatgcaattgatatttgaatattagccctgtgtccagagactgctaaattcacttattagttctagtagttatttgtttgtgtgtggattacatgaagttttctttttttttctttttttgagacggagtctggctctgttgcccaggctggagtgcagtggtgcgatctcagctcactgcaagctccgcctcccgggttcatgccattctcctgcctcagcctcccgagtagctgggactacaggtgcctgccaccacacccggctaattttttttgtatttttagtagagacggggtttcaccgtgttaaccaggatggtctcgatctcctgacctcatgatctgcgcacctcggcctcccaaagtgctgggattacaggcgtgagccaccatgcagggcccacatggagttttctacacacaagcacgtcatttgtgaataatgatagtttcacttctttttaattttagtgtgtcatttctttttctggcctcactgcactaactagaagtcacagtacaatgttgaatacaagcaatgacagctattcaaatatttatccttatccatatatttccctttctggtgctttattccctttcctgtagatcctggcttccacatggtataactccttcttagtccaaagagcttcttttagtatttgctgtagtataaatctgccacagacaaatttaatcatttttcttttagaaataattttatcttcatatttgtaggatgtctttataggaaatagaattgtgggctgacaatattttcttttagcattttaaagatattgttctattattttctagccttcactgtttctgatactgagacagccattattcttgtcattgttcccttacatatagttatcgcttttatttgtctattataagatactgctttttattttgggtttacagtaatttgaccacgatgtacataggtgaagatattttttatatactccacttagggttgattacacttctttgctgtctttcacttattttgaaaattctcttctattatctcttcaaatatttcttctacctcattctttctctcctctcacaggactccaacaacacatatggtagatcatttgatttgggcccacaggtcttggaaatgctcttccattattttcattgttttaaaacatctctctctgtgtttcattttggatattttccactgatcagtctttaagtttaccagtttctttctcactcagttcagttgtcaataagcccattgaacaaattcttcttttcccatgttatgtatttcatttctagcatttccaactaacttttaaaacatgtgcatttcattgataaagttgccaatctacttacatacattatctaccctttccacaagctgatcataattattttaaaattcctgtctgctaattccaacacctggaacatctctgcatttgtttctattgactatgtgctctctttaacatggattatattttcttctttcattacttgtcaaactttttatttatattattttatattatttataaaatataaaatattttatattatttataaatataaaatattttatttattttatattatttataaatataaaatattttatttattttatattatttattttatgtatttatttattttatattatttattttatttatgtattttatattatttatttattgtatagtgcataaaggaatagtaatgaccaaagaaaaacagtattttcccacagaaaagttatgtcctttcttctgtctggttgtaagtttgttgaaccgaatcaatctaacctagagtaaagctgtgtttggacattttcacaggtttagttacattcagtttactactggctttacattatgtgagaatgagatcaggaatttctcttcagtagtgtgttggaatcctagcaccagtggtactctggagatttatttgttcttttcatccagcctccagttttctgaaccatggggcatctctttattttttatttatagtctcgctactagatttttggtcactggggagttttctttgccttcatgccagattttctgaattttaaccttggacctattaatgaccgattgtctaacttgaatgaactcactgaactttttcatctcattactaaaatagaataagaatcactacttccatgtgtgttaaggagtgacctaacatcaaacagctaacatgcatataggagaagcatatgtgttctagttgaactgcacgtgaaagtcaaatttgttaagaaaataaaatactctttccagctcaatctgtctctatcattaacattttgaattcagtactgttgaaccaaatgccaagtcagcaactaattatatttttcttctataggtctatctttttaaaaataagacagtattaaatcagcctgagttattagaaaggatagtgggagcacatgatcaaattaaaaattacatagattcctgaaataattttattatttgcaattttctagtgacctccagaacttcatgacatgtgatattttaatgcagaaacatactgaaagacagacagcatgtaaattcacaacctctgtgttatagactgcatgaaaggtagatgagaaaagaaagaaaaagaagagagaataccagggagttaatattcagcatcactttatcagccatgcaatggattaacattcattaatccagtattgtagctgaacagagtagcacagagagtttctgtactctctctgtaactgtggtttaaaaaaagaagtttgcattgttgaaattaacccatatccactgccaaaagtacatgatccagtggctaacatgtaatgatgctatttctaaaaaatgtgttgtaattaaatgtcacagtcttgcatatatttcagacaactcagcactgaagtcaagtcaggtcactgatagaaagttattggtcaatgatcccattaagcatgtgaagtgatgctctatattcaaaacgacttcatcttctctaaggataaaaccaccacctgatcccaaagggtgtatccttgtcctcatgagaactccattaaaaattaatatctccaccaattacagtaagctggaaggagattctacttttattgtggtgaaactttttataatgagaacattgctaggaaaaaatatctcaactaagaagagtataaggtcaaaaaaagaattgaaagcactttccctttaccttattgtctcacaataagacctaagaaaatatgtgtggtccaagattgcttgtgatatataccttactctgaccatatttgtaaattcttgtactgaaggctaaataaattcatgaattgaaatgttcctcctgagcttggaacaaatatatttcacgtttgtaagttcttctcataaggatgatttttgaaatttcatagactaaacatacatttatatcttccctctcactccaaatcacacagagtaaaatattttatgcctattaaaagtacaagcaatgaaccacaaattttgtgaatttcagagagacagacagcatatacaatcatgcctttagcaaaataaaactgaatgaaactataggctagaatacacctagaagaagcctgttgttgaagggggaggtttgaaagtccccaagtccagtattagaagttttaaaaattaagacagaaccctcaaacatttaaagagtaattagttggaaggctccttttggaatagcagacgagttgatttctttctttcctgtcttttgcactatgtgggctttaacaactggctagagaagaatattgaagttggagaagacttacagtgctaggtagctactcacttccaggagtgatgagaacttccacatttgaaagataagcttccattccaaatgtttcccccatttgttggggatagattctggtaatgcaaagaacaagtaagcggtgactctcaaatacaaagctataggcagccaagatgtgctaaacattttacaaaagtcagtaatagagaaactaggcattaacaaaaagaagaatgaccacccccttcttagaaagagttaataaagttaacaaaaagacttagaataaatatgaatagttgaaagacttgaaagaacatttcctttatgtagaagtatctgctacaaaatttaattttaaaaattctatcttctcagaattaaaaaaataagaaaatttcaataggtaggcaataatagcagcaatacatactttatggtgaattagtgagttgaaagattgagctgaaacattttcacatggaatagaacagatggacaaaagaaaggaaattataagtgcagagttaaatgacatgaagagtattatcttgatattcccaaatctagattataggaattccagactgaaagaaatgagaaaatgcaaggatgtatataatcaaataaatatcaacccaaaaaaatcctcaggtctggagaaagcataaatcttcaaattaaaagtgctaagccagattttataagagccaaagctacatgcatcattgtgaaatttcagaatttcaaggataaactcagagaaaaacaacttgaaaaaaaaatcaaactctgaaaagtcagcctgccatcagcataactcctcataaagacaactcagtactagaagtcattaacatcttccaaattaaagggggtgatgattttcaacctacaatcccatacctagccaaactagcatttgagtgaaagagattctaaatacatattcagacaagaaaagcctccagctaagcaatctctgaaagaattacttgaggatacacagcaaaaaataagtaacgaatccagaaaaggacatcacgtggtcctaaatatacaaaagtgtaataagcaaattcatactaaaacctaaataattgttgatgtgcaacactaaaccaaaacataataaacacttggaacaaaaattccacataaactcagtatgaaatatggtagaattaatgaagaggaaaaaatcaaaggtgagagaagatttttactttttgggaaatggaagcagataatcattaatcttaaatatcaatagaacaatacaaatttttaaaaatgtgttaaaaatgtaagagtaagtattagaagtgtaagatctatatcttctaaatcatagtattaaaaaatggatcttagaaaaacatccaaatttgaaaggatcatgcttccaggctttctcttgtgcctttgtggtggttgccaaatacatttattttctgccaagaatgcactacctctgctaaagtgttttctagctatttgtctattagtatattattttgcaatatatgctatatcttgccacaatgccaagaattctccgacaatctacaattctctgaagttaaagaagattattagatctatccattacaggctgtcacatgtcttcaacttcttcaagctaagttcaatcgctggctccactgcagtgcacaaaaagctctaaaaagctccaattcaagccataattggaggtttgggctccagcacagttgtccagattttccaaatgtccagcttgtgcattctggtataaattccagaatgaaaaacattccactggatgaggaatgtatcataatgtgcagaaactagtttctagtccatttagacacaaaaacaagctcggaagaggaaaatcacaagcagtttcattagcatcaaatcataaaacacagccatttacaaaactagcttctctctcttccattggtccaaagaagtatcctgggacaagagtggtcttgaaaaaaaaacctaacccttcgggatacccagagatattattcatttaagtacattgtatctggagttttttttttaaactcattgacataattcaaattaatttttaaaagttctcggctacttcacacatacgctattgaagctatcgtcacaccattattgatattttaatacatttaactgttagctaactgaatattcacagatattattaatacatacaacatgggtggcaaaacttgtttttccagtctctttataacttgcctcatttgtcatcaaatccatgtggagtgaaaaataaaagctccccaatcgatttaatttaataaagctaagaaataggtggtgtcttcccgggactgtgttgatgaaattgacccaacactcagttctagcatttcctctccgagaagagcttaactttacttaataagacagagagggggaggagccaagatggccgaataggaacagctccggtctacagctcccagagtgagcgacgcagaagacgggtgatttctgcatttccatctgaggtaccgggttcatctcactagggagtgccagacagtgggcgcaggccagtgggtgtgcgcaccgtgcgcgagccgaagcagggcgaggcattgcctcacctgggaagcgcaaggggtcagggagttccctttccgagtcaaagaaaggggtgatggacgcacctggaaaatcgggtcactcccacccgaatactgcgcttttcagaccggcttaaaaaacggggcaccatgagactatatcccacacctggctcggagggtcctacgcccacggaatctcgctgattgctagcacagcagtctgagatcaaactgcaaggcagcagctaggctgggggaggggagcccgccattgcccaggcttgcttaggtaaacaaagcagccgggaagctcgaactgggtggagcccaccacagctcaaggaggcctgcctgcctctgtaggctccacctctgggggcagggcacagacaaacaaaaagacagcagtaacctctgcagacttaaatgtccctgtctgacagctttgaagagagcagtggttctcccagcacgcagctggagatctgagaatgggcagactacctcctcaagtgggtccctgacccctgacccccgagcagcctaactgggaggcaccccccagcaggggcacactgacacctcacacggcagggtattccaacagacctgcagctgagggtcctgtctgttagaaggaaaactaacaaacagaaaggacatccacaccaaaaacccatctgtacatcaccatcatcaaagaccaaaagtagataaaaccacaaagatggggaaaaaacagaacagaaaaactggaaactctaaaatgcagagcgcctctcctcctccaaaggaacgcagttcctcaccagcaacggatcaaagctggatggagaatgactttgacgagctgagagaagaaggtttcagacgatcaaattactctgagctacgggaggacattcaaaccaaaggcaaagaagttgaaaactttgaaaaaaatttagaagaatgtataactagaataaccaatacagagaagtgcttaaaggagctgatggagctgaaaaccaaggctcgagaactacgtgaagaatgcagaagcctcaggagccgatgcgatcaactggaagaaagggtatcagcaatggaagatgaaatgaatgaaatgaagcaagaagggaaggttagagaaaaaagaatacaaagaaatgagcaaagcctctaagaaatatgggactatgtgaaaagaccaaatctacgtctgattggtgtacctgaaaatgatgcagagaatggaaccaagttggaaaacactctacaggatattatccaggagaacttccccaatctagcaaggcaggccaacgttcagattcaggaaatacagagaacgccacaaagatactcctcgagaagagcaactccaagacacataattgtcagattcaccaaagttgaaatgaaggaaaaaatgttaagggcagccagagagaaaggtcggtttaccctcaaagggaagcccatcagactaacagcggatctctcggcagaaaccctacaagccagaagagagtgggggccaatattcaacattcttaaagaaaagaattttcaacccagaatttcatttccagccaaactaagcttcataagtgaaggagaaataaaatactttacagacaagcaaatgctgagagattttgtcaccaccaggcctgccctaaaagagctcctgaaggaagcgctaaacatggaaaggaacaaccggtaccagccactgcaaaatcatgccaaaatgtaaagaccattgagactaggaagaaactgcatcaactaacgagcaaaatcaccagctaacatcataatgacaggatcaaattcacacataacaatattaactttaaatgtaaatggactaaattctccaattaaaagacacagactggcaagttggataaagagtcaagacccatcagtgtgctgtattcaggaaacccatctcacgtgcagagacacacataggctgaaaataaaaggatggaggaagatctaccaagcaaatggaaaacaaaaaaaggcaggggttgcaatcctagtctctgataaaacagactttaaaccaacaaagatcaaaagagacaaagaaggccattacataatggtaaagggatcaattcaacaagaagagctaactatcctaaatatatatgcacccaatacaggagcacccagattcataaagcaagttctgagtgacctacaaagagacttagactcccacacattaataatgggagactttaacacctcactgttaacattagacagatcaatgagacagaaagtcaacaaggatacccaggaattgaactcatctctgcaccaagcggacctaatagacatctacagaactctccaccccaaatcaatagaatatacatttttttcagcaccacaccacacctattccaaaattgaccacatagttggaagtaaagctctcctcagcaaatgtaaaagaacagaaattataacaaactatctctcagaccacagtgcaatcaaactagaactcaggattaagaatctcactcaaagccgctcaactacatggaaactgaacaacctgctcctgaatgactactgggtacataacgaaatgaaggcagaaataaagatgttctttgaaaccaacgagaacaaagacacaacataccagaatctctgggacgcattcaaagcagtgtgtagagggaaatttatagcactaaatgcccacaagagaaagcaggaaagatccaaaattgacaccctaacatcacaattaaaagaactagaaaagcaagagcaaacacattcaaaagctagcagaaggcaagaaataactaaaatcagagcagaactgaaggaaatagagacacaaaaaacccttcaaaaaatcaatgaatccaggagctggttttttgaaaggatcaacaaaattgatagaccgctagcaagactaataaagaaaaaaagagaggagaatcaaatagacacaataaaaaatgataaaggggatatcaccaccgatcccacagaaatacaaactaccatcagagaatactataaacacctctacgcaaataaaccagaaaatctagaagaaatggataaattcctcgacacatacactctcccaagactaaagcaggaagaagttgaatctctgaatagaccaataacaggagctgaaattgtggcaataatcaatagtttaccaaccaaaaagagtccaggaccagatggattcacagccgaattctaccagaggtacaaggaggaactggtaccattccttctgaaactattccaatcaatagaaaaagagggaatcctccctaactcattttatgaggccagcatcattctgataccaaagccgggcagagacacaaccaaaaaagagaattttagaccaatatccttgatgaacattgatgcaaaaatcctcaataaaatactggcaaaccgaatccagcagcacatcaaaaagcttatccaccatgatcaagtgggcttcatccctgggatgcaaggctggttcaatatacgcaaatcaataaatgtaatccagcatagaaacagaaccaaagacaaaaaccacatgattatctcaatagatgcagaataggcctttgacaaaattcaacaacccttcatgctaaaaactctcagtaaattaggtattgatgggacgtatttcaaaataataagagctatctatgacaaacccacagccaatatcatactgaatgggcaaaaactggaagcattcctttgaaaactggcacaagacagggatgccctctctcaccactcctattcaacacagtgttggaagttctggccagggcaatcaggcaggagaaggaaataaagggtattcaattaggaaaagaggaagtcaaattgtccctttttgcagacgacatgattgtttatctagaaaaccccatcgtctcagcccaaaatctccttaagctgataagcaacttcagcaaagtctcaggatacaaaatcaatgtacaaaaatcacaagcattcttatacaccaacaacagacaaacagagagccaaatcatgagtgaactcccattcacaattgcttcaaagagaataaaatacctaggaatccaatttacaagggatgtgaaggacctcttcaaggagaactacaaaccactgctcaaggaaataaaagaggatacaaacaaatggaagaacattccatgctcatgggtaggaagaatcaatatcgtgaaaatggccatactgcccaaggtaatttacagattcaatgccatccccatcaagctaccaatgactttcttcacagaattggaaaaaactactttaaatttcatatggaaccaaaaaagagcccgcatcgccaagtcaatcctaagccaaaagaacaaagctggaggcatcacactacctgacttcaaactatactacaaggctacagtaactaaaacagcatggtactggtaccaaaacagagatatagatcaatggaacagaacagagccctcagaaataacgccgcatacctacaattatctgatctttgacaaacctgagaaaaacaagcaacggggaaaggattccctatttaataaatggtgctgggaaaactggctagccatatgtagaaagctgaaactggatcccttccttacaccttatacaaaaatcaattcaagatggattaaagatttaaacgttagacctaaaaccataaaaatcctagaagaaaacctaggcattaccattcaggacataggcgtgggcaaggacttcatgtccaaaacaccaaaagcaatggcaacaaaagccaaaattgacaaatgggatctaattaaactaaagagcttctgcacagcaaaagaaactaccatcagagtgaacaggcaacctacaacatgggagaaaattttcgcaacctactcatctgacaaagggctaatatccagaatctacaatgaactcaaacaaatttacaagaaaaaaacaaacaaccccatcaaaaagtgggcgaaggacatgaacagacacttctcaaaagaagacatttatgcagccaaaaaatacatgaaaaaatgctcatcatcactggccatcagagaaatgcaaatcaaaaccacaatgagataccatctcacaccagttagaatggcaatcattaaaaagtcaggaaacaacaggtgctggagaggatgtggagaaataggaacacttttacactgttggtgggactgtaaactagttcaaccattgtggaagtcagtgtggcaattcctcagggatctagaactagaaataccatttgacccagccatcccattactgggtatatacccaaatgactataaatcatgctgctataaagacacatgcacacgtatgtttattgcggcattattcacaatagcaaacacttggaaccaacccaaatgtccaacaacgatagactggattaagaaaatgtggcacatatacaccatggaatactatgcagccataaaaaaggatgagttcatgtcctttgtagggacatggatgaaattggaaaccatcattctcagtaaactatcgcaagaacaaaaaaccaaacaccgcatattctcactcataggtgggaattgaacaatgagatcacatggtcacaggaaggggaatatcacactctggggactgtggtggggtggggggaggggggaggggtagcattgggagatatacctaatgctagatgacgagttagtgggtgcagcgcaccagcatggcacatgtatacatatgtaactaacctgcacaatgtgcacatgtaccctaaaacttaaagtataataataaaaaaaaaaaagacagagaaacacaacttgcatgaacaagcaaatactcagtttgattcaacagtaagagaaacctcctgtaatagaaggttctttatatgtggaatccaggccttgagaaaaaggaggtaaggttggaaactgagttgctgatacttctagcaagacccttttaatgtgcccgaatatttactctactaacaatagcaaacgagagaacaagagcgtataggtagtagtgctgcctaatataatggggtgacatgaggacttgggtgtgtgctttctgtcagagaagcccagggaataggagtttcagcattatatctcagacaacagcaaactttgagatcccttgctgtacagagaaggaaagcagaaactctatagtaaggcctaataatttgtggtgtaagccaatagtacataataaatgtatcctttatcagagctctatgatggaaagatgagaatgtttgagaaaaaataaatgaatacatttgggaatttatattttcttttgtctcagacactggatctatcatgtgcacagggacacacgcatgcatactcacacacatacaaacacaagaatgcctcattaatatctacctgcatgcaaatctatattgtacaaatcctggtgattacttaaaaatagcaattactcagatttcactatgtgccagataccattctaagtgatttaggtatattaactcaatctttacaacaaccttatcatgatcctcaattattttttatttattttattttatttttattatactttaagttctagggtacctgtgcacaacatgcagatttgttacatatgtatacatgtgccatgttggtgtgctgcacccattcactcgtcatttacattaggtatatctcctaatgctatccctccccacttcccccaccccacgacaggccccggtgtgtgatgttcgccttcctgtatccaagtgttctcattgttcagttcccacctatgagtgagaacatgtggtgtttggttttttgcccttgcgatagtttgctcagaatgatggtttccagcttcatccatgttcctacaaaggacatgaactcatccttttttatggctgcatagtattccatggtgtatatgtgccatattttcttaatccagtctatcattgatggacatttgggctggttccaagtctttgctattgtgaatagtgctgcaataaacatacatgtacatgtgtctttatactagcatgatttataatcctttgggtatatacccagtaatgggatggctgggtcaaatggtatttccagttctagatccttgaggaatcaccacactgtcttccacaatggttgaactagtttacagtcccaccaacagtgtaaaagtgttcctatttctccacatcctctccagcacctgttgtttcctgactttttaatgatcacccttctaactggtgtgagatggtatcttgttgaggttttgatttgcatttctctgatggccagtgatggtgagcattttttcatgtgtctgttggctgcataaacgtcttcttttgagaagtgtttattcatatccttcgcccactttttgatggggttgctttttcctcgtaaatttgtttgagttctttgtagattctagatactagccctttgtcagatgagtagattgcaaaaattttctcccattctgtaggttgcctgttcactctgattgtagtttcttttgctgtgcagaagctctttagtttaattagatcccatttgtcaattttggcttttgttgccattgcttttggtgttttagacatgaagtccttgcccatgcctatgtcctgagtggtattgcctaggttttcttctagggtttttatggttttaggtctaatatttaagtgtttaatccatcttgaattaatttttgtataaggtgtaaggaagtgatccagtttcagctgtctacatatggctagccagttttcccagcaccatttattaaatagggaatcctttccccatttcttcgttttgtcagatttgtcaaagatcagatggttatagatgtgtcgtattatttctgaggactctgttcttttccgtggtctttacatgctgttttggttactgtggccttgtagtatagtttgaagtcaggtagtgtgatgcctccagctttgttcttttggcttaggattgacttggcaatgtgggctcttttttggttccatatgaactttaaagtggtttttttccaattctgtgaagaaagtcattggtagcttgatggggatggcattgaatctataaattaccttgggcagtatggccattttcacgatattgattcttcctacccatgagcatggaatgttcttccatttctttgtgtcctcttttattttcttgagcaatggtttgtagttctccttgaagaagtccttcacatcccttgtaagttggattcctaagtattttactctctttgaagcaattgtgaataggagttcactcatgatttggctgtttgtctgctattggtgtataggaatgcttgtgattttttcacactgattttctatctgagattttgctgaagttgcttatcagcttaaggagattttgggctgagacgatggggctttctaattatacaataatgtcatctggaaacagggacaatttgacttcctcttttcctaattgaataccctttacttctttctgttccctgattgccctggccagaactttcaacactatgttgaataggagtggtgagagagggcatccctgtcttgtgccagttttcaaagggaatgcttccagtttttgcccattcagtatgatattggctgtagtttgtcataaatagctattattattttgagacatgtcccatcagtacctaatttattgagagtttttagcatgaagggttgttgaattttgtcaaaggccttttctgcatctattgagataatcatgtggtttttgtctttggttctgtttatatgctggattacattaatgatttgcgtatgttgaaccagccttgcatcccagggatgaagcccactagatcatggcagataagctttttgatgtgctgctggattcggtttgccagtattttattgaggacttttgcatcaatgttcatcagggatattggtctaaaattctctttttttgttgtgtctcttccaggctttggtatcacgatgatgctagcctcataaaatgagttagggagggttccctctttctctattgattggaatagtttcagaaggaatggtaccagttcctccttgtacctctggtagaattcggctatgaatccatccggtcctggactttttttggttggtaggctattaattattgcctcaatttcagagcctgttattggtctattcggggattcaacttcttcctggtttagtatttggagggtgtatgtgtccaggaacttatccatttcttctagattttctagtttatttgcgtagaggtgtttatagtattctctgatggtagtttgtatttctgtgggatcagtggtgatatcccctttatcattttttattgtgtctatttgattcttctctcttttcttctttattagtcttgctagcagtctaacaattttgttgatcttttcaaaaaaccagctcctgggttcattgattttttgaagggttttttgtgtctctatttccttcagttctgctctgatcttacttatttcttgccttctgctagcttttgaatgtgtttgctcttgcttctctagttcttttaattgtgatgttagggtgtcaattttagatctttcctgctttctcttgtgggcatttagtgctataaatttccctctacacactgctttaaatgtgtcccagagattctggtatgttgtgtctttgttctcattggtttccaaggacatatttatttctgccttcattccgttatgtacccagtattcattcaggagcagtttgttcagtttccatgtagttgattggttttgagtgagtttctcaatcctgagttctagtttgattgcactgtggtctgagagacagtttgttataattcctcttcttttacattcgctgaagagtgttttacttccaactatatggtcagttttggaataagtgtgatgtggtgctgacaagaatgtatattctgttgatttggggtggagagttccgtagatgtctattaggtccgcgttgtgcagagctgatttcaattcctggacatccttgttaactttctgtctcattgatctgtataatgttgacagtggggtgttaaagtctccaattattattgtgtgggagtctaagtctctttgtaggtctctaaggacttgctttatgaatctgggtgctcctgtattgggtgcatacatatttaggatagttagctcttcttgttgaattgatccctttaccattatgtaatggccttctttgtctcctttgatctttgttggtttatagtctgttttatcagagactaggattgcaacccctgccttttttgttttccatttgcttggtagatcttcctccatccctttattttgagcctatgtgtgtctctgcacgtgagatgggtctcctgaatacagcacactgatgggtcttgactctttatccaatttgccagtctgtgtcttttaattggagcatttagcccatttacatttaaggttaatattgttacatgtgaatttgatcatgtcattatgatgttagctggttattttgctcgttagttgatgcagtttcttcctagcatcgatggtctttacaatttggcatgtttttgcagtggatggtaccggttgttcctttccatgtttagtgcttccttcaggagctcttgtagggcaggcctggtggtgacaaaatctgtcagcatttgcttgtctgtaaaggattttatttctccttcacttatgaagcttagtttggctggatatgaaattctgggttgaaaattcttttctttaagaatgttgaatattggcccccactctcttctggcttatagagtttctgccgagatccacggttcgtctgatgggcttccctttgtgggtaacccgacctttctctctggctgccttaaaattttttccttcatttcaactttggtgaatctgacaattatgtgttttggagttgctcttctcgaggagtatctttgtggtgttctctgtatttcctgaatttgaatgttggcctgccttgctaggttggggatgttctcctggataatgtcctgcagagtgttttccaacttggttccattctccccgtcactttcaggtacaccaatcagacatagatttggtcttttcacatagtcccatatttcttggaggctttattcgtttctttttactctgttttctctaaacttctcttctcacttcatttcattcatttgatcttccatcactgataccctttcttccagttgatcaaatcggctactgaagcttgtgcatgtttcatgtagttctcgtgccatggttttcagctccatcaggtcctttaaggacttctctacactggttattccagttagtcattcatctaatcttttttcaaggttttaagcttctttgcgatgggttcgaacttcctcctttagctcggagaagtttaatcatctgaagccttcttctctcaactcgtcagtcattccccatccagctttgttctgctgctggcaaggaggtgtgttcgtttggagggggagaggtgctctgattcttggaattttcagcttttctgctctgttttttccccatctttgtggttttatctacctttgctctttgatgatgatgacatacagatgaagttttggtgtggatgtcctttctgtttgtcagttttccttctaacagtcaggaccctcagctgcaggtctgttggagtttgcttggaggtccactccagaccctgtttgcctgggtatcagtagcagaggctgcagaacagcgaatatttttgaacagcaaatgttgctgtctgatcgttcctctggaagttttgtctcaaaggggtacccggtcatgtgaggtgtcagtctgcccctactggggggtgcctcccagttagactactcgggggtcagagacccatttgaggaggcagtctgtctgttctcagatctcagactccatgctgggagaaccactactctcttcaaagctgtcagacagggatatttaagtctgcagaagtttctgctgccttttgtttggttatgccctgcccccaaaggtggagtctacagaggcaggcaggcctccttgagctgcgatgggctccacccagttcgaacttcccagacactttgtttatctactcaagcctcagcaatggcgggcaccactcccccagcctcgctgctgccttgcagtttgatctcagactactatgcaagcaatgaagcagtctccgtgggcgtgggacactccgaaccacgtgcgggatataatctcctggtgtgccgtttgctaagaccgttggaaaagcacagtattagggtgggagtgacccgattttccaggtgccatctgtcacagcttcccttggctaggaaagagaattccctgaccccttgcgctgctcggtgggctgcacccactgtcctgcctccagtgtctgacaagccccagtgagatgaacccggtacctcagttggaaatgcagaaatcacacatcttctgtgcgctcacactgggagctgtagactggatctgttcctattccgccatcttggaactgccccctcaattttttttttttttttttttttggagacggagtgtcactctgttgcccagggtggagtgcagtggcggggtgttggctcactgcaacctctgtctcccagattgaagcaattctcctgcttcagcctcccaagtagctggaactacaggtgcacgctgccacacccagctaattttttttgtattttagtaaagacagggtttcaccatgttgcccaggctgatcttgaactcctgagctcaggtaatccacctgcctctagcaccaaagtactagaattacaggcttgagccaccactcctggcccatgattcccattttttaggcaacaaaactaaggctcaaagtggttaagtcacttattcaagttcatacaaccaataagtagaaagtcaagctttctactcagaaggcagcctccagggtctatactcatgcccactataatctaaaaatctctcagtatgagaaacttcttctaaccaagattgtgaagtgacagaaacatacttcatacttttttcctcttggtagtggaccagaattaagactgggcttttcctgtaatgggcaccatttcagtgccacagtaacagccaggatgtggatttctaccttccttcttagagagggtgaggacacttctgcaataatgggacatgtctgcatgagatgcgtattatttttgctaggttgcaccattgaaacaggttctgaaaacaaggaagatcagtgccaagatccgtttaaatttctatatattcatctgatttaatccttaaaactgtatctgtcctgctggaaaattagctaatcaacttaagagactcctcccatcccctcttctcttctcaaccaactctaactctgtggttaagtatgaagcacagaaggttaaaaatcctggattctttccctaggtctgctactgcatgacctaggtcaaatcatttaaccatcccgtgcctcagcttcatcatctgtacattatagacttcttccagatcgaaaactctgatattctagctcactgcattctgtgtggacatttctataaattccatgaatattctaacagaataagaaaaacttcatgagaatagggaccataatcatcttaaacaccattgcacatgcaaaacttagcatttaatatgtgacctttaaatatttgttgaaattcagaaatgtaaaaatattccacaaatgtaaacacacaaaaacaaaaactaaatgtctcagaaagaagccctacatttggatcagtaaatgggggaatagccagacatatttaatgtataatttagacatttttggagaaagacctgctaatgagccccttctttcagagatttaacttttcaaagcttgcaaaaacattttctcctcctgcagttttaaatgtaattcattataagctgaaagttgtcaataaatgtatctaatgcacataagaaaagtgctattacagcatcattgtccttactcctatagcccagcctcacctaatataatggaaaactaaaatgctatctagacttatgcattatcttgtcaggaagcacctttgtctcactggtacctgtacttcgtagcacgtcacccaatttgatatgccaacattaaacttgggcacacatacatattcacatttaatagtatctttatcttgggaattcaaaataaccaattatggaatgctatggaatcttgaaagttgttctgcaaaatttctagatcaaatctaaacaactacaacctactttttggcaattttttttttttttttttttttttttttttttttttaaaaacggagtcttgctctgtcgcccaggctggagtgcagtggcatgatctcggctcactgcaagctccgcctccagggttcacgccattctcctgcctcagcctcccgagtagctgggactacaggcgcccgccactgcgcccagctaatttttttttgtatttttagtagagacggggtttcaccgtggtctcgatctcctgacctcgtgatccacccgcctcggcctcccaaagtgctgggattacaggtgtgagccaccatgcccggccagcaaatttttaattttctatttcattttattttttagtttggaaaggagagctttatttcctataaagggttgcagcctgcagggtggccatccttggcagatattttgaaactgaaattattaacttgagtttattaataacttggtgataatggccaggggctccattaagttgtacctaaggggaaaagatagtgaagaggcaaaattaagaggctgctatagtcatgctctcatgaaacttgcaatctactctttgagccagaaataatacagagagaggtagaacaggataaacgtggttatgcagtgctcatttcattgaagcacagggaaaataaataatttaaatgagctgggtaggtttaaaaaaaaaaggtataaagaagtggttcttgagtttttccttggataggagaagccaaataagaaagacataaggttgacagtgggagtggtattggggtaggtgaaaggcagaacctcaattccaccataaatggtgataaaatgtaagtccatcagttacatagtaaagaaaaattatggcaaagttttataccagcccttaaggaagctaagctgcagaaaagatacagagaagacaaatcatatttcacctaatatgtcctaaaacactttacagcttttaggggcacagttgaagaccattgatctaatccaatgttttcattttaatcatgagaaaactgagtcccaaagatgttaactgattcctctaaggtcacgtggtagctttaatggccaagacaggactggaatctagatcattctattacatcactgcatttcctgagtttcattttagcatgaatattctcccttgccacatacttatcataaaataacaagatcccattattctcatcctgaccttactgtgtccatgtctgcctgagttgctaataaataacaaaagttgtttccagatttgaataggccctagtagagaatagtgcttagagatgtatcagcaaactcacagggggtaggggtagggattggacaagaagaagtcagtgtttacacaattgagcatagcttttactgttgactggacagctgttccgtctagagcttcttaacccagaaaattactcaattatcaaaagggcacattgattcaccagctgtacattgctaagactttctaatatttaaaagtcataaaggttaccacacttcaaaagatgttattgaatgttactattgcttcacagaaattgatctgtcactatttattcaactattcattcagttgaactcagtgaagagaacctcactgcactgtaaatatttaaatggctcttgttggagacaaagtgaataagcctaagtaggctgggagcagcactggctcaatctgagaacaaatattccgaataaagagcccaactttgcatccaggatgccagcctcaagcagctctattatcaagaacaccttccaagttcacgttgtctgtgcttgagacatacggatgtcccattttaaacttaacaaataaaagtactaagaaagtggtgagaggagtgtagaggaaaataataaactcctaattcttcctaaatctgaagcattaggaaataaagtaacaaaccagttttcctttctgacctcaagcaaatgattgactttagagcccacaatgacctgcttagagctatttagagtgtcaagggccacctagtttcatgtcgttgaacaggtaacaaagcgcaggaaaggagaggcttgggtactgggggataaagtttgtatcaaattgcatcctgaaatctcagccttttccaaacaaatgtaaatacttagctgcatctgaatcattcattttgaaaacccaacagaccttttcctgcgcaagcaggagagattaaagcaacaataccagatgctttgctcaactgatttcctagattgagctgacaaaactattcttgtagaaatctagtcttgcctcctttcacttacagaactgaaatgcctctgtaggttatggagcaaaagaaacccagtggaagggctagagaaatcctactagaggtgacatacctagagctgaaaggtctgagttaggaccacatattgattggctttattgatggtatgataattttcaggtttagtttagctcttcatctgcccatgaccaactttacctgtgactgtggctcttcaccacactgccaccaacccacttggccttcatgtggttacacaaatggaatggaaggtcctaggttttctttaactgtattcacttactcatttattaaatcactgaatctcttactcttgcatccccatttattcagccaacaagccttaatgagtagaaaaggcaggcatgatgctataatggagatgagaaagataaaacgctttgcacagctaggtggtacttgccttgccagagatggagaaggagactgggggcagactggactatctgtaactttggttaggagagctggaagcctccactggatcactggccttgagaagtggtagaggaacaagacaggaattaatcaggaggaaggggcattccacatagagggaatggtagctatgaaggcaaataagcactgaaggtcttgctatgcttggggaagggtggaaagttccatatgcctggagagtaggcagagatgaaaggaaaggcacaaggagtggccagggggttgaaagaattaagactggtgaaataagtcaccgtctaagggtgatatgttttcacctccatcactcctctgaaactgcttttgccaaaattaccaataaaccttattacaacggaatacatgggtaattttcaggcctcattttacttatcatctaggctagtattgtaccaaagggtgggagatgagagttcatgtcaggtgcaggcaacagggagtacattgtccccaaacgatttaaagacagtaataaaaactgacaaaaattgatcggctttctattatcacaatgcaccagcaattccaaacaatgttagtataaaaaactcctctcgaaaccctttggttgatcttagttctaatcaattgctatgcttactgttacattttagtaatataattatatgcatatattatgtcatgttgtatgggtatgtatgccaacttcaaataagaacacttgtattacttatcctttaataaacatcatatatacctgaaagctattctcaggagtttgcagttacatagtctactccagacacacatggacttagcacgcgtgttcatttcaaaagtaaattcataatgattcagagtcagtcaagcttgctttgagcagttaacgtttccatctctgtactacacaccctgttgtaaacatgctatgtttaatcaggagattcaaaataaacaatgacagcacagagactgtaaagacaaagaaacaaaaattgagttattttaattctgtcattgtgttaccactaggagtttttatttgtatttaaaattgaaaacagtgaaagagtgcaaactgtgagatgttcattattgagttggttgttaagcacagattttaattcatacgtgaaataatgtactgaatctgaataatatccttaaaattgaaattcattctttttaaattgtactcattttaaaattaaataacaaatcaagaaaacaaagatggttgcatgatgataattgaaaacagtttcaccataaggtggagagagttgctctgggtgtcaaccacaccaggtgcaccacagattaaggctgcatacaagccttgtgctcactccatccttctctgaacactcttttcctttggttttcatgaaacatgctctcccaactttttcctagctagtggtctctccagcagtgttcacacctcctcatccctgaaaacatcatatttctcagtgttctgtgctagctaggtcgtcatctgttcttaacctacaaggcttctgaacgatctggcttcaataaccaactgtatgctgacgactctcaaatctattccttagctcaaatctctctcccgaaataagctgtttacctaactctctactgagcatcttcttttgaacataacttagacatctccaatccaattgtctgaaactgagttcattaacttcacctcctccttgatcggtctggtaaactaggaaccatccttgattcacccttttccttcctcaccccttggcctctcaatcacccaggctgacaaatatctctcctaaatatcccttatctgcttctttgttgtcacaaccattacgctggctacaccaccactctcctgcatagctccaatagtcattttctacattgtagacagagctctttctgaagagtaaattggatcacatcaccaacctgcttagcactgtttaataacttccatagtctttatttacaagacagaggtaaagaggtctccttttacctttacagccttatctctgagccactgtaatcttacttcagttcttttaatatgtttcaggtggccaggcgcagtggctcacgcttgtaatcccagcactttggaagatggagacgggcagattacctgaggtcaggagttcaagaccagcctggtcaacatggcaaaaccccgtctctactaaaaatgcaaaaattagccagatgtggtggtgctcacctgtagtccaagctactcaggaggctgacacagaagaattgcttgaacccgggaggcggaagtttcagtgagccgagatcgcgccactgcatgcactccagcctgggcaacagagcaagactccgtctcaaaaataaataaataaataaataaataaataaataaaatgtttcaggttctctcttgtctccaaaccattgctaatgctatttccatgtctgatgttccaaggaaaatattatttcctctagaaagcccgactgcctctcagatttgttaggtgctttcctactgcaccctgtcagagcacaaaatggtaatcgcagtttgtctgtcccccttattagtctttaagcgaattagactttaaattctaaaagcagctatcagatctgtcttggtcctcattgtattcctaggaccttgctgtagagtgggtgctaataaatatttttgttaagtgaatgaatgtatgtatgaattgctttggctctaactggaatttgtctataccatggatcgtggatgctttgtctatggcttataatatcaattgttccattttgacttatttcattcctagaaaatttgtcctatgctttgttatttataatcacattaatgatttatttcagaatatactgtaatataaaaaatgatgcatgctaaataaaatctggcaggtttttttttttccccaccattaggaaggaaatggaggtgtaaatacatttaaaattcaccatggggtgatggaatgcacgacttttgggcaaccttaaaactgtcctttcaattttaaatccacacaccaacagaggggataattttaagtctctctttgttgagagcttcaggggagagtgtgtagagtggattttttctgattcaaaatgaagagatacatgaaaactaccaaagtcaaggcacttcatagagaaaagtatgatgctttcattgctgaagagacccaactaaagtctaatgcagaggatgagaaagaaagagggcttgtcatattcttcagccagcacaaccttcccttcatgtttacatcaacagcagtggtgcctcccggtctgatgtttacataaagctgagagtcaactggataccctggctccatgctggcccaaggcagagctgaccacagcaggtaacaggcacctggacggggctccccatgggccatcaggggttctcatcagcttctcttagccggcagattttgaacagtgggtatgttccaaatgtgtcagggcatatttttcaaacatcactgcagattcattcgttatgtcttgcctttttttagaccttgacaataaagggacagttttaaccaaggaagggaaagagaagctcgtgcacactgatattttatgacatgctaggatccacagtgagattaacctatttctttgagatctttggggtcctattttctctgactcctcattattttcctttccaagacagcaattacatcttcaaaggaggaagattcacaccacactttcatgtttatgtgctctgaattcctatgtatttcaaagtgtataccttaaggtaaactttgaaaaaacacaggccactgtattctgctccagttgtgtgtgtgtgtgtgtgtgtgtgtgtgtgtgtgtgtgtgtctcaacttagaatatgcacacctcaagcacaagaatcttctctttgctttattattctccacaggaaatacttgatactaaaattttcacatgcacataaaaaagacaaagatctgtaacatattttgtgcatgtttagtgaagcctgcacttaccctaggaagacatttagaggaacagaatttagagaattaaaatggactttttcgtatttcattatttcccatgtagtagcaagtaatgtattacattcttagggcttctgtaaaaaatcaccataaacttggtggcttaaaacaatagaaatttattctctcactgttctggagaccagaagtccaaaatcagttacacggggccaaaatcaagatgtctgcagggacacattccttccagatgctctcagagagaacctgttcccagcttctcccagcttctggtggctgccaacgtgtcttggcttgtggccccatcactccaatgtctgcctctgtggtcacattgcttttttctctgctgtctgtgtcaagtctccctgctgcctctctctcataaagacttgtaattgcatttggtacctgtctgaataatccatggtaatcttcccatctgaaactcttaaccttaatcatatctacaaacaatattttaccatctaaggtaacagtcacaggttccaggtattaagagatggacatccatttaaggactatattcagcctaccacaggtggtgaaggcattgtcttaataaaaacaaatttcctctggggtgcaagcaagccaagggaaacagaagataagaagtacaagctgtgatagaaagaactgccctcaataaaaatttcatgctgaccctgtaattcagaaatcaatgcaaaaataagctcctgactctggaagaggattgtgtttcaaaattttgtgagtcggttgtttaaagttgggatcttacatcacttttctatagaaataataatacttaagacaattttgattctagtgagccactaaagctaattagacataactgaggtatagaaatagtttacttttgtcttctaagaatctattctatggaaataatcagaatgcaaaaactcaaaatgtgttgtgaagatgtttttagccacattatgtaccatagcataaaaaaagatagaagggagaacttaaatatgcaacaacatggaaaggtttatgcaaattatagaatatccacatgatggaatgttatgcaaccatattaagttgaggtaaaattgttaaagacatgagaaaatgtgcatacaacactgaagtgaaatattgacaatattttttgctcgtgaatctgtgatttggacagagctcagtagggacagcttttctcttctccacttggcatcaactacagcagctcagaggctggaatcatctgaaggctcactcactcatatgtccagcaatggataccgctgtcagaacacctacacctaggctttcaatgtgaccttgccttcctcacaacacagtggctgggttccaagaatcgtgtcccaagaatgaaagccagacagaaccgtatcacctttcatgacctgaccattaaagccaggtaatgccacttttgtcaccttgcattcaccaaggcagtcccaaggcctggccagttctagatggaggtaaaatatgaccccaccccttatacagaggcaaggttctgacactagaaatattgtctggtcatttttggaaaatagagcctctcacacaacgacacaagctatatacaaagcataattctgataatgttaaacacaaaatcgtaattactaaacacataactaaacacataaacacattagaaggaagtagtaatattttatataaatataaataactaattttctttctatcttggtggtagaactatgggtcatttttattctccatgtgctttttggaattcattataaattttagcatcaaatatatttgctgtgagtgaaaatacaaactgacttattagaacagagagcatgtgaacagcacttaatacatcacccttatatgtaatatattatgtaatcctggcaataatctggtgggcaaaggagacaaaactcattttcaggccaagaatctgagactcagacaagcttactgctagtttgtggtggatctggacctcgaataccaggcttttgactccaaagtcttgtttcctagtgtattctcgttccatggtttctcctttaaatggattggaaattgcagctaatgtgtgtcatcctccaggcgagaatctctctgccatcttcatgctcttcattgccatagtcataaatgatccctcttccctctccatagcatcttttttgtcctagaggtaggtcttgggaaagggagaatgaaaaccttggagaagcttctgaaaaggttcaggaaaaagagaatggggaaaggcagaagtttgagatgagggcttgggagaattctcttgcagtgagaaacataagcaggagtataggggcaattttggcttctgttgaaagagggctgaaatagcacagggagggattgaagcatgccttgatccttgactacactgatgctgagataagatagatgagaaaaaagagagcagggacaactttcagaaggatggtcgtttctataaggaagaggagaagtttcataggatagagcagtaaaggagtgattttccagttctaggagctgttcataaagaaatgaaggattttcataatgtgagtgctggtaaatcagaaattgccactaaatctggggggaaaaaaggctatttagcttaagaattcaatggaaattaaatgaattgaaacaaccccaaatttttttttgagttgaactttgctttagaatatatttaggtttaagtggaatatctcatttttttaaaaggaagaacttagtcatataaacaaactgaaataataaaatcagtaaatgtgtatgggtatacagttatctgatactataagcaagcatccttctgttgctatacagatcctagatgaaagaactcatcctcattcattttgagtcctacggagtcagcagtaccaaactccatcaatcccttattagacctcatcatcttccttccagtatgcagatagagcttattttacaaactaagcctttttcttgagattggtaaatattgtttgagcccttaagcccttaattttcgcatctagcctattgtccatagtctgaagagggaaagcaaacattaagatataatcaaatttaattttgtgatcaaaagatcagtgttctatgctccagaaaatcaagtataaaaggaagacatttaatgaatgctcaccaacgtttctgattcttcttctcctaggcctattatgtaattacatttccatcccctttaggttgaggagaccagtactttgattagtgcaatgcaaggagaagtgtttggtcctttaacagttagggctccattcaccacattctttcccctctgccatgataaccagtgacatttacagatagtggaggcttcatcaccctcggcaccagagagaggatgaggtggaacagtgtcccctgccaacccaggatgggcaggtatcaaaaaaattaaataaacttttttggttctccgtcacggagagtttagacttgtgtgatactgccacacagtctttcactggattcatacattcggtgaaactggtgggcttagaaatgatggttaaacatttcttgagcatcagaggggcaggaaatttaaattactagaaggtaagcttccagcctctgaacatgtatcaaaaacaagtgaaggaaaacttatctccacacaaaaccctgaacactagtagcagcttcataaataattgtaaaattttggaagcaaccgaggcatcttttaataagctaatggataatcaaactgtgttacatcccatacaatggaatattattcggtaataaaaagaagtgagatattaagccacaaaaagacaggaagaaaccttaaatgcacattactaagtggatgcgtcactctgaaaaggcgacacactgtatgatttcaactacgtgacagtattgtaaagggcaaaactggtggcagtaatcagccattgtcaagggcttatcgtagagatgaaggtagggatgggtgaatcacaggggagttttagggcagtgaaactattctattgccaaaacccatagaacgtataacacaaagagtgaagcccaatgtaaactatggacattagttaataacaaggtatcaatactggttcatcagttgtaataggtatatcatattaatcaagatgttaatttaagggaaaccaggggagttggaagagggggtatctggaaaaatctttgcactttctgtttagcttttctgtaaacctaaaactgctcaaaaattcagctagaaaagcaaataaaggatattttaacttaacaaaataccaaagatccatttacgtgattacaaagtgaagaggtaagtggtggcaggttgttgaattgagggttggtctggtgggcttaattgtggaatacttcgacgcacacaaagggtcatacatttggatattatccagaagaggacataaaaaaaatgaatgagcttcttggagagaagagcataaaagactaaggtaaactgtggtaagaaagaatagtcttgagaagtaattgtaagtgattttgtcctcatgaccagaaatatgccatcctatggacagaaataatactgcatcaaaacactgcttaagcaagttaccctgcaggaatgttaattccagtatacatttatttggtaatcagagataagtaggagagattcacttttgtaatggcaaagccgatctttccaaaatgcctcacagtggaaaggaggtttgcagtgtgtgaggaaccctgctaacgcccactcaagtgcaacaatataactggtaaaaattatttaaaaagacaaaaacaaaaaaacaggccaggcacggtggctcatgcctgtaatcccagcactttgggaggccaaaaccggcagatcacttgaggccaggagttcaagaccagcctggccaacatagggaaaccccacctctattaaaattcaaaaattagccaggtgtggtggcgcacgcctgtaatcccagctacttgggaggctgaagcatgagaatcacttaaacctgggaggcagaggctgcagtgagctaagatcttgctactacactccagcctgggcgacagagttagactctgtctgaaaaaaattaaacgaaacaaaacaaaaccaaaccgtctgttttgctaacgtgatatggcatacgaagaaacagtaataaagaaaatttcttaaatctagataagaaaaatgagagtccatggcactagagccatggcctgctcctactctccctcacagtttaatgtgatgaagctccactcaagttgggtgtggccaggaagatgaggttctccctcctcagcctctagttaaggatgacggtatctctttgggattggcaggaatttctcatccctgtgaagctccatgttacaggggctaaattccaggcaaatttctttggaaatcaggggctgtcttcctctacccacccccgccttctcttgcctccactctaggtgtgccaggccaagaatacttgagtgtcattgccttcacctctgctcactcataggatagaggttccccactggaaaaacaagctgaaaagaccagaggcaactgtctctacccagctccctgcttccaaagcaggggtgtcactctgcgagaagtaggccactatctctgtccccagatctcaagcagtggctgagaaattttgcctaggggatgtggcaggccataagaacaaaagggcatattcttttttctaattgctaaggcaatttgggtacctaggcatgatgtttgatggtatatttcttaggttgctatttggtttggtttagaggggggagaacgtggttgataaggcctcttatctctctgtagtccacagtttcaaatcccaattctaccagtttacaaccttacccaagggggaaagatgctgagaaaaacaaattttattttaaatatgcagactcacaagaaacttcctgtcttccatgagagtaaaaaagtacgactatcctctatatagttaggttagaagtcttcttggtttcctcaagctagaaaggagcttataggaagagaacagcatagggaagatccccctttccttagcaaagctagggacattgtaattcgaacttctctgtcctcctgctaaatacatctagctgtctccatggtccttgtaagtccatagatacccacctgaaaatgccccctttatttgagaaatacagtcttgaagcatggcctcatattggacagagatcataatgagtcctctttctcagtatttcttggtgagggaagagggactattccatccccactgtaaacagatctcctcatcctggatatgctctatatttacattgttcagagccatctggaatgatctagaatataacaagagtgatatcaacccagaccttactttctctctttggggtggggtggggataggaaatgaggtttttgaggagggcaaataaaatgcaatagttaaaaaataaaatgttgattacattaatttctggcatcagaataaaaggaaatcataactatcagcacagctccccagctactcgggaggctgaggtaggagaagtgcttgaacccaggaggcggaggttgcagggagctgagatggcaccactgcactccagactgggggacaaagcaagactctgtctaaaaaacaaaaacaaaaacaaaaacaaaaaatgtatgtactaggcactcactgaatgtaagattaagaagatgcactttcttgccttcagaaggaatacaaagttacaaagtatgttgttaaccattgtaataagtgcaataagcatttggtatttcaaagggctgagaaacacactctgtccgacaatagtgaattagggagggagggcttctttgaggaagtaaatgtgttaggtttgaaagatgaacaggagtttaccaggttcccaatgagcaaaggaaggaagtattttaggcagagaatgttacatgactgaagtcactgatgccaagaaagcaggagcactcaggaaatagtgatacaaagttgatataagagataagcttttgttttcacatcaatttaatacacttttattaagcacccaccgaatcaccaaaaacctggtggtttggtcttcatagataagttgccaccctcaaagccctctactgaaggcgcactcatgctacgtgccaagttcataagtgacactggtttcttgcatttccataccgccacggacccggatttccttggggatctgaaatagcctaatgctaattccagcttctatgctggtgagggtattatcagcaaggaattagttgaaccatactcagcaggagagtatattctctgctatgattgattctggatagttcagaagaatgcaatcctatgaaacatgatatattcattggctaattttcaggacagaccatgaattctgatcccaggctcaccgcagtactatcgtcagcttccctgataaaagcaaagcttctgagatgctcttgctattgtttggaggaaggtatggttcagcaggtaattaggtttttattggcaaaatctgcaaagttcccattctcgttttaagaaccagtttctcttatcaggactttcctagtagagatcatatttctgcaggagatttgagaaggcagaagggagaatgtctgacctggcccagatagatcatgagccctaggctagaggtgactagggaggctgggacttgcctcagggacgtggttgcgcccctacattatacattacttagtttccttccagacagggaggggagcctttcatttttttgtttgagatcacctttcattcattctctcatttggcatacatttgttgagtaactgctatgtatcaagatatgaaccaggtggctcatgcctgtaattctagcactttgggaggctgaggtgggcagatcacttgaggtcagagacgggcatggtggtgcacgcctgtaatcccagctactggaggggctgaggcaggagacgggcttgaacccgggaggcggaagttgcagtgagccaagatcgcaccactgcactccagcctaggggacagagcaagtctctttctcaaaaagaaaaaaaaaaaaaaagagatatatactgggcactcactgaatgtaagattaagaagatacactttattgtctttaaaaggaatgcaaagttacaaagtatgttgttaaccattgtaataagtgcaataagcatttggtattgcaaagggctgagaaacacactccgtcctacaatagtgaattagggagggagggcttctttgaggaagtaaatgtgttaaagttttaaagatgaatagtttactaggttcagaatgagcaaaggaaggaggtattttaggcagagaatgttacgtgactgaaggcactgatgccaagaaagcaggagcactcaggaaatagtgagttcttatttgggaatgtttgaatatggaatgattggtgatgatgcacagaatgctgttagagggtaggagaacgagttgaaaaggtgaaaatgcaggcagagccagaagtctaaggagcttggaggacacagaattaaccccatgggctcacactggacactagtagttgtatcacttttgttcggctaacacatggatttttcttgttttaaaaatatttgaactagaataactttacctcctccatttaaggtagagccaccccttcctacagtattccaccagaagccttacattctttactactcccccaggcccctaaagacaagtgagtgtgcaatttcatgagcaataaaaagtcaccagaggattttaggcagatttaacagatttgtattttagaatgattgctctagcaatagtggctattatcacaactgggaaggggaagcaggcccaagtagatgctagagcaataactgaggtgagacatgataacgctctgggttaaggcaaaagatatgggttgtaagctacagattaggaaagtcttcaaaaagtggctagcgtaagaagaatctgctgaggaccaacatttttagaaataagcaaattcccaacaaagggatagaagaacaaactggggagaatggctgtatactgaattcaagattggggcatgttgaaatttagctaataggttgacaagctggatattcatgagtggtaggaaacagaagacaactagacaattagaaggaacttggaatacagtatgaggtgcttgaagacatagggatggctgtttctgctcaagatgtaatgaaggaagagacagctgtaaggcagaatatcggcagttatgggaaaataaatctgttatgagaccagatgaaattagcattaagaagagaactaggagacactgggttgtgaaaaccaaagagaaaaatgggtcaatggcttgcccaggccagaaatgcaagtagaaggagttgctgcttctgactcaggcctgcctgttttctgagtgatttttgattgctacactcttggtatatatcatctataatagtcaaagtaggccagaacttcacccttaagcatctcagtctccccagaacaggcctttccagagtgaactacaagcaggaaatctccccttcagagggctgtctattctttggcaggtagacctgactttagtagtaaaggcacaaaattctctgggatgcaagcaattccaaagggatctaaaagaccatccctgctgcttactttggaaagattatcatgattatctttattagcacagaactatgtaaagtgaggtagattttattatggaggtgaaagtgtgggtaggagcaggtaatcatgcttgagcccactaagccctaaattcatctaccctctctctggtcagactatccccagagtttagccatgtgtaagtccccattcttgactccacttaggagataaaaatctctttgtggatgttgttgggggtggggaatggaagcttcccccctgccccgacattgttgtcaactgtccttagaaaagcagaaaagagcaaagagctctatggacaaaagcccagatttttatggacacagggaaaggccactgcagctttaaagaaacactttctctgttgaagtggggtcggaaatgtaatggaagtaggtagcaaactcaaaggtatggtcttgtgagaaaaagtatttatttgttataggaaagcaatcagggaaaagggagagaaaggccttcgctagagatctaaagcttattgatcagtgtgtgttacagcattgaacccactggtattattcccatactttagtctctcccacagactggattgagcccgtttttatccacattaggctatcagcactctaagtgcttttctaatggacatttcccccccaaaagtaaggtaattgaaaggagaaagccatgatttagaagttgcggaagtggcgaaggtttgtattacaactttggtttttgaaagtgactacaaaattatgaaggggagagaaacaggatctctcccagtttacctaagcatttctatatactcaaagacaccactgtgaatcaaacaagaacataagaaaactcagaagacatgggcagagaagcaaaatggccaggtacgatgtaaaatgtaatgaggctagctagcacatccaacctggtgctaaaagtcttttaaggacttgaagctagcttgtggaaagatcagctattaatgtttgccagaggcaacccttaggcctttagagaaaattgtagttttccaatgataagaaaattaccccatggttctattcttgaattattttatcaattagctaagggaaaatacaatctcagacaatgcactgtacctgcactgcggctctattgtgtggcatcgttcacatagctttccaaaaatgtgggctatgacaactataaaacgttaggtcattttcttttccagatgtgatctcagaggtgaatgtttctcagctgaagtgaggaaaatgaatattccaaaaggattgcagcttttcttaaggtttggaacacataccaatgaagtttggtaaaggcaacagagggaaagcaggtggttgtctaggactttgtgtcaacataaaggctgtaagaagacttttgaatgtctcaaaaattctcttctgactgcaaaggtatactatttcaaaatttggtttactgattaaaaggtttatatgcgtacttttagacactcataagaggacatcaaaagtgcaacagcacctccccaggactggaatttatgggactctatttcctattattcggcctccaactcaagtacataaattttggcttttagagtgagagtctttaacttatttatgaagatggaatctgaaaaatgttgtagatattgttgtgccagccacttatagagaattggagtattaaatgatgctaaatgatgccaaaagcttcctctaccaacccttataaggtgaggtagtattagatacaagttttatggaataaacaaaaaaattaccagtatgcttaataatgaacatttaaaacctgtttcctacagccaaacaggtcatagttgagtgataccagtggtaggaaaataaatttcaaaattacttttgttgatgattttccacactaacaagcttgaaatagaaccttatatagtatgtgattttaatctgaattgatttttaaagaccctccatattaaagtcacaggcactattttataatcaagaatagctaactggtgcttctcttcataaaaatccctcctgggcaattcactacttgatgcacttgtcagggtttttcaccatgtaaataaaagaagacatggttgtgcatctctcattctgttattatacaaatagcaagatgcaatttttcaacattttaataatgtagaacagcaggaagtatttttattacttgaacatttttagacatttataaacctattaagagagaagctgcatggattacaatagacctatctgggtcccaggaaacagaattcctctttgggaaaatgtctttctcataaattatcattatttgtaaaaataaaaattcctaagctgttaagtttacctgggtacaaagtttttttttttttcttggaatccactggtctctaatacttattgagtatgtatgttgcttatcaattactcattacctatacacatacagcatatatttaaacatgtaaacacgtgtatatacatacacattcatttttggaaaattattaaactcctttttcttttatttaaaataaaccacacccattaaaaactggataaaagccttctgataaagtcttatcctaaaatgaagtgtgtatgtatatacatatagtcaacattaattttgaatactgcacaaactattttctagtttaaaaatttacagtgatcaactagttacacactgaatcatgggagaaaggccataggctgattgtcactttgagttatgccttaattaccctgtttctagtgcactaacttgccagccaccttcttttttgtcccctttatttttctaagaagggcaaaacatccttgaagatcactgttatattcatagcaatgtgttttacgtttatggaaaacctaaaaaccagagaaagcccacaaaataacagtcatttcaaaccagagacaatgcattttttctcatttattcaaattcactgcaggaagtaaacactaaaagattaaaaaacaaaacaaaaaaattcacactgcagtatgtacagtttcatgacatcacatgaagaaattaaatttctaataaaaatggcaaattatattactgagcagatcgcatcaaatttggttgtgtaaacaccagaattcttactatgaatggtaatgtgcctatattccagtattgctaatactgggatactcttggaataatgtttgcaatgggattaaaaaattcatgaaagtagttgtgtgaattctttatgtttaaaagtggttgacgattaaaaaaattctttaagacccttcgaatcaaagcacattctttcacaaagcttaaaccacagacgtcatgtccagaaatggaatactgtcatgttaggatgaacatctgatctgatttgttaagacattttgccaaatgcacagatgcacagggtcccccatgcacttttcatgcagcaggtaatcacaacttaaataaaaggtttattctatacatttgtccagacttgcaactgtatacatacatgcacaacttttaaacctgtctgattatatttacacttatacatggaatatacaggaaccaaagagattaaaaggcttttctgttgcattagaacaatacaaaatatgtatttttcattaaggaaatcactatttacatcacctttaaaaaccgattttaacatcttcatgtaacaagtcaatatatatatatatacatattatatatatatatatatatatatatataaaatatatactctcaccagtttactcttctgtaagatgcagcagagaataaacaggtaatgaatgctaccttactgatgtcaataagctgtagtaccctttcacaaatgactttattagaagaaattgtctagatatctaaaatagtccttgaaaatgtgtatatgtgcatccttgtatctacatatgcataaacaaagtgaatctgtggatgtatgccctttctcactgttctttaaaatcaccctaaattcaaattgggaacattctctagtaaatcagaacagcattcttcgtggtcatgtttatttaagtattacatattctcattcctttgttaacaacaacgaaaacaaccagccaaccaaaaaaacaaaacaaaacccacacacacacacacaaaagtagcaatgctggcccttggtcttttccctgacctaaatttcactctcttgtaaaaaggtcatttccccctacccaagggagaataccaacatattttttctgacatacctctaaggctccaaaccttccacaacgatcaagaaaaatgacttgtttaaaagcttatttatatagtgttgacaataagattgtcatagtatggacatggaatagaatatattcaactggccagtggaattttatgtcagaataagcctatgccttcacttctccatgatgttgcataatacccactcctattactgtataatatttccagtagctatttacaaatcattctgaggaaaaataaccatttagggttttagatcatattaggaaatcacacctatttttaatataaaaatcttagaaaccacttcaagtagaacaattttaaatcaatatcctaactagtagtgattatagaataatttttgataggtcatttgctaacctggttcacaattaagaacaaaatatctggtgaatgaattgtggattgtacaaactgaacataaaaacagacctgtttcgcaactgaaaccccatgtggcttcactaatatattaatttcttctaagacagtatcaacatgtacttttcatcactactttaaagtaaaagatccaatggagtgattgtgtacaattctgtcacgtatatgtgccctttgtactttttatttagtcaatctgagtttagtgcccttcttgggtttaaactaaatgttgtaagctttgttggcattgttcttaggacaatggttttaataaaggttaaggatgcattcaggagaagtttccaaaccatcctggaatcacctgagtttggtaagtggccctgtttttccatccctaaggctaactaagtagatgttactcattagaacacacaaataatcacagattttcctgagatgttgagccagatatgaaagttatcccctccacccaatttttgtcataaaaagtgttctgaacccgatttccaaagacataacggtaatatatgaactacaatattgcaaattttgagctgatgtgtgactgtattggggaaaatagaggcatcacatagttttttgtttttgttttacagtctcatgttctgaggaaagtcataagtcatggttctcaaacacaagaaacacctagagagcatgttaagatgcagatggaagattccaggtccacttagcagagattcttgttctgtagatctgagatgctgcctatgaatctgcattttaaaacaagtgctccagatggttctaatgcaagtggtctgagttcaggtttaaggaatcctggtcataacactcgcaggtaccacaggaatggtgagaattaacttttacaagagatggtgaaaactgtccaaagaaaagccattttgcttctgttaaaaacaatttcttaaatattcaacttttcaggaaaccacctaaagataaatgttaacttttctaattctgtaaaaggaggagtattaatttagtaaagtagttaaaatacaaaaaatggaaatctgccttttttttaaaggatctatcaaacttccctcaattgtaatcaatttttactaagtagcacaaggtttaaagaaatatatattgaaaaggatcagggtgggacagacacattgggaaccacaaaacctcttccaagagttaaaaataaacaccttttttttttctttttagcaaaagtgaaaaatgtaagcatatatttttctaatttatttttgaattggataataagctgtgaatcagcactaggtttttttttattggataattatcctttaaagagttgtttaacagtttagactttaaaaatgtgttatgtaggctgacttctgaaaagcaaaataaagtaccctaataaaggcagcaaaatgcattaatccactatgaatggagttttacattttaatttatgcctaatatttataaaagaatttcattcataggctactcacagttgttatctgatgcatacagaagtgttaaacaaccaattgctagttcagtagtttcctcatgacatctaatgttaagcaaaaattagtatgcatatttcaacatcaccagtaaccaatacttttcaaaatgaaaaaagtttcaattataccatgctttttttcaaatcatgctcttatttatacagatctcaagttcatactcattagttttaaaaagatccaaaactggatggcaggtacattttattctgattctttctttatcgttagcacgcttcccagaagtccataaacttctccatttgcgctgtgtgggcgagaagcattatttcccatatggctattgtaagggcttcttaaattaaagaaagaagctttcgtttctgcagtaggaagtaactcttctttggctgtgacctgtgagacactttcagcagatgaagcctccctccaaatgtccttgtcttgtgtttctcgactggtaacagaattgcctcctttttgaagcatgtaatatagtattgggttggttttggtcaatcttggagagtctttttcatactcattcttctccgcatcagtgataacccacttaatgggtcctttctcactgggcatggaacacccattcaaaagcccagattctggtctagaccctgcacagcccaagtgctcagggaaagtaggactcacaggagtttttactacacctgggtatgaaaatgtcctgttatccatgcaactgctgggctgagtggaactgtacatcagtccatttaaagaagaaatgctaaattcaggtttgctgttggtcacattatttttgtgtcctttctttttactgtcagccacagagttacttctgtgcggggacaaatctcgcacacagttttctgagagaagcagctgtttcagaacattaaagcttttgctctctctggcccaactcctgtgttcactttcgctggctgagccatgaccagcaggatatttaaattcaagatcatttctgctaaatttcagctcttcctggttaagcaaggacccatacagtacttctggggcactgtgattgtttgcagcatcaacaatgttgtttttcatctttttaaatggattttctaatggctcagtataaagcttccttttcttagggaccatgcaaagattctttgattctagaagtgccatttcattatttctgtgactcctgtctgaatcatctgccaggtaactatcttgattttgtcttagcaatcgacttagcagaccattcttggagaaagaaaaatcctgaggtgaaacaggctccgatttaaagtcttcggacactggtaaggcaggtgcgcttctctgcacagcaggagccatacccaagaatggggcactcttagcatcatggctcaagtgcacatttgtgttaggaatttgtaagtcatcacaaggctcagattttattttcaccatcagtatttgttcacttaaagctctctctgagtgttcctgagtactttcatctcttaagggagttttctcttttttttcactcttccctttgttggggttccccaggagcaactggaggacagtacgtctttcaagcagattttctatttcagaaccagaaagccctggttcaggacctgttggttgactactaaatgctttattttcttcaactgcatttgttttatttgagagcaaagggctatttaatctatcaatcatacctatcggtttatctgtgtttccagttaacagctgtttgctgggtctctgctcttccactgacatggatgactgcattccacattgtgctaaattttgtaacagcttactggcactaaacgttgcagagttctgtgcaccttcattttgggctggtttctctcctggtgggtctttgctttttgtaaggtccattgagtggttagatgcagtatttgttagcttttcagactgagtactgcagacatatggtggggaattccatttgatgaccagagagtgttgagagagattgatgggagaccctgctttgcttgatgtaagtaaaggtggagtgctcactggagtagtccgatttgtactggggctttctatcacagaagtccttgcataattttgtgtattgaacttgctcacatcattgtgtactccctgagggctggtgtttttttctacattttcttcattcttatggccaagtagcaattgaagaagtgttactttctggtgtgagtttagcttagaattctttgaggtatcttgatcttctttgatatctacatctgggacttttggatcccaagtgtttagcaaggattgagtgaagttatccagggaaacaggttggtcagattctgatttttcagttcggtgtttgcaagacaagtctatgggaacacagttggaataagaactttcatcaccactgctgtcatctgtaaaactaggattgttatctgaatattcatcaatagttgtaggtgtactactttcctcaaaaatgcttcctctctcactgtgactgtgtccattcattggcttaggtatagtctggcttttaagaagatgtaaaagcaaactattgttagcagcttgttttatattgtttctttccagtgagttcttataacctgcatttttaggggaagaaggaatgatacccattggattttgaaacactgtagcactacttttgctagccatcagtttgcttgatgatgttcttgcctgaccattaagatggcttgacattccttttgggagctggtaactgccaacatccttctggccattttcttgcaatctggccatagcagcaagtctttcacttgctgcttgatttgcattttgcgtttttaaagcgtgttctcgagaatactgctgcaaatgggcttcgcttgacagaagtaatgctaactggctacaagcaacactaggtttaggtgaggtggcaggactagcccttttttccaccatgcttgcaacagcctgtaatcttgcagcacatgacaacggttcactcatgacctttgttccactttgtccaacatgatgaggagactctgcaaacctatctctgatgaggtttttagtcacatcaggaagattcgtatcaggcttttgatctttaactttacttttcttcaacaaagtttttaagtgacttgatgcaacaccatagcaccttaaatccttctccacttttaaagaatcatgactgagggcatatccttgctccttgaggctctgcctgatttgttgtgacagagcaacagtctgcagcctagagctgaatgactgaagcaaagaggccagtaatgtgctatcctgtttgcctttaggcacactgtcaaccatgccagctagcaaagcttccttctttacgtttaaattcatgatagaatcagacagcctcttccgctttgctgcattccagtcctcagaagactgcaacagtctggcttttttgaggtgcagcatgccagacccctgatatgtatgtgtattgagaactggaccattactttgacaggtgggaaatgcactgccagaaatgttaaagttctgatcctcttcattatgcccagcagactttttgtcaacggcagtacctgatccccctgctgcctgatgcattagtaatccttctaggtaagttaaaacaatagaatcctggtgcacatcagagccaagctcttctccatgagtcatgttcaatagaagtgttcacaagggcttggtttctattcactttaaagaatggttttctgtggtgagtgcgatgtaactttaataaaggagtatcagtttatcaccttccatcgcaatcagagagagacgtactgttacattctgtccaagatttcttctggcaatgacaagataaatgcagtctgaccacagtgctgatcaacttctacgcaaggaggaggagaagaattccttaacacataggtctgtagcagtaagcagatagaatccttagtgaatatattccttttccttcttcatcttttgttccccattaaatgcaaatatcagtgttctaaaaaaaataaaaataagaatagttaaggaggcagaactagaatcacgttatgatacctacaagcaaaataatatagcatctgtaaatgtatatatatattacatataaataatagacatataaatggattatagtcactttagtaatttgttttattgccgttcctattcaattgaaaatgtctactggaaatcctgtgggttaatgcatactgttaaaatgatcaaatcattagagaagagaacatactttaatgttacatagccatcttccaaagccgccaagtctctgaattttcataagcacctttctgcaaagtaatgtgaatgttcagtctcctttatagctttatagctctacaggggaactagaacttgcttccttacattactgggcacttaggaagaaacaaaagtagatgtgcagaaaaaggaaaagagatgcagactctgatgagtctgatgtggggttgaggccaacagaacagattcatttctgacatcatcccccaaacaccagacattccataagtaatttttagaatttccgttttcaaaaaaatgaaaccactaacaagttgaagattattttgtgagtctgttcaaagtgtgaccatcttaatcatattcataaacattaaaatacagtcataaacttacctacccatactttttaccatgacttattaaagacagagaggagtgattctttagatgcttgttcagggctatcaagggtttaatgtagttcgttagtaaatccttactcatgtgctctatggagaagtcttaatgtcaggtccattccttacagatacagaagacagggagggcataaacatatataaaaagtacaatggagaatgccaaagacattttagtcacagtttgaaaaatattccaatgatatttattatctaagaagagaccaaaaaatttcctatcactaacacatacacaacagaagaagcaagaactcattgcatttctgaaaacttgataggtaagtgtcaaaattgacctaaggaaggggggccatgacacctttggaagagaagctggaataaattccatgcagtttgtttttcaagatgccagaacattttgtttaagttatcagacctgaagctatcaacaaataccttggtccctatggaatttaaaagataaattttaattgaaagactaccctgtagctttttaagtacaatgcttaactctaagtcaaactttaggaaataattatctgattgtatcaaattgttgaatttattgattaaaaggataagaaatgatagccaaagaaaaagatacagaaaggaggcagcaacaattaatttcaactgtgtaaggagtaggatgagaagagactttcttgagattccaatgccaccattttaagaagctttgccataatgtacttaagatggatattttaagaggttaataatgatatagaaatgaaatggttatcatgactgccaccaaatatccattctcccattttcatttactaataaaaccctgacttgtttttcagggagtagggaggtatcccagctaaacactacttttctcccccctctggttatattttacaattgatggcatgttgcttaattggaggcttatttttctttcttagtggtataaaacatacgggtacattttacaactgataacatcttggagttgaggaaacccagttttctaattctctcaaaaaacttaatatggccaggtacggtggctcacacctgtaatcccagcaatttaggaggccgaggtgggtggatcgcctgaggtcaggagtttgagaccaacctgaccaaaatggtgaaaccccatctctagtaaaaatacaaaaattagccgggtatggtggcatgcgcctgtagtcccagctactcaggaggctgaggcagaagaattgcttgaacctggtaggcagaggttgcagtgagccgagatcgtgccactgcactccagcctgggtgacagaatgacactctatctcaaaacaaacaaaacaaaaataacaactgctaatatacaattaattctcaactagttaagacatttaacaaccatttaatgggatatgcaagtccactgtatttctctccacaccactgccaacctttttgctcttgggtagactcaagaaagtcaaaatcataccagtcatttgaaaactggtttgtaaacagccataaaacatactttatttaagaataagaatgaaataaggagcatctttgagttcatattactcctgttattgctttctactttttactgtgcatgatataatttgcaaagtattattcattgctttaaaaagactgaatttacacatttctgaatttacaaagcagatttggaagttgatttaaaaaggaattatcacagtttccttgtaaaggagctctaacactgtattttaccatttatttacctctctaccatttatttcctatcttcacagagaaagtagatgacagatattaagaataatcatctcttaataatccattttttggcaatcagctttctcaggttgaaaatcatttcttacatatgaaaacaatttttaacttcaagaacgaaaatgacatatacaaataattttattaagctccttgggtctgaggactgtgctaattataattactacagtgcaacacagtcaacagataactgaaccttgggatacattaagttattcaatgaccaaattcccagtaggaaggaagggaatttgacattcaaacacacacattctctcactctcaaaaaatatatagatgagatactaaaataattcgaatcacaaatttgaaaccacacactgtagttcatcacttgaaggaatcacgaggagaaggtcattctaaatattcaattgtttatttcatttaaatcaatacaacatattcttactgaactcccaatctgcttcaagatctgtcttaggattggtgaattatgttcatttttaaaaagggatgtgatagacaacatctagagaaacaggcaaggtgaacatccacctttaagtttctagaacatctctaataataaaaatatcttctcctcatgctacttcttttcacattttcacatgactcttatatcaccaagcacaaaaaaattaaaaaatgtgatatgaaaaatcttccaaagattgttttaagatttttaaatgaaaactataaaacaaacatttttagttcagaaaatgtggttaccatagtatggataaaagtcactatgtgtatgcactaagctttcacactttcttctagagaagtggaccagtaacacatttagaatagatttaaaaggaagatgaataattgcttccaaaatattctaagtcaaggcagttatttttcattaatttctttgaaaaaaatcctataaaacgtaccaattacatgaagtagtggagaaaaaggattttcttatggagacctgttttttaaatgagataaatctgtaaatcaaagattgtggtcacgtggagaggctgcctcaggtgacacagcagcaacacctaccactgttctagcagaaaatgaagtgtctatcctaggaaagcaggaattcttacaccccttaaggcctgaacgcacttagctccttctattgaaagctcttcagggagcagagtgagccaaatttctttagatatcttccttttctatctcttaaactagagagggagaaatcactaacaatccttctcacctttcccaatccttgccttttcatttctatagtatagaatataattgagaaatatagcaaaaaaagaaaatgaggcacgatactaaatagtacagcttgttgggacctatggatttagggtattaaggtaaaatatgaccactacctaataaatagacgttttaaggttaaaatgttattttaagttattcaatattagcttaactcattttcttttagtgaaagacaaccacattattcatgaaattccaacatatagttctcttgcctggttttatataaatataacttaagaatgttgccaggtgtattcttgagtatatttagttaccaatacctaaaagtcaacacacatttaataattaggtttctttagagcagcagtccccaacctttttggcaccagagactggtttcatggaagataatttttgcatggagtagcggggtggagatggtttcaagatgaaactgttccacctcagatcatcaggcattagattcttataaacagtggggaacctagatccctcacatgtgcagtttacactagggttcgcacttctatgagaatctaatgctgccaccgatgtgacaggaggcggagctcaggcggtaatgcttgctggcccactgctcaccgcctgctgtgtggcccagttcctaacaggcttggcctgggggttgggaacccctgcttcagagaattgcaattaatgtatattttgaaactggaattgtttataaaatattgaatcctctggtttgttattttcttaattttgatggtgatttcattagagcttgtgcatgtgtctatttaaagttattaaacatttgcatcacagtaagggagagactttacttgtatggtatatacttgttaaataacttctaagtaaagaaaacagaacttttctagaatttggcttatggcggatgagaagaaccaaaggaagtaaaaatactaaagggacagaaaaagaaaaaaaaaagggaaaaatactaagaacaaataaaggcatcatgaattctgcaactctcatgaggtgccagaaggaaaaacttagtttacaaactaagtagattatattactagcctgcctttaaacattaggttggtagatatgacatgcaaagtgaagaaacatcttttatgaacactaaaaatgcatatatacaacgagaaaaaagtaaaacctacacaataatagaataaaagctaactcagtgatgtttgtttcaacttggctgtcatttttatagagtggttccataaaattttgaggaaaaaatggttaattttaacaaaaaatttagtataacattcaggataccaagaagtactaaattttgatttcagtattatcgtcttaagtgaaaatcagctcgcataattttttttttttttttgagacaagttctcattctgttgcccaggctggactgcagtggtgagatcacagctcactgcagcctcagcctcctggactcaagggattctcccacctcagtctcccaagcagccgggaatacaggtgtgtgccaccatgcagagctgattttttttttttttttttcctgtggagatggggatctcacaatgttgccaaggctcatcttgaactcttagcctcaagtggtcctcctgccttagcctctcaaagtgctgggattacaggcgtgaaccaccacacctggctcttttacaattttagttcattttaaccctcagtacaccaagaaaaacagtcatcatcatttatcatctgggtccaaaagacattttattaatatttaagttaattcatgaataatttacacaataagaataaagaaatgacacaaaacaacttcactgattttttttcataagaatttaaacataacattgtaattcaattcttcattccctgttttcctggttttgaaggagtatatatctgaaaaggacaaggcgctttgaaactgacagctcatcaacaggttcatggatgaacctggaaatatttataaatattgattccagatttcaggtatgtgtttaaaaggactcttgggtcttcttcttgtacttgaagaattcaaaatgtgttacttttgataattttaatagctcataatgatgttgaaaagatgacagaaatttctgcttcgtaattgcccaatatatttcatttttagactaacagcaattacaatgatcaatccaatgaattacttcatttctgtatcatctctttctttacaatctcctctatcaaacacctgccttaagtatctgtccacttacgaacagtgtcaaataaatttggtgttccaaaaatcataaaagatgaaagaatactgtcacacaccctttgaagaaaacagagccattgaagtttttgccacaaaacacttgagtgttgaataccgagcaatgcagtctttcctaatgaataactaactgtatgaaaatactatacttactttttgtcctgagaactgtatttttgaactatattgttactcattgctccctgtgtttgagaaaattcacctggctgggcgcagtggctcatgcctgtaacttcagcactttcagaggctgaggcaggatgaatgcttgagcccaggagttcgagaccagcctgggcaacatggcgagaccccatctttacaaaaacattaaaaaaaaaatagctgggtgtgatgttatcagcctgcagtttcagctacttgggaggctgaggtgggaggatcacctgagtctggggaagtcaaggctgcagtaagccatgatagcacctgtgcactttagcctgggtgacagagcaagaccctgtggaaagaaagaacaggaaggacgaatggatggaaggaaggaaacattcatctaggatgtatctgaagacaacagtcagtggtattgcttatataatcaatagcaccataatcattcacatgtaaagtattagcatcagtttttttccattcatcttctggtttatctaagtgaaatatcttcgtttgtcaactttcctctttgacattacagacagaaaaatactgaatcatcaatttttaataaaaacttaaaacaaaagggaaagactataaagacagtgtctccagatgttttatttttatttttttacattcttgaaagataatgtagtataatgggctctaagaaaactgaagatggggctgggtacggtggctagcctgtaatcctagcactttggaaggctgaggtgggaggatcactggagcccaggagtttgaggttacagtgagctatgactgagttactgtacaccgcattctagcctgcgtgacagaataagacactatttctttaaaaaaaaaaaaaaaaaaggaaggaaggaagggagagagagagagaaagaaagaaagggaggggaggggaggaatagaatgacggtaaaacagtgatgatttcagtattgcctcatccttctagacacttccgttatttttactttttattattttagccttttttttaaaggacagttgggaataaataataaattcattgccaaaatggtaaaatgccaaaatacttaaagatacagaaaaaataagatcactaagattccatatgtacttttgacttctaaaaggttccaatggacatatatagtaacagcaaggtactatgtttgagtctattaaggacacattcattaaaacttcaaaaatgtggtattatccttcctaccacttacaaatatattttttaaaaaagcatttgaaaactaaaactgagtccaaagaaccctgatagtataccaaaggttaatgtatttcatgataataaaattcatgtccaactacttaacaatgttaaaattataaacagaatcttccttttattaatttaaaattgtttataagcataaaaatcctttaaagtttataaagttaagattttactgatctacatcatgtggtggaaaaaatcattgtggtgaaaaagaattattttagaaagtaataaaatcaaactaaaccatgaaaaaattccatggaatcttcaccatatgcgtagattgatttggggaaagatctaagtttcaacacaaactagtttaatgaaatatctaataaaatgcttgaattacacagtatattttaaaaagagctacatttacttttttttataagtatctgaaaagtacagaactaagtgataggtaatttttttagagctttttaaataaaagacagtagtaaatactgtgcatactaacagttcacaaatgggtgctatattgattctctaaaatagctaaactattttcattgcaatatgttttacattttctgtttggaaatggtttattaaacaaagggaaactttgtggaacttctacacactttaaaatgataaaatccaagtgataaaattttacttagttaaatgaagaatgcatctggcagaattcttacatgtaggactatttttggttgagaatagagaaataatgacaacggtctttctccagctgtttttaaggattcagtatcttacttgcaattaaatactccattaaaaacacatttaaatgattaaacatctacgagttcacttggtatgccatttaaattatatctaaggactacctcatgacttccaattgtgtccatgagatctcccccaatttgttctgcaatatcaagtaatacctatttgagtactgaatttaaagggatttctacaatgcagctttgaccattaggacacttggctttgcctggttcctcaaaatgcgtaagtaatcaaagggctacttaattatgtcattcaagaataactcctaatggacaatattattatctatattccactgtggataatttcaggggtatttttatacaaatggtaagaaaaacattaatatgtttcattaaacattagaagaaaaatatctaagtacatactaagaagattccaaagtcctaattattgactcttttatttaaaaaaaatacagatccaggtattcggagaactctcgttgttctccaaagcagggctttgaaaggaagttttaaaagctgaatgagaaacactaagccaaaaacaatttaccaacaggatgtaactccaaacattttatccgaagggatgaaagtagctttccaaaccaagggccaatgaaaagttaaaatacgtaaaacccaacacttaatttcacataaaaagaaaggaaaagtaacattttaggtatgggtcccgaagtttcatttaagaagacaacagtgaatcctctattatcaattaaaaagtcactggaaaaaacatttaaaaaggaataaaagaaacattcaagtgttgacatttcacagcagggaataataagacaataaaagaatatgcctgaagtttcatttcttaaaatatatttctaattacttgaaaaaaatgaatcaaaattaatatatgtcttttaagggaatctgaattccaagataataactttctttgaagtattatctttatgaaaaggtagatgtgtggtcatacaatttaacagatgccaaaaataattatctaaatacattttgctcaactgagggcctcaacatttgaaatgagaactgaggagtttcttgctctctcccaggggttctcattttaggtgcagatactcctcagagacaggtggcatggacaccagagacaccggtgacgaaaacagctgcccaggctgctctccactgcaacctgaaggacttaattttttggcccaaggccaaatttgctcctaacttctaggtccattggctttaacttgctcgtcagctgcttccataggagtaaaatagtgtcattcacattcccaactaaaaaagactcattagagacactcctgcgggagtaactcaagcattcaacgcaaggacacatgtatatgaggacccctctaaatctaaaattttattcctatgattccaagtaatttgtcaaattatagctgatgaaaatgacaagcattttaacgagaaagatgatatgctgtcataaagttgtggaaatagccctgaccaatatgttttactgtcttttcaataaattccgggggaaggaaatggttttgaaatagccacacactcaacccacctaatgccccaaaaggtatctatgttcacaactttcttctgtagggtcacagaattgcaaacagatgtttatttaaaagctaaatatgagcttatattcaaattggaacttttgcttatctcataacagctatatactgaataaaatggaggataatcacaaagatttaagatctttgatgacacaaataaaagagacagatgaaataaccgttctggtgacagaaagaaacaccccataattgatacggcaaaataaagaagggcttctttgttttgaattctcctcagaaggcctaggtatatgaatcggattcaataaatttgctattcattttacactgcctctatagttaatcttaaaaacatttaatttttaaacaaaattaagatgaaaaagttggagattttaagttaaaaatcaaagatctagacaaaggagctagagaaagagctaaactgccaaacaatttctatttcaaaaacacaatacatttctggatgctgtacttcactctgtcttgaaaatactgacactggaaaattgttaaataaagttaattttacctacaatttttaaagctccagaaaactattacatgacagacagtacatacctatttatgattagtactaatgtctattcactaccttctactgttatcaaagaaacaatagtttttcttaatgaacacaaaataatcattaacaaattattttggcagcacataagtataagaaaagagtgtaaatacaaaattaacagagagtgtttgcttctcacctttctcaacagctctttggagtaactggtgctttctatcagttttcaagagcataatattttccaatctctatcaaaataagaaatgtaatggaaaatggatctttcttcttctggaattgcttgagtgtttatagtatatatgcagggatatcctttgagatgggagcatcaatcctactaaactcaactatggtttccccatccctaaaatagatttgacatacagacacaagcacaaggtcaaggtcacagatcagcaagaaagattaccaacagaactgatgtaaccagctggcttttgatcaaagctcctagggtttttagtacacttagacactctgcacttacccacatagtatatactctgttttaaaaatgttccccatctttgaagtcaagatcttcatgcacttcttattataaagtatgttttgttaaatatattgcattggatcaagaataagaggagaaaccagtatgtttgttttttttaatagcgacggggttttaccttcttggccaggcttgtcttgaactcctgacctcgtgatccacctgccttggcctcccaaagtgctgggattacaggtgtgagccactgcacccggccagaattgtgaatttttatgtgtttgtgtgcctgtatatatatatgcttgcacttttatttgtttgcttgttataactgatcattgccatgtgacaattttaaaattaacttaacttgcagttccctgaatagataatgctctctcataattccaagcttttgacccatctgaaactgaaattagtagtatgctctgcaatgccttgggtcacttgttcccaaaaacacagacttaacttgtaagtcactgcttcaacaaaagaagttttataatttatccatagtcttccacaacaattttcaaatcacagggatcaaaagaaactttagttatcaacaatgacaaaaacaaaaagtgattcttaaaggaatatattattaaatatattagtgcaggctagatgtggtggctcaacctgtaatcccagcactctgggaggctgaggcgggaggagttcaagaccagcctggccaacatggtgaaatcctgtctctactaaaaatacaaaaattaggtggacacagtggcatgagcctgtaatcccagctactcaggaggctgaggcacgagaatcgcttaaacctggaaggcggaggttgcagtgagccaagatcgcactattgcactccagctgggtgacagagcgagactccgtatcaaaataaaataaaataaaataaaaataaaataaatacatacatatatgcaattatctaacaaaatcatgccttttgttttagctgtttaaacaagatgttaaatttattttaagttacatttatgaaaccaagagttatgtgatcaatgttcttactgaagcattctggtcaagaaatcattttgaaggatgcataaagctgttggggtaaatttacactataaaagctttccttgctaaatcaagtaccacctgctgtagctttatacaatttgcaaactacttatgctatatgtacatgtaaatgttctcaattagtggtttttcatatttttgataaattaaatacctttgcatgaaaataacccaaaatttactatcctagaaagattgctagtttttcaaaaataaagtaaaaaagaaaaattatgtcaaattatcaaattaaatactattgaaatgacttatatgacatcactctagtcattacaggctccaaacacaaagatatctagatagaagtttccagtcaagctgtggaagagaaatatcactacagacacaattcatgagcacccagacatggtggtgatacctgtgaagagtcaataaatctgactaggtcccatcctacaggattaaggaatcaaaaccaaaaatactacatgcacaatgtacctgcagaaattctatgtctttaaattttcacaggtaacattaaagtatgtctgtcaacttggaaaatgaagctaccagcacaccatcagcaggccacttacttactttaaatggttttatttatttttattgaagaaactgcggtgcgtgctttaccctgatctcttatttgcccatctatccatacaaccaagtgtttgaagtactaatctcaggaacaatagccagtaaatgctaatctgagaaccagttctgctgttgtccaggtttagggcacgttctgcctgtgcagcagggacagtgacacatgctccttggcatggcacctgccactcatagtcagatacagacccaggttggggagactcaggaggctttagaggatgactccggtgtgctgaggagacagaggcagattagcggtctagggaatgtgggtcagggcttttgtgatttcaattgttggaccaaaaatgtttcagaacaacttttctcttaacaataaagaacattaaaaacaactacttacttcctactattagcatcatttaataaaattaaatcactttaacactgaaaactaaaatctttaatgaaaatctctcatcatttttctgttgctttttgtcttgagatagaatgatgtgtggaatagtacatatatactatattgatctcttcactatttagtagttcatttgatttttttttttttttttgagacagagtcttgctctgtcacccaggttggaatgcagcagcgccatctcagctcagcacaacctccgactccccaggatcaagcgatcctcctacctcagcatcctgagcagctgggaccacaggcacacaccaccatgcctgactaacttttgatttttgtagggacgggttttaccatattgcccagggtggtctcaagctcctgggctcaagagatcctcctgccttggcctcccaaagtgttgagattacaggcatgagccacgatgctcggtcctagttcattcaactcttaagttacttaaatctttacatcagaatttcccactgtttatattttgctttgtgttttggtctttcccttgatttcaattatcacatttatataaaatatataatttgttctatagaaattcttgtcattaaacaagaggttataaataagacagcaggggagaaacagggcagtaagaagaataaagaaccttctgcttagtgcccttccccccatatcatccttaccatcctcatcttttgaggaaaaatacatcagacttaaaaatgcatacagaatcctgtaataagccccatttgtttacagtcaagctaaacaactaggacatttctttcattctgtaagtctcagctgacaactcatcctctctttaggcagccttcactgaactccatagcctgagggtagttgttcctctctgtgactccacggcactcagtagatctttcaatcatcttgcttacaaaactgtacggtcacacgtcattttattgtgctttgcttcattgtactttgccattattgtggggtttttttttgttttttttttgttttttttttttacaatctaaggatttgtggcaattctgttgaggaagtctattggtaccacttttccaacagcatgtgcccactttgtagctctatgtctcatttaggtatttctcacaatatttcaagctttttcattattattctatctgctacggtgatgtgtgatctttggtgttactattataattgttttggggtgccatgaactgtgcccatatcacagcatacttaataaatatgtatgttctgattgctccaccacttagctgttcccatctctctccctctcctcagtcctttttattgcctgagacacaacaatattgaaattagatcaattaataaccctacaatggcctctgtgtgttttgcatgtctcacactttaaatcaaaagctagaaatgattaagcttagtgaggaaggatgttgaaagccaagacaggccaaaagctcagcctcttgcaccagttaaccaaattgcaaatacaaaaaaaaaaaacaattattgtaggaaattaaaaatgtcactccagtgaacacatgaatgataagaaaacaaaacaaccttattgctgacatacagaaagcttttgtggtctggatttaagatcaaaccagctattacattcccttaaaccaaagcctaatccagagcaaggccctaactctcttcaattctatgaagactgagagaggtgaggaagcggcagaggtggctcatacgatttaagggagaaaacaataaaactgcaaagggaagcagcaaatgctgacagaaaagctcagcaagaaaagccagaagatccagctgagtgagataaatgatgaaggtggttacactaaacaacagattttcaatagagacaaaacagccttaaattggaagaagattccatctagaaatttcatagctagagagaggtcaatatctggcttcaaagcttcaaaggaaagactgactctcttggtaaaggctgatgaagctggaacttgaggttgaagccaatgctcatataccattccaaaaatcctaaacccttaaaaatgacgataaatctactctgcctttgctacataaatggaacaacaaagcctggaggaaagcacatctgtttacaccatgatttgctgaatattttaagcccgctgttgggacctactggacaaaaacaaaaattcctttcaaaatattacaggccatgtacctgtacactaagagctctgctgcagttgtacaaggagattaatgttgtttttatgcctgctaacacaacatccattctgcagctcatggatcaaagagtaattttgacttcatatcttattggaaaaacacattttctaaggctttagctgtcatcaaaagtgattcctctgattggatctgggcagagtcaactgaaaagcttctgaaaaggattcaccattctagatgtcattaagaacattcatgattcatgaggggaggtcaaatatcaacatttgcaacttcatggatgactttgaggaattcaagacttcagtggaagaagcaactgcagatgtggtagaaaaagcaaaagaactagaagtgagcctaaagatgtgggtaaatttctgtaacctcataataaaacataaatgaatgaggagttgttgcgggtttttttttttttttcaactcctgagctcaagtgatcctcccacatcggcctcccaaagtgcagggattacaggcatgagccactacaccgagcctgaggagttgcttcttacacatgtgtaaagaaagcagtttcttgagatggaatctactctggtgaagagactgtgaacactgttgaaaaaacaacaaaggatttagaatattctgtaaatataaacttagtagataaagcagtaggaggtttgagaggattgactctttttgaaagaagttctcctgtgggtaaaatgctatcatcaaacagcaacacatgctacagagaaatattccatgaaaggatgtcagtcaacgtggcgaatttcattgttgtcttattttaagaaatcattacagagaccccaaccttcagcaacctccccctgattcttcggcagccatcaacatggaggcaaggcctctaccagaagaaagattatagttctctgaaggttcagaggatcattagtatttttttagctataaggtatttttaagttaaggtatgcacattatttttagacataatgctatggcacacttaacagactacagtatagtgtaaacgtaacttttatatggactgaaaaaccaaaaaatgtgcttgctttactgaggtattcatttcactgcagtgtctggaattgaacctgcaatatctctgaggtatgcttgtgttttggttcgttaaggcctggttccccatgagagtataaactccttatgggcaagaattatgtctttttcatctttacatcttagcacctagcagaggcagcattcctagtagaacatgctgtaaacagcaagtaaaccttttggagccttggtctgcaaaataaggagtgggctgtcataattctatggaaataggagaattaaaatgatatgacaatgttatttaaaatgatggtttcagatccaatatatctttttccctggaatataaattaataaaaaggcacaaaattaaagaataaaaaagtattttatcctacagagagttctgtgggtttagaaaacatgcgtgactaatattatggtagaaaacccacaagatttaagccagctatctatcatctatcatctggttttaaactcctgacctcaagtgatccacccgcctcggccccccaaagtgctggaattaccagtgtgagccaccatgcctggcaaagtattttaaaaatatacatatttttagagtattttaaagtttttgtaagatgatctttattttaccacttgtttatgaagaactgatcatactaatttggtttcttttagttgctgtttcccatgtcaaggttagtaagatctggtatggatttaggttatatcaagaatgagtatatgcttcaaaataccagttccatcaagcttttcatcatttttccttttcaaattacctcccctagataaagatgaaaacccagttaacattaaaatactactttgttacattttcttttgatggagatattaagaaatgaagtatcacatcaaaagatttagtctctaaaaccagacattcattctaaaaaataagttacaatgaaataggcaaagtaagcctttatgcaagaaaggctttttatttatttatttttttacagtatcaaccacaattaaactatttctctgtgcccattttaaaaatcaatcattgaagcagataataattatatgccaaagaatttgagccctttaaatgtgtgataaagattaaatcaaattggtcaaagctattcttggaatgatctttttaatttgaatctgtatttgttgaagagcttcaagtatgaatgttcaatgaatatggctaaataaaaacagtatcttaactaaagtgattaattatgaaaaaagtagtgaaattcccttttaaataactgaaacctgaaaaactaaaaaccaattcaacaacaacaaccattacccaaataagtcttgaatactgatgcaagacgactcacgtgtcattgccacggctttcaactttttaccatattagcatgttaccattagtagaaacataaaatcaagacaaatcactcctttgacctctttcaaagagtttcagatccactctcgccttatggcataatattaaactttaataacatttctcaggtctgagaaggctaaaaagtcatgtgggtccagaaaagatctcactttgctgtgaatgggtaagatttagaaacctagtgttctaaaatgcatagttaagacactcttttatttaggcaattgtttaggtatttgttttaaatatatgacacatcaaatcaaatttccttgtctataattagaaaacggagatttttggcatatattttattcatttgaactaacgacttaaactaaacttacaaacatcttatccttcataataccagattacacaaatttaaagaacttgtatccaattggaagggcagctaatttttatgaggtgaaatctattttcctctaataattttgccactggctactgttttcataatagcatggcatgtaaagtaattctccaaacatgacagaatcataatttaaaggttgggaggcagttgaaaagtcatctgcctaatcaatcatcctgtctgatgcttaatcccctttataacccatttgctatctctggatatctagcttatttctaaaaacctctagtgaccatgaactatcttccaaggtggtcttttggagacggatggctctgggttcaatttattccggctctaccatttaccaactctttgatcataggaaagttggctactcttgaaagtttatcattattaaacgtgcaaaagcactaatacctgtttcatagagcccctgggctgaacaaatgtggtaatgctcacatagcctagccacagagtcgctgctcagtaagagttccttgcgtaactccaacagtatgaaattctgccttgcactgagctataatctgttgagttttagtctgactattggtctttttggggacacaaaaaacaaggctaatccatcagttacctttcaaacattagaaacctgctgccaggttccactgaccaggtctgtcaccttgttaaggccaagataagatagtgaaaacccattgttgacaggggcttagcaaagggcaatcaaaggaagacaaatgttcctggggccagtctgtggtgggtgctgcagagatgcaattctttacaaattcttgactggccaaaacagtgtataaaacctcctgggagctcttgtcactgaccgttgattcctacaaagtgtattttacattttaaaagccctgctttatcacaggtgctttaagccatactcacccttcctcgaatgaaatactaggatagagttgtctttgattctcctcacggggttggttaatacattatttatcctcattcccatgttaccagggcactaaagctcagaacaactgagtggttggttaattatccagtaaatgcctgatccaaaaccacgtcaaggtcttctggaacacagtctttcctatcatattcaattgccacagactgtaacaaatgtggatttgaaaacttttcgtaaagcaaaatttatgcagcactctgagaattctggattacttttcccactctaaaatcttgtctctgccagtgtcagtctcttgcttttattaggaaggccacaaagcattgtggtgaaaagaacagtctctggattcctgactctgctattcagtagtgggtcactttggtggatttacttaactgttccgaggctcagttttttcagctgtaaaaggaataataatagtatttaccttataaaactgttgtattaaataaaaggtacatgtaaaacagtataatatctcacattttctaagcactcaatgaatgttaattgttttactattcacagacaaagcttcagcccagagaactttctcaaacaaaattttttttgacttactagtcaccctatataaagctccttgaggcttaggattgtcttttgtctttagatagatagatagatagatagatagatagatagacagacagatagatagataatatagatagatagtatatatatatgtgtgtgtgtgtgtgtgtatatatatatatatatcctgaaaaactaaagaaaaagcatttggatctgtaaaataatttaataatctaggtaattaattctttcactcataattttgtgtgacaggtttacttaaagcaaaaagtaatttcatatacaaaagatgcatataatttcttccttacctaaacctttttcttaagaacctatacccaaaccacagacctcaggagaatggaacaacactgggaacctaactaatggaccaatcatttcctctcttgacatctggaattcagagggagacagaaagcttcattttggagtggacttcatgaggccacatttcagattagtgcctagaggagtcagtattctgagagaaaagattgaagtaagcacacagagagaagcagagatgagggaggcaaaacgaggagaggagaggagaggagagggaagggacagcagggaggtgctgaatgaatggctttccagcttcaggaggggcaaagtactccgatcaccaggttcctgaagagttcgctgcatgcctctaacaagtcctcctgtacctgagctttgttgaggggcttctgttccctgtaatcacaccacccctaagatactgcagtaacattatgtaagacaaactgcacattttaatccatggtcctgaagaactctgcaaacgctcttttttctcacttttcctatggtgcctttacctcacgtatggtcaaagagcaacatgtggctctgaatttcaaatggggaaagctaacagcacaaagaggtaaataagatgtccaaggtcatacttacagtttgtaggggcggaaccaacaacagaatttcatatttcttattccgaggggcctgcactaaccaataaaccaactgcctcccttgatgaaactaaagtatgccaattatccaaactgtgtaggaaacgttgaccaaaacaggggttaattggacattggttgttttaattccataatcagctccttccctgagctaccctgggagtgaataacatatctttcacaggaatgggaaggaagccagcataggccatctggctgaacatgtcctttcctcaagttatccctgcagctgtgtgaaacttaactgatgttgaagaactttacagtttaatttgctttatcatgttccctctattccattaaaattaaaagtagacaaatctttatgttcatattagccaagcagtttccctgactccaaagtcatggaatatacatgaacatatatagtctatgtgtgtgtggaggtgaggaggaggggagcctgaaatttttggatatcaagaaacacgtttcatattcaaaaagaacaattcatttagactagggccactagaaaataaacaaaaacttgtcattttcacatgaaaatgaaactaaaatactggtcttattaatcatgaaaaaaaaagaaacatgaaagagaataggtagcttatttccttgcccattttccccacttctcctactttgtaaatttgtaaatatgacaataaatctagactattaagtggaagagtatttcctaatgaatactctagaatcagatgtgcatccgtcaagtgggttcagtcacgattctagcgccactagcctaagagctgctccagaaggtgagcatgtactctttccctctcaacaattctctcttcctgcctccctccacccctcctcttacatggtttattttcttcttttctccatcttttatttctcaagtttgaatgtatttctacctgtcttactcatgaacattgctggcattcagatactgatataatgccaccatattccttatgctgggaactgtgtactagggagggccggggtgggttacttttaagcaatgcaaatactaatgcccaagtttgggtcagactagggctgtccaagccctagatgatgagccttgagcaaggttgaagagacttgagtaaggatgagaattaatgaggcagtgtagagggaatgtcttttcccaatacaaaatttaggtactatgactattaactagaagaaggtaagagccagagggcaacagtaagaaacagccaagaggtaatgaaatcttaaaagagatgctggtgttcaagctatatgtgtgaacagacatggaaaatgaattcctaaagtgaaactctaatgcaaagactgggtggatggttatgttgaagttggccagcaaacaaagaccagatggttctccctcagagggctagatggcaaaatattagataaagggaccctgatacagctaacttctatcatttctagcatcatatgcctgtatttataataataaatggacatagcatctaataataagtagccatcacactgcctgcaaagttcattagtgaagttgagtgggaagaagggttaccctaggtcaggtaaggccagttgtacctaagggctctacgtgcttctcgtttcatttgctgctgtcaactattaggttgccgcatgtctctacttcttcttaaataaactctgatggctcctggtcctagattacagccctggcccaaaatgtcttgacaacaattgcctaaaggaaggagtcaggaacaacaattattccatggtgtgatggctaagaaaaagaggcaaaagattccactgctgtagttctaactacttctcacttactttctttgtgcgtatcatgtaacatgcctcttcttattaacaggacctgggctctgtgggactgctctgaatctgtccatgcaaaccaacttttggaactctggggctacgagataaaggagaagaaaaaatgttctaggtgttattttctctttgtgcctcactctattcatttaaaaaaagaaagctcaacaagatcctctttgagattctactgcattttcctgggcttcagttattttacctccttattttaaaggcctttttgagaatgttgttagttcagctaaacatgatgactctgcctttcttcctctgctctatcttgtaggactgatgttcctttcaggcagaagcatgcatttccactcctgacagaataagatgccttatttcacctcccctattacccacaaaaagggagacttgtaagtgtcactccagaatttttgccattgagttttagagaatatcatggccataaaaaggaaataaaattatttgcataaataatgtcaaattttcaaaaagtaaatggaataaaatactcttgtatagaaaggaagaaataaaaggaagcaaggtcactgttccattcattttccccacaatattattaacacccaggcatatgataaagatttgtcaaaagacttcctaatattaaattggaagatgactaaaaatgttgtctatttacatctgagatagcaagaaacctcatccagaattaaaaagctgcgttcctttcatcttttttttccttttcccctttctctgaccaacattttctcctctattctaaatattgtacacagcccaaaggaagtcagtcttgttttgttttgtatgctttcagacaggtctcactctgttgcccaggcctgagtgtggtggtgtgaccatgactcactgcagcctgaaactcctgggctcaagcaatcctcccacctcagcctccggaatagacggggactatagttgcgtgccaccatgcttggctaattttacatgtttgtttgtttgtttatagagacggggtttcgaaatgttgcccaggttggtctagaactcccggactcaagtgatcccccgaccaggcctcccaaagtgctgggattatcggtgtgagccaccaacccctgcagagtctacatctgaaataaaccacagaagcaaggatatcacttaaacaatgtaacttaccaattcagtctgagtgagttttgtagtttataacatattgatgaaaacagttaagtgtccacattccgtttacataagagaatgctattcaagcttttaaaataaaaaacttaaactattcccctcaccccccaaaaagtctaactataaagatgggtttgctacaaaataattagcaaaactgatttaccaagtaagatgtcctcccgctcactgccccccagaaatacgtatactgtaggaatactcctaggaagtgacacaagtgaaagaaagaatattctttcaatatgctaaaaacatctacagtgcactaaaaaaaagtccctaaatttggcaatacatttcttccaaaaatgttattcaataacataaacattatgaagtagaactggctgtcccatatgttcagaataaaagggttaagtggagtcctgcataactagcaaagtggaagaataaatggtaagattaagacatacacatacaaacattaaaatctaaatatcagaacaactaaataaaaatttaccttgcatctctacttttaactatataataaaaaatggtcattggatagctgatacttgtcaaatctcagcaaacttatgagagagaagggataaaaatggttaaaccttaaaatacctgttcaataatcagtttttaattatcaaaaaaatgttgacatgaaaggcacttctacaattgcaaagggaaaccttgtattttgcatggctatgtagttatacctttgtgttatcagtggtgagtctggagataaaagatgatcacacataaccaactaaaatcgagaccagtaatgaccaaaaaaaaaaaaaaatcagggctgagaagcttcctatacttgacttcataaactattttactgtattggttactcagaggactagataccactccaatccacaaattgtcaacctcaacaatttaaatgtacgagtcagattttccacagttcacttctgaaagatcttcatttatacaaatatcccttctatattcatatctaaaagataccatgagccttaaaaacagtaacactgagggtcaaccatttgctctgtaaccccagcttaaatgtgtctgagcctcagtttaacatgtataacaatgtatttaatggagcagttatgaaaattaaagatgacaacgtcagcctgggcaacacagcgagaccccatctctaaaaaaataaaaataaaaaaatagctgggtgtggtggcacgtgcctgttgtcccagcttcttgggaggctgacacggaaggatcgcttgatcccaggaagttgaggctgcagtgaggtgagatcatgccactgtgctccagcctgggcaacagagagagatatgtctcaaaaaaaaaaatgacagtgtatatacaacgtccaatccaacacaggaggtcctcaagaaatgttaattcacctttttccttctttgtattacttactactttgaaaatgtttttatactcaagtatcttgaacaattttcggtataatactcataccaagtatctggtatttccaattcctgacagattctgacatctacagttggatcatgtatttatatattttactatgccttggtactttcaatcatatgacactgcttagtcacaataagcgtattgattcctctatcctattgtttataaaaccatccattaaaggcaaattgcaagatttttttgggggtggggtgggggcgcagactgagtcttgctctatcgcccaggctggagtgcagtggtacgatctcagctcactgcaacctccgcctcccgagttcaagtgattctcatgcctcagactcttgagtagctgggattacaggggtgcaccaccatgcctggctaatttttgtatttttagtagagacgaggtttcgccatgttggccaggctggtctcgaacgcctgacctcaagtgatccgcctacctcagcctcccagaatgctgggattacatgcaaattgcaagatttttatgctatacagagagttttcttgagtgctatctaacttttttattattttcatttgactagagaaaataaaactattagcttactgaaaaggatcagccttctgagtgatatgacatggatcaactttaatttcactcaagaaacaattttttaaaaatagaaattttcattggaatttcaaatgaactttgctttttacagtgaaaaacattgttgtcaactgcaaacgatatacaacaggcattttgtgaagacatttcatttcaaagataccttaaaaaagtagacagcacactgaagctaagagaaccagccttaaagtcaggtggccaggctttgaatcttaggttcaggcagtaacttttctgagattctagggataatattaactatttaacagggctgtaaaaaaaatgaaagcacttaacattgtgtctgctatcctctaagtactcaacaagttcaagtattctagagcaaacaaattttatttttccctctgaagtaaaagcaaaaacctacactcacctgccttgtattttatcagtactacaaaataaatccaaaaccttttgccatcactcagtagtataagtaacaataaaaacccaaagggtaataattattccaatttcatacacattaaatgatggtattgcaaatacagcttctgatccaaataaaacaaatggaaaatgtaactcacattcatgcagacagacaaccacatacatactaaataaaaggagtaactagataagcagaaatcacaagacatatgtcaaagatctgagttttagcctagagactgtcatttgcttaccagtattaaccttggcagcttgcatttaattaagtctcagtttcttcatttacaaaagagggagaaggagtcctactgcagagaatagttgggaagattacaggctggactgtatgaggaggtttcttaaacctgggatacaaggccttctgagaaatgcacatgtaggcctatgggatctgagattgtcagtagcttccaataaatcatcagttacttgaaccacaaaatattatgaaatgtaggtttgtcaaaacgcttcagaatctttaaagctataaatgattttaaagtcgtgttaaacttgcatgaattacagtgttctgggagagtgagagatttaattttgtaagaattttaatatttcataaatatgaaagaaagagaattcttatatatgtaaaactatagcctaggaaattctgtcaaataagactgagaaactcactggtgattagagagactatttttaatgtaaatttgtctgacaactgttgtgataactggtttagctgtgtgtgcgtgtgtgtgtgtgtgtgtgtgtattactgtactcacttcctaactggccctcctccaacacattttccacactacagccaatgctctttgtaaaaggtaaatctcttggctaaaaactcataatagtttctatttcacttaagaataaagtctgaattcctttctatggtttggaaggctctgcatcaactggctccagtgcatctgaccaaccttatctcgcatcatttagtcctttgctcattcattacgctccagccaggcgatgtccaacagaaatgtaatgggagccaccaatacaactttaaattttgtagtagccacactttttcaaagttgaaaaaaagtaaaattaatttgagtatattttatttaacaaaacataccatggtatcaatatgaaatcactataaaattcttaagatacttcacattctttttgtagtactaagtccttcctccaagttggtgtgtattttacacctacagactacctccattccggaaagctgcatgtggcttgtggctcgtagcttcttcattggacagtacagctctccagctacacagacttctctggatcccagaacaccaacagtgctctccggtctttgggcgtctgtgtgagtggttctctcttttgagaaagttctttctggctttcttatggctgcctcctttgcctccttccccaaactcagcttaaatatcacccgctaagatacgtctttcccaatgactttaggcaaacagtctccccattttattccctagcagagcacctcggagatcacagttgtcttaggacttctctcattctgtcattttttgtgcttgctttccttgcttttcaaatatttgtttatgtcctgttttccaccactagactataactattgctccatgagaacaaggaccacttttattctgttcaccatgggcacatctgagataccgaatttttgctaaatataataaatgcacgtcattactcttagttgctccctggccacttctaacataatattcagaaacaactgggagcataatatacgcacaagaaaacaataaataaatatatataattatttaaattataaaccaaataaagatgcttacatgatataatttttgaaaaatccttattttcaagacacttgtataaagataaataaatcactttattaaaaattataagtactatccagttaaaaaataaaacttcacttaaactcaaatcaaatcataaggcatttcggatatttctccctttcctgccttcctgagaaaagcactgtgttaactgctcttcattcggcattcagacttttaaagtcagatcaccccagtctcctacagatctacaaaaaatctctaaatgccaataaatttttacaattaaagggagaaaaaaggaaactatgagtgatatttgaagaaagataaaggtttagttaagatttaaacaaactaaattttaccttttctgctcttaactctcattttccaaatcatttattgtaattctaaactgagattcacagctccttcagacatattatacttttaagtggaaaggtgatcactgacaagtatgcagtttttgatacatattttaataaattcggtacaaataaaaatcacataactgatcatgacaaagaatatatactttgggagaggaaaaaatatgactaaagtgacagaccattatctaggttaaaaactgagaataaattaataggtaaaaaatagacataaatggttggatacagctcccatattatggttacctagtcaagtcgtctgttattaacagcaggataaaaaaatacgtcagtagaagacatggtaatcttacacgtagacacacaaacccacaaaaataatcattatatatatcatttatattatccttgaatatatatgaaaaaatatatttttatatttatatatatacacataaatatatttatatatacaatttatatataatttgtatatactccaggtattatacatttgtcttctcatttaatcctcataacctaaagaggaagacactaaaataatccccattttgcagatggggaaactgtggtgtaaagaggtgaaataatttgcttgcacactttgcccaactgttgaactaaagaaccaggcctggagatttattttccagtaattggaaggaaagggttagaaacactttaccaccatccctatgacttgtaagcttataaacttaattttgagcatgagacagccacgtctccaaaccacactgctactgtctagcagcttctccagtatctctgtgtttggtcaatttggctttctgatcatttctctagttccttgttcatttctctactggaaataaaaccaagtcatgagtagcccatgtggttgaaggcctgacccacctacagctaagtctgtcagcaccctgaactaggcatgtgaattttggatggaccttctcagtctttaacctgaatatttatctgacatgtaccgctgggacctatctgcaaaccacagctccaatcccaggagtctaatctctccatgaacaatctgaattagaatatttcttgaatttcttgaaaagtcagcatttaattatcactgaaggaggcaagcattgccccttggtggtccccacatggcaagagactcaattggctgccttcctctgcaaagccatgactatattattaaagaaaacactgccacagataccaaatgtcaacagactatataacgtgtttgtgatgtgctacagttgacccttgaacaacgctggcttgcaccgtgtgggtccacttataagcaaattttcttccatttctgccaatcctgagacagcaacaccaactccttagcctacttaatgtgaagatgatgaggataaaacctttattatgatctacttccacttagcaaagagtgaatatattttctcttccttatagttttcttcagacatctttcctctagctaactttatcataagaatacagtatataatacctataacatataaaatacatgtcaatcaactgttttaatgttattggtgaggcttctggtcaacagtaggctatcagtagttaagttttgagggagtcaaaagttatatgcaaatgttttaactgcacagtggctgggactcctaatccccacattgtccaagggtcaactgtattcacaagtttattccagtgtgaactctcgtagaaagagagagagagaggcaggctcgtgctctgttgtccaggctggagtgcagtaattcaatcacagctccccataaccttgaactcttgggctcaagcaatcctctcgcctcaacctcccaagtagctagttaattttttaatttttagtagcgatagggtcttactatggtgcccagactgatcttgaactcctgggctcaagcaatcctcctacctcggcctcccaaactgctgggcttacaggggtgaaccactatgcctggccactgtaattttatgtaaagttttcttctcaaattttaatacctttcttcataatactaaatatgttgtcacccattcttggcatggaagtctactgagtccacatccatagggagcaattgaaaattctgtgtgtatgagtttgctttgatttatgttctatttggttataaactttactgcagctacaggaataaaatttggctaatataaacgtaacaattattatttcagaagcataaaattgaacaaagagttgataccaggttaaaaaaaaaatcacttttttaaaagctagatgatttgtgttttagccctggctcaggtcctaagcagttttataacagtggctaagtaggaacttgcctaaagcccagtgttctcatcagttaaacgaactctttataataattcctaaggttcctactgctcaagaactccagtccaagcctagctaacactggataccaagtaacactgcatgctcatttactgaacttagggaagtatcacccacataaagttgttctcatgaatgtcttccatttcatggcttaaattaatagccataataacatgtcaaatgtttgttttctctatagtttaatgtacctagatatatctgactaaaattaactggtgattttcttggatgtttaaaataatttgttgatattggttaataagcataatgtacctaaactgacaagatgaaactctaagaattagatttcacagcttaacaaaattcaacaacacagtagatctgcatatgaggggaaagaatagaggcaatttgaagggaagaagaactcaaagcacacatttggaagaagtacactttaagactcagtcatttgaactactctgactggaaaacaattccataaacaccattcagagagattcctgtttcttcaatacctagagtactttcaaaagagcaactcatgtaaaaactcactaccatgaacactgcacagattgaaaccacaaatagccaagagagaagaaaggaatgtatcggggtgggtgagaggggaaggtggttgaggattccttattcatgtgttcaacaaatgtttattaagcagttattatatgccaggtacagtgttaagcactgtggatactttggtaaacaaaatatagtcctttcctgttaaaacaatcttccactccatcaaaaaataaataaataagaaaaaaaaaggaaaatatcaattttctctacttggtaacctattttaacttccccatcttacttggctaattattaaccatgtgcatgccatgtatttcttttgagaaagtgaaagattctaaaatcttcaaaatttgtaaagtaattacaaaatcaaaaactgtaagtaaaaagagtttaaagaacatgtttaattctgaaaaataaaatattctgatttttagttccatagtttacttttcctctacaatttctgatatgttttttcaatagagaaaaacccacaaaactaggtgtacaaaaatacagtacaaataattttgatgcctatatccaattgaaacaaaatttaatagtctgaattttgtaagggagttccaaagttctttgaaaacatcccctttatagacaatatgacctcaaatagttcattttaatcaatgtttttatgtcacagagtgatatatttattattaacaggtgcttaaaaatgcttcttcacttggtcattttctataaaagtatctgcaagccagtctagaccaatgtctatagcttgtgattatacagatctccggaatgtcttcaggatgtataattactacatacagaacacttattcacacatttaaatggaagtgaaatgtaatctaaaaaatgtaaagctatatactagtttcaagaatacaaaagtaaacaataggaaacaactttcatttcatcagtgtattagtatgaggtattttgcttcctctctctcctaaatcaagtgttctgattgtaatcgaaggatcaggatggggacagaagagggaaaagggcacctgcagttcacatgtggcaagaggcttggacaagaggaatttcttttctccccttgcagtacagatttatacacaaccgaaaaagtgcagctatgaccacattttaagaatgcctaaaaatgcccaggagtctaatccctatcacagatattttaatcactttataaaatcttaaagcatttattcctttcatattaagtaacctcaaataacccaaattgtacactacaagtctctatttgagtaacaatcacagaattaaaaaaaattataagaaatatgcaatttccttttctacaaccgaataaaacagtataatgtttatgcaaatcaagctagcagaagaataaagtaaacaacacatttcttaatttcttaatatagttcaaggtggtgtagtggccacctcttttctttttttcatgaaaatctctttcctttgcaccatgttatataggatctttaagaatataatgtactgaagataatttaaaataattttctaaactatgtccataaccacctccatgactgctcccatctgatggttaaaatcttacagtactagcttgaatttcatctctgcctcacatgtttcaagcagggaagcagatttagtgcctcagaacactttacagggtttcattatcaatcaggttatgttcccggtgacgctttcagtaaaattatcttattcaaatgaactctcttggactgaagtaaacaaagctgtagcccattgctctcacatactctccattcatttatttcctttttctttacttagacttacagcacgtgccctagaaagagcgcatgttgaatattcctggagtgtcacaatatgcaatacaataaaacagattacggccctacctttctctcacagcagtggtgccaagcacaggtacaccggagtaatcaatttgttctgcagaccgtaaggctttcatagaatactaatgtaaaatctcttttctttctcctttgccttgactccctaatgcccaggtcccgaccaatacaaggaggagggcggtatgtcttctgctgagataaccacaactactaatcaagtatacgtgtacaagggcacaggattaaacctccaccaagcttgagtcagggtttgagagcagctaaacacatgcacagcatggtcaaaattaaacacacacacacacacgcacccacgcacacacacgtgccatgaaaatacagatgtgtctacttcggtgaactaattcatcacactttaccatgcctcgtttttttaatctcaggggcataaaattacctcctgttgaactgaggacttagattcaacagtgcccaacaattgtttttccagaaacgagaatcatgatcagtcttctttgtactcaactgttaaccatttttaaaactaggcatttttcttaattgtactatccagcgcagttttacatgaatttatcatttcaggtattaacatagggttaatagactctgcatggattcttcagattttacacttaaaaatatattgtaatagctcaagtctactttaccaagaaaagtatgtgcattaccagtaataagacatacaaaagattttcatgtatcttgaagtatttacattatgaataatcccaagctatttgaaaaatattttcaggtctcaacaattatttaaaaagcacctttaacacttcataattatggcatcacggtggtatggttaatcttataaatctagagttctggtgttcttttcaattagacattttcacttggcttatttttcttttattcaaaatatgaaaaggtatgccagtcattgagtaggcgaatgacagaagttgttaaatattttttaacaacatacattgccacattttaatttgcctgccttaattttcaaataactcttgaaaagtattgatagttaaggggctgcaaactaggcaaaaattaagaacaaaatactcaaaataactgaagaaacttattaggaggcatcctaagccgttctgttttcatgtaaacaactgctttaacactgctaaaatacatgtgtctcattttgcactttttctatttcttaaaaaaaatcagtaggaacaattaagaaatactagggactcaatgaagtattgcaataatgtttaatcgatactgatgcatttgtccttgacacactgaccatgtcatcaggctactgtcatcttatatcatgtcatttctccacctggctcatgaccttgtcctctaaatgacctaaagcttccctcaagtagcaggaggcccctccccgctgtctcagcaaggtcgaacgggtcagcgtgtcctcatctataatccaccaccatttgtcagcagggaggctggaggaggcaggcttgctacaaggggagaatgcccaattaggcagctgtcacacaaagcataggctgcaaaattatcccctgtcaaaagaaagagcagctgcgggtgccaattacagcaacctttcaaccctttaggtactggaaactacacagaagtaaatgaagaacaattagtgataacaaatcgatgaattaggacagtaaattagaaattactagcaggtgagcttgggtcatacatgacatttagggcacaccagactccaggcaagggcaggatgcaatgaatcacactaaccatttcctcacatatagatttcccctccaatattttctttttgcaaacctgagatctttaaaatacccatacctaaaaatatgtatcttaatatacacaccttttcatttcatggacccccaaaattgtttctcaataggagaaaaatccttcagaataataagtctagttcattctaacttgttttcacacagtccaacatgttatcccctcaaacaaatttcttaagtgtcgcccacaaaatccaaaatatcagtttaaatcatcacacttaaaatattgtacttgtcctgattctacttcagtcaaaaagcaactgggtataaattctgagaaaactgctttgctaatatcataatgttgaaggtaactttctctacacaatgtcattttgtggataaaaaaataactgccatgtgtgcttctatacataatacacataaagaaaatatcaaccacaaaattactctcttagattgttctgctccaatcctgcagaggtgatatacattaagtctcaagcacagaaagccaatgcacttggactttgtccaactaatttatttggtagttaacattcgcaggcagtgaaggaggaacatggggaaacaagccccaccaaggggagcagatccaatatggctaccgagtgttcatggacatggtttcattgtgccttaaaatgtcatgcatgttcagaaacaactttcttaaagtccatttttaactaagattaattttttttccatagaaaaaagatggtcttcctacatcagttctttgaaagttgagaaacctgaatgatacgtgctgttatttctaaagaggcaggagaaaattgcttaactagacttctaaatcacaaatggataaaagtgaggaagagagaaggtgaggcaataaagaagcactttactcacccacctccaacacattataaataaatcacagttgccagagggaaaagtgtgtaactcctagttcctaagtccagccatgtgataatgtttctaggagatagatgtcatggggagaaaacttctccatgaaaagtttatctgagaatttgatttataaattatatttcatcatttaaaaactgggcatttataaattctcttaagtttagaatgcaaccctctaaagtcagacataaggaattcaaagcaatgacaaatagataggaatgaaggagttaatgcctttagaattcagcttccatcatacatgggtgactatctctttaaataatttaaatcctctccatcaactacaaagctgttttgaagccatttagctttgttctttacatgtgttctaattaagagatgaccttgtcatcacacacaccagaaatccgggattatttcctacagcaaaaattcacagagccccccaaagaagaaaaaggggggtaaaaaagtcttcttcctcagttcctcactaaaggaagttgttggttggttgaacgctgaggcagtttcaccgcataatttttttgttgttgttgaatgtcacagggcgggttagtgtgaccttgagctgcatcagcagcacagcaagggtcgagatgcctgcaggcgcccttgtactggatttgcaagacaaaaaccttcaaactggctgaaggacatcttaaatctcttcaaaggttttccgaactaatctgggctgctcttagcaggatctgtgccagtgtgagaagcaaaattaaaaacaaggtctttgacaggatgttgtctcctcttaacccttcccaagcagaatagaacaaaccaccagcattctggagagagggtttacctagaagcattcttttataacaaattatgtaagcagacaatcacaaagaatggggcagttattagttctcaaaagtaaacaacccttccattgtgcttattaaagaattcaggtcgaattctttcttgactatatttcagtgtagtgaatgtaaaacttaaagctctatttgtatctttcagatttgtagcacagtcacaggttaagactaaaaaatatttccatcaatatttatctctagaattttcatttttaaaaaaaaatacatggttttagttggttaagtcacaaacttcacgcatactgcatatagcttactaaaattacaggtaaggaaaattacattatagcatgtttactaaatttcttattcccaacatgatgaatacattcttaagacggaaaaaaaaaatcattagaatagtgagtaacacaagtaaaacaaggtaaagcaatctcggtcttgttataaaaacatcagcatgacatttgatgttttagcattaccagtgcatgggccaaaagagaaagtattaatgccagtagagggtgtttgattcttccctggcaatgctctcaaaatttaatttagtagctaaagtaggcaaatgtttaaatcattactctagaacaacaaaaggaaaaaggtgaataaaatagtcctggctttcaagaaataaatagtctggtggaacaaacagctgtaatgcttaaatcacaatatatgctaaaatcagtgtgtctccatctataacatgctggtttgtcatcatcagatataaggtatgtcatgattagttctaaagagtatttagtgtaagtatttagtgttaagtacagaatttaataaggtctaagaggttgcaaattattcccttttaaaaaaacagactaaataaattcaagataacttgggtgataaccacactttcactcacttggattcaggtatgttttcctgaacaggacaggaaaaggacagagtaataacacctagtgagtaaataagacccgagagtgcacagtgccggtgattttcttccttagtctctgtgccaaaggagagagagtatatactgtgctaaatgcaatgactgaaatatgtaaaaagtgctctaggaacacagataggctgtaaccaggtttttagttcatatgtacacatgcaggtggtagtcagtgatggttaaaaaatgagtaagggctagccaggcagaagagaatggcagccattctagggtccagaaatagcactcaaaggcaaggaagagctgagtgtgacacaggaagtgtggtagtccaatgggagtggagattaggctggaaatgcaactgggaccaaggactttgaatcaaggccatgccaagaagctggcctttatctggtgggtttccttacaagcaatggtattattaaaagcatattagaaaaacaaaaccagaagctatgggagttgttgatagcttggagggaagaagaaactgtagatcagttagtgcactgccatggtcaaaataaggcaaaggcaggagagttgaagaaaaagacagctctggaaacaatgaaggctgctttgaatatttaaaaaccaatttgtttaacataaacagtgctataagatagggtgttatttcatagcaactttattgaatcaaagataaaaacgataaaaataattactatatctcaagcctaggtttgataaacactgtgctaaaaaaatgatttctacaaagtttcaaaaaagtagtaattcttacaggggtgctttaaagaggcagaatcagatcctgtttgaagtctgaattttgtactttgaactatcaaccttcattaagtattaggtaagggttttgctaagacagtgacatgtaccttttcagaacagtgtgagagcgtatttcccttggctataagacagagatgtccgacttaaattataatgtggttcttggagctaagagttctatccaacgctaatgagaaaaaaaattaactcagcaaacatttcttgagtcccgactacgtttaggacacagaattaaaaaataaaaactacccaacattctatcagcttcatgtttttagatgatcactcataatgatatcaagtcctcaaattccagcttgcatgacatcatcacacaataaaaacactacgagtaaaaacagtatgaagctgtcagtaaatcaagtgtcggaactagcagccatcttggtattccgatccagctgaaaggtacacaacgcattcccagaaccctcagggaagacccagcaccaatgtaatttgaagagcgtcgtcagatactctagagactgactgtcccgctgagacctcagaaagaatttaacagagtatcagccaaggtaagagagtagggagtaaaacagaacaggagtcaccagggccaagtaaatatctgccagagagcagactgtactctcagaaaaggaccgccagcatcagggatcaggttgaggcaagtggaggggaaggtcacacaaaggagagaaggaaagacttgaggggaagcctactcaatcctgcaaaataacacatcaacttcattttgtgaaacttttttaaacgaccaaacctctagagttgggcgaatcaccgtagaagaagtattagaaggtacacaaatcataaagaggacttgaaagccggggtagggggaaaattgacagggcaaaactaggaatgaccttactgagtatccacaaataaaatgacttctccttgagtaagcatctctgtcttacagctgccaagccaacgctggcagtaagtttcagcacattctaggtctagacattaatagaaaagtgggtaatatgatacaccgtgcagttattaaaaaaaaacttattagtctacaaacacaaaagcaaggttaacattattggaataaaaatatagaagattctgttcgcaattagacaagtgaattgccataatacagcagtcctcaaagggtggtccaaggatgccaggggtggccatgacccattcaggaggcacatgaagaaaagactactttcatactactaaatgttatctggcttttggtatcattccttcataagtgtacagtagagttgtctagaggctatatacatggaatgcatccttgtgtaactcttgttttaaattttttctcagtttaaatttctaatatgataaacatcagttgatatgaatctcataaataaaagctctcttgggtccttgataatttaagaatataaagttgtcttgaaagcaaaaagtttgaaagctgctgctattaatagttgaaaagtacaatgttggttttcttcaaacataatctcttctaatttcaagaatttccactataattatggcagataaatattgttctctgtgcagaatgtccctaagaccaagacgaggaaagaaaagaaagaactttctaaaaagatgagtaaactaaggaggatatgaaaaatctcccatctctagagtcgttattattctgaatttaccatacaaggagtaacaaatgtacaaatatttataaagaagctgctatgttgttaagagctgaagttataaggataactaagtgataaaccagcccttagtgggctcacaatctcatcgggaaaaaacagatcaacaacatagtgagatgctactaaaaagatggcatggacaaagtggagaaagcactgaaagacacaatttttggaagaagactgagtggtaaggcagggaacaccatttttagtgaaggttctctacagaggctgcatgtgaactgactctagggacaaacaaggctttctcaattagaaaagaagcttcagtattcttcagaaagtaggaggaccataagcccagtccaggaagcacaatggcatagagtatgttctagaaactttaagtaatcacctccaagaataaaaattgccagtaatgacaaacttttatagaacatgacaaaataatttgatggcatgttctataaaagttataattaaatttaatgatgaaagatgtggacttagattttgtagtcttgctaaaaacttctgtcatatagctttttaaaaagacaataaaagtgagttactaaaaaaaataaaatagaaacagacaaacaaattattggcctttactgcagatattttgagaagcactagcttggaggacaggctagaagatggcaggtggggaggaggtgcagagaggggcggcaacagcaggagacaaagcttcaagctagaagcttacatagactgtactatgaacatttttttaaataaataaatgcaaaaaggaagcaagcgaggtttgaaaattactcatatacctctaatccagaatgaagaaattctagttatctaaataaaatgcataagctctgacgttagaatcagaaaattttcagatatgcaaaccacaggccacatggttgaagggcaaatgtagcagagaatcaaggagactatcaggttcacaacagttaatttcagtgaaaaaagaccagggtctgtgtaagaagagaaagtgtattgacagtttgatcaacacttttaaaattattttgattccttcatttgaaacctttcatggaaaaggaaaaaaaaaaaaacctgagttgatatggaggcttcgcatatagcgactttataaaatctgagttgatatggaggcttagtctagtagggatcttcctccccaaacaacgtaagttatatcaattaagatactaagtaaaagacttaaggaaaagtcaattatttaaagataccaaattaaaaaaatgttaattgtattaatgtttcccatagtaacagtaagttaggattaaggaaggtctattacttttctatgttcattatgctattgcaattgctacattatttttgatcagacaagtaacacaagcaagctggagttttaggaagatctggtggttgtaaaagactcgaacaaggatgtcagtaaacaggcctgccagcacaagagctccagatgagaaatgataagactctgaacgaagatggctggctgtgagaaagggaattaagagtggatggaagcaatgctggaaactaacaatgattcatttgagccaagcatacagattttcttaccagggttatccacaaggccaggaaaacactagtgagaaggccaaattggtttacggcaattaattccaactaggacaactcacccagattataaattgatctttctttcaccagcatcacgtttctactaaaaatctggtgtgaaagtttaaacacattttacaaagagttatttcttaaacaaataaaaaaaaatatgactttgaggagtgttttatgaagttggacaggcattccatgtatacaattagcctactttaccaacctcgtaacccagctcatcagtactggcactttttttttgagatggagtcttgctctgtcgcccaggctggagtgcagtggcgcgatctcagctcactgcaagctccacctcccgggttcacgccattctcctgcctcagcctcccgagtagctgggactacaggcgcccgccatggcgcccggctaattttttgtatttttagtacagacagggtttcaccgtgtcagccaggatggtctcgatctcctgacctcgtgatccgcccgcctcggcctctcaaagtgctgggattgcaagcgtgagccaccacgcccagagtactggcccttttttaaaaaaaaatttatatagatattttatgtctgacaggaaagttttaaactcaagacatctattctaccatagttgtcaaaaatttaatcaaactagaaaaaagtacaatagagaactcgtcctagtggaaaaccatgacatataacaataaaaattccattagagaaaattagtatattcaagtgtttaagctaaattgatttatggtcatttagttaacactaccgaaaatattctctgtttttgtatcagcaattttatcaaaattagctaataaatattatacactgagataaacagcacagaaagtatataaagtcctataaaatataaaaaagggtgaattaattttgttagttactcaatatgatgattgtatctctttcaaaagaaggagctaacaaaatagcaagggaaacatggcctaagacactgaaaggctttttaaacacttcattctttatttagtttgcaatattcaattaattacatcctttttcctcccaatcattatctttgagctttcagtcaaaaaaaattactatacttaaaaatataacatgagtgttttgcagggtaagacaaactatagtaaaaacctcataaaacattagtttagaatcctcaacttgtcaaatactcatctcctgagatataccagatcctccttttggagacacagtccactggttaatgaaaggcatattgaaaagacattctatactttgacccaacatctcccaagcttatttgaccatggactgttcatttaaaaggaaaacatatttaacacaacacgttttagaaaaaacacatttgacataatcatctttaaaatctaaaaacgtttaaaaatatgtgaaaggaatatagaaaatcactatcagtaatttgtttttataaatttttagttttcaaagttgttcactatacattataatgtctttttttttttttttttttttttttgagacggagtctttctctgtcacccaggctggagtgcagtggcacaatcttggctcactgcaaccccgactgccgacttaagtgattctcctgcctcagcctcccaaataactgggactacaggcacgcgctaccacacctggctaatatttgtatttttagtagagacagggtttcaccatactggtcaggctggtcttgaactcctgacctcatgatctgcccaccttggcctcccaaagtgctgggattacaggtgtgagacaccatgcctggctgtctttttttttaatctggaagaaaaatctaaatttgacaattttctaagaacaactcattggctgtgtatatttaccagatggctacctataatttacttatccaactcctagttggatccagtgagcattgcttatcattctggctatgtggtaaaacaaaggtgttgaaaattaagaacaacaacaaaccaattatatcttgtggcggggcggtcacaggaatatgcatgattataatgttaattttaatagaattagaagttcagaaatggggttcaatatcaactgtttcatcaaatataaaagcagatttcagactgccaaccagtgattaacacctaattatatctgaataaaaaaattttagtatttacaaataattgcgtcattgattttaaattccaattataagtaaaatataaatgaatatacgaaaagtgacttgcaaccaaataattattagtaattttatgcagtcttttaaaaaataacattttaaagattttcttgatgaaattacaagaaaagctaagcatttaagtgggtgattaaaataacttcattactaggttttctgaacattatcagaatagtgaagaaaaagcagttaggattatccatatgaggcctacaggtaaagagcaaatttggctcaaagttgccattccctttttgaaacactgtggtcaggtaaaacatggtgaatttcagcatgctgtatctgctctctctctttgaccagagtttttcagttagctagatgaaactgaactattcacaacggattatgagcacaataatcaatcattatgcctttacctagttcacttggatttctccttcccagaaataagcagcataaggtccaagagcttaagacatgacaaattcatttaggttgtagctatactagaaaacaggagtgttaatccaagtagaattaaccacttgctcatcgtcttttttgttgctctgcccacctacttgtgttaatttaatccaattactttatcatttctcagaaatactaataatgctctttcctttgtaagaggaattttaataattccaaaagtaatcactggcctatactataataaacacacaataatcaaacatgcttctatttttcctcaaaacggtaattaactttttatctgaaatcagggattgctattgtaggatttgtattaactgtccattttctctggtttttgataaatcgaattaagtgttgtcaacaaaaatactatttcttctttcaagctttccaattcctctctccagaagtaatctacacactgaattctcaagaatatttttctccatttctcttacagcatttaacctcttttactgtttgattacattatttatctacatttattctttccatataagttccttaaaggaaggattgtagctctttcattttttaaaccacattgcctgatgaagtaacttgcacagatgaagtacataatacatattttgaattataagctaatttataactgagaaagaattgtctgaaatatattaaagtcataatgattaagccttaagaactcaggaaaaaaatattctcaccgtctgtctccaagctctgagcctctgctttctgagaaagaaaattgagaaggctgttgaaaagtagctctgatgtcatccggagtcttcagattccctgtcctccttcagtcaagtgtgcatcttaacaagagggaaaagatagtttggcatctattccaaaccagattctggaataccttttgatcaagttcaacttatcccattaccttttcttgttcaagttcaatgcaaaagtagtcatttgacagaaaaatatcaattgtttatgaatgctggttcattaacagaaagcaatagatctctgctttctaggtaataatcgataaaagtagctgcttcaacaaaataagctgtgaaaaaggtttatagttgctaggatgtgtttattaacctttgttaatttcaaatttcttagcgtgctgtgctaaattaattaatttacatacaaaaaattataaatcctcctaaacgtgtatttcttaaaaaaaaaaaaaagaatagctatagttttcttatatggaactttttcagtttcaaaataccaagtatgtaatctttgcagcaaaaaaattggtaataaatatcaaatgccctatatatccatgaaaagatttacacaacaatgcccaaagtagatttatttttaatagtcaaaaactggaaacaactgaaatgcccatcaataggtgaatgaatcatatggtatatccatacaatataattttactactcagtatcaaaacagaatacacacaacacatacggaaaataaatatggatgaatctcaaaataattaccctgagtgcaagaagccagacaaaaagaaacatattttgtgtgattccatttggataacattccagaaaacgcaaattcatctattgtgaaagaaaatagatcagtgaggttgcctggggatgaaggatgcccaagggagggattacaaagaaatatcatcttaatggtgatgatggtttcacaggtgtacacacatgtcaaaacttgtcagattgttccttaaatatgtgcagtttattcatcaattatacctcgataaaactgtaacaaaaattaaatgccttaacatgttatatgtccgttgatgcagcaattccatgtctaagatttatcctaattaaaaaaatcatggaggataggtgtaaatatttagccataaggatgttcaaaatacatattattatatttgtgcagtacattgtatacagccataaaacgtcaaaatgaaaaaattagaaatagttaaataaactacagtatattacatcatggaatattatgtagtcattaaaatattatacaagaaaattaaattatatgaaattatatactatataagtgataaaaacaggaaacaacattatttcagcataattgaatttttgttttaaacaaaagtaaatgcagtaattatttctgcatttagaggtaattgttattttttctttttgctgatttgcattttctaatttctctacagtaaatacatacatattatttttctaacaaacaccacaaataaaatgatgcaaataggaaaaaatctaaaattttccactccctaatacaagtataaaactcctaagaggcagtgcacaatacagatgtagttctgagctatcacacggccaccagcagcaccctactaaatagctgtgggaaagagacaggtctgacacataaatgggagcatcattaagtgagtaatgctttaccagttacaaaatgctatcatggacatgactgtatttgattttcacaactcggtgaaatgagcagagattccatttcatagaggagcaacagatactgagcagggctggttaagtcatatgccccaaattatagatcttggactcaattaaatcttgactataaattcagataggaattctaagaagagtaggaaacaatcacttgccctgattatatatacctagaaggatgtgattcacacatcaacttaacaataaccatatgtgtaattacatgagtactcctattagaatgtggtagggacctcgggaatttctgaagtctccaatccccagtctctgaagtaatactcaaggcacgcccatcttcccgttatcaacattatctaccaactcactgaaattccagtagaatttaactgttcagttttcaattaccttttttccttcttgaaaaaagattataaccttttattttaaagttggaacaagaaagtacccataactatatttgagaatgctggccgggcgcagtggctcacacctgtaatcccagcactttgggaagccgaaatgggcagatcatgaggtctggagatcgagaccatcctggctaacaaggtaaaaccccatttctactaaaaatataaaaaaattagctgggtgtggtggtgggcacctgtagtcccagctactcgggaggctgaggcaggagaatggtgtgaacctgggaggcagagcttgcagtgagccaagatcgcgccactgcactccagcctgggcgacagagcgagactccgtcaaagaaagaaagaaggaaagaaggaaggaaagaaagagagagagagagaaagaaagaaagaaaagaagaaagacaagaaagaaagaaagaaaagagaaagaaagaaaagaaagaaaaagaaaagaatgaaggaaggaaggaaggaaggaaagagaatgctgcaactagtaatctataaattgattactggaactttaaaatgtgaacttgtgggctaaatctttttttggtctgtgtatatagataagaaaccctacaaactggcatattctataaagaaaaccaccaactcctgagaagggtaaaaggaaatatctctagaggaacattactattatcattattatttttatttttagagacgaggatctcgctatgttgctcaggctggtctcaaactcctgggttcaaatgatcctcccgactcaacctcccaagtagctggaactgcaggtgtgcaccacggtgcccaacttagaggaacattattaatgaactggtcattatctgttgatgacaccatgaggaatccttacagctactactcttaccaacactcctagaactaagagacttaacaggtaatgataactatagtttaatgagcaattactatgtctcaaacataacaataagccttttacagatataatcttaaaaaaaccctgtaaggtgattattattatccccagtttgtagatgaggaaactgggtttaagttaccccaaatcacaaagtcaataagagactgaggtggaattcaaatcccagtattttggaaaaagacagggccttgacagttctctggaaaataaattctgatttttccctactactgttcatctacaatggtctcaattcaggtaatgcaaaatacttggtactagcatatgaacttaatgagcctacattttccatgtaaaaagttaaaagtattccgagcccacaatgtgtatttgatattttgtcacattctagaattgtttatgttaatggttggtctctactaagacactctccttctgagacaaatatatgaccacacaaaagataaattaaaagaatatttaaataaaaccaacaaaagataacacaaaataaactactctaacattaatacttaaagttttcctatattaataagtgagtaaattagccttcagttcaagtcagtgaaactgaatatgccagatgtgttctgaatcatgacaaaagaagcatgtctaatgaataagaaaattttaaataacttcatcataattatattatgaaatattatacaatctttaaaatggatgttttcaaagatccatttatttaataatgtggtaaaattatcacaatacaatgctaagaaagcaagatactattcatctgagttgaacaaattgctaaacaaattagaaggctagacactatgctaggtgttggaattacaacatgaataagacgaacacagttcccatgggaaagagacaggaaagaagcaaacagaaaataaaataattgaagatttcaaacaaagcaagaggtagagaggaagctattttacataaagtgataaggaaaagcaaaagcttctctgagaaaatgacatttaagctgagaaggccctagtcatacaaagaataaagtgaagagaatttccaataaaagaaatagtgtatgcaaaggacgtgcctgcttaaggaactgagagatgaccaaagtaggtagtaatgagcaaggaaaaaaatggtaacaaattaggtcagagatgtgagcataaaggatgatctcaaatttgttttttaatgtgttaccccacacacatatacacacaccatactgaagggacggagaacacaatgataacagtgatattctagatggtaggaaaaggagttggggttattttcccttaatatttccacatgctccaaaataggctgcataaacattacaatgagaaaaaatatggctagaacttccagtctagtgttgaaaagaagtggtgagcgcaaacattcatgctttgtccccattttacggagaaaaaattccaccttccactattaattattatacagctgtagtatataatacagctgctattccctcttccctatgtgtagtttgtgagttttgtttgcttttatcactgatgtgttggattttgtcaaatgatttttcctgtatctatcgagataatcatgtgagtttttactcttttatgtgggtttttagtcttttagtctattaataatatattattatatttataatatatataattactatattaattgtttcagtgttaaaacaatctttcctttctaagataattgcctacaactaatatcatactaatggtgaaagactgaatgctttccccacctaagatctgaagaagacaaggatatctgatgtctactcagtgcaacaaatataaagatagatagactgaaaaagaagtcaaaattatccttatatgcaggtaacatgatcttgcttgccaataactctaaggactctacaagaaacccaaaataattaataaaaaaaagttcagaaaggtttatgacaagatccacaaacaactgcatttcttttttttttttttttttttttttttttttttttttgagacacagtctcactctgtcgcccaagctggagtgcaatgatgcagtcttggctcactgcaacctctgcctcccaggttcaagcaactctcctgcctcagcctcccaagtagctgggattacaggcatgcaccaccatgcctggctaattttgtatttttagtagagacgggatttcactatgttggtcaggctggtcttgaactcctgacctcaggtgatccacccacctagaccttccaaagtgctgggatgacaggcataagccaccacacctggccattaaatttattcttaagctttattctttttgttactcttgtggctgaatggaatttatttttggatggtttgttgccagtatataagaaacgcagccaggcacggtggctcacgcctgcaattccagcactttgggaagcagaggcaggagtaaaacatgtgcactcaaaactacaaaacactgttgagggaaattaaagaagacttgtttattggaacaaagattcagttgattgaaagatccaatattactaagacgtcaattctccctacactgatctacctaaatgccatcgtaatctttttctagaaattggtcctaaaatatatatgaaagtataaaataccaagaatagtgaaacaactctgaaaaagtatgaagctgcaggacttaaacttatctaatctcaaaacatactataaatctatatggtaaccaacagtgttggtcctgctataaagatacacatatagacaatggaacagaatagagtccagaataaactcccattcatagtcatttgattttcgacaaatatgccactgcaattaaaataatagtctttttaatacatggtgcggtacagttagatatccatatgtgaaaataaataattaagtgtaaacctgtatctctcaacatacaaaaataactaaaaatggattatagtctgaattgtaaaaattaaaacacaacttctagaagaaggaataggataaactcttatgaccttaagttacagaaatattccttaaataagaaaacaaaagcacaatccatttaaaaaaattaaaaatggaatgtcatcaaattgaaagataatccacagaatggaagaaaatatatgcaaatcatataactgatgaagatatactatacagcatatattaaaaccctttgaagtcagcaataagataaactaaccaaattgtttttaatggactaaagatttaaaggtacttcaccaaagaagacatgtgaatgtttggtaaacacataaaaagatgctcattgtcatccactaaagacatgaaatactagtaaaatcacaatgagatcacattacacactcactagaatagctatattaaaaaaaaaaaagactgaaaaaactcaaaggttggggaggacaggaagaaactgaaactctcctccattgctggtgagaatgtaaaaatggcataaccacttgaaaaacagtttggtggtttttcaaaaagttaaacatacatgaatgtataaccttgcaatgacccactaattgtacactggagtacctaagagaaatgaaaaatatatgtccacaaaaaatctgtctacaaatggtgatatcagcatcaatcataataaccaaaaactgtaaacaaaacaaatgcccatcaactattaaaggcaagcataaagtgtaaccaacaaaaaaagggaatgaactaatgattcacgtcaccaaggatgaacctcagaaacttaatgcttagtgaaagaagctaaatacgaaagatatctatattgtatgattccaaaaagatatctatattgtatgattccatttatatatgaaatgtcttaaaaagctgaactgtatgtagagaaagcagatcacctcctggggcaggagaggagaacagagattggaaatgggcatgaaagactctgtgaagacatgaaaatgtcctaacgccggactgtggtgatggctgcaacatctgagtgcattgactcaaaaccttccaactgaacacttgcagtggatgaattgctggatacatgtaaattatacctaaataaagccatgaaaaacaaaaataaaaatgatatattacatacaaaatcataaatttatttaaaatgagtccgatgtgctgacaaaggtctcatatccagagtttacaaagagtttaaataaatttacaagaaaaaaaacattaaaaggtgaacaaagacatgaacagacagttctaaaaagaagacattcgtgcggccagcaaatatagatataaaagctcaacatcactgatcattagagaaatgcaaatcaaaaccataatgagataaccatctcatgcctgtcagaatggtgattattaaagagtcagaaaacaacagatgctggcaaggttgtggagaaaaaagaatactttacattgctggtgggagtgtaaattagttcaaccattgtggaagacagcgtggcaagtcctcaaagacctagaggcagaaataacatttgacccagcaatcccattactgggtatacacctgaaggattataaatcactctatcataaagacacatgcacatgtatgttcactgcagcactattcacaacagccacgacatgaaatcaacccaaatgcccatcagtgatagactggataaagaaaatgtggtacatatataccatggaatactatgcagccataaaaaggaatgagatcatgtcctttgcagggacatggatagaagccattatcctcagcaaactaacgcggaacagaaaaccaagcactgtatgttgtcacttaaaagtgggagctgaatgatgagaatacatggacacatttctggggaacaatacacactgggcctgttgggtgggaggtgtggggggagggagagcatcaggaagaatagctaattgatgctgggcttagtatctaagtgatgggttgatctatgcagtaaaccacatggcatatgtttacctatgtaaaaaacttgcgcatcctgcacatgtaccccagaacttaaaataaaagttgaagaaaaaaatgagtctgatgtaaaatacactgccacttctctcattattttaaataacaatcatactttaagataaacctaatgtattacaattactctttggagaatgcaaaagtagaattaagatgactatccaccttcttcatacactactggtgggaatgtaaaatgcagtgtagccactaaggggaacagacagttccttaaaaagcaacatcaagttacgacgtgacccaggaattccattcctgtgtatatacagaagggaaataaaaacctgatgtccatccactgataagtagataaaatgtgataaatccatacagtgaagtattatttagtcacaaaaaggaatgaagtgctgacacatgctacaacatagtcaaactttattacgctcagtgaaagaagccaatcactaaaaatcacgtgatcccatttctatggaatgtacagaataggcaaattaatctagacagaaggatcggtggttgtctagggctggggtgggaagggatggaaatggagagtgacagctaacaggtgtggagctccttttaagatcatgaaactgttaaaaaaagactgtggtgttggttacacacctatgtgaacataaaaactacggaactgaacactttaaacaggtgaatttatagtatgtaaattatatctcagtaaagctataaaaatgactattcacctaatacttattaaaacatcaaaagtaatttcagggtaaaaacctagatctctaatcttacttgtgtgcttttgaagttatgtcacatttatcagaacagtttgttaatattcaattaattctggctaaatattagaatactttttttaaataaaatcaactgtatttttgtacaccagtaacaaacagaaaacaacatttaaaaaatatccaacagcaaagcatacctaggaagaaaagtaacttgtaaatactgcatgctcaatataaataaaatatattggaaggcattaacaacgaaacctaaataatccaaataaatggaatgacacaccatgtttattatataaatactcagtatcgtaaaatgacaattcttcccaaattaaacaaatgcctttaatgcaatgcctatcaaaatgtaaaaggtttaataagttgattctaaaatttgcatggagcagcaaaagcccatgaaagagaaaaaatcctaccaccaaaagaaaatagtaggaaacttgccttgccagataccaaaatgtatcataaagttctaataattaagctagtgcgctcctggaaaggagaaaaacaaattgattgctggagaagtagatcatcacacagagaaaatatttgacaaaagttacactttagatctccagagaacggagacatcattcaatagtgttgaaacaactggttacccatcgtggaggcaaaagtggattcctgatgtctaacatataaacaataaattccagagggattaaaggtttaaatagagaaggcatgtctttaatatttttaaaacaaaatataagaggatatctttatgatctcatagtaggaaacgtttccttaagacacagaaaggttaactatatgcaaagcgttaagattaataaattcaaatgcattaaaattgaaaacttcattcatcaaaaatacaacagaagatgaaaaatgaacaacaccataaaatacactgccaaaaacattgggggttggtgtgatggctcacgcctataatcccagcactttgggaggctaaggtgggtggatcatttgaggtcaggagttcgagaccagcctggccaacatggtgaaaccccgtctctactaaaatacaaaaattagctgggtgtggtggcagtcacctgtaatcccagctactagggaggctgaagcaggagaattgcttgaacccaggaggcggaggttgcagtgagctgagaacgcatcactgcactccagcctgggcgacactctgtctcatatacacacacacacaaaactttggtatccagagtgtgtgtgtgtgtgtgtgtgtgtgtgtgtctgtgtgtgtgtgtcctataacattttaattaaaaatgggcaaaatagagagggggtagccctaataagaggagtcagagagctcaagcaggatgaggttggtgtcactgtggagtggaagaaatgatgtggtatggggaattcgagcccaagctctagatctgtattgttcttgttattgtatgtgttattttaaaattttaaaaaatttaagacataaaagtatttaatgtaaagttttaagtatataatgtacgaaaggtatgaactcgcatttcacgaaagaatacactaatggtgaataatcacatgaaaagatgtctaaccttattgtcaatcacagaaaagcaaatcaagaccaataagatgccattttgcatccaataaattaagaaaagggtggtttgaggtgagcaggatgacagagaagtccttgcacaggagtggtccagcactgggtatcaatgcccaagttggagcagaagggcatccacaaaaagatgcactgtggtgtgcaatgtagaaatcgatgtggggtgagaacggcttccacataaaggggctttgaggctcaagtaaaactaaggggcagggtgagggacaggagaaatggcagattgactacatacagggagaatgatcaaataaagtaacactaaggatcatggtagtcaggtttctcactataagaggaggtacaaaaagggaaggaaatataattgaagcctataggattggaatgaaattagagatatcagtatgatcaagggatgacatgtcaaaaagatactgaagggggtactgctggcaaaatcagggacaagatgggcaccaaaataagttacaatagtaacggattacagctcactgaataaaatacgggctcataagcacacactgatacaaataaattaactaaaactgtgatcaggaaagggattttacatagtttcaaagcacctgcatgcaaaataattattaattacagagggaaaatgagtaatttcacagtagatgaaattagcagacaccatcttaatcaagtaatcccagtgaaaagtcaacagtaatgggtcaaaatgaaattgtatgccaccgcagaggatgcaaagagaagacacagtatcacttctgtgatattcctgctcaatattcataacatggatctaatcatgaggaaacagaagacaaccctaaaggaaaagatattctacataattacgggccgacatggtcttctaacatgccagtgtctttaaagtcaaagactgaagaactgttccagactgtgggagaccaaaaagatgagacaataaaatgcaaagtgtgattctaaatggaatccttttgctgaaaaggacattatcgggacaacctggaaacttgaatgagctctgacgattagatagtagtgatgatcaatgattttgatggttttgttgtggtttccaggacaaggtcttgtttctttctgggaaacacacacttgtttattcatgggaaataagtcaacagaggaaaaaagttccactgtattgtacgtgtaacttttctgtatgtgttactttaaaattaaaaatatgtagaatacaaatgcataaaaaaacagttttgagtacataatgggcataggacataataagaatttcataagatagtacaccaatgatgaaaaaacacatgaaaagatgttcagcctcattcgttatcacacagaaaagtaaatcaagatcataatacgatgccactgtatctactaatttggaaaaagttaaaaagtctgacaattcttagatctgacaatgatgtagctcaacagaaacttctgatatattattaatgaaatgtaaactggtctgataacattggaaacaacttcatattatttcatataattgagcattctttacatatctactcttgggtatataccctagagtcttgcacatcttcttcagaacacatataaaagaacgttgacatcagcaatgcttataatagtcatacatatgtgtgtaaatataagtacacctatatatgtatgtaagtatatcaacataggtatatcaaaaacaaaacaaaacaaaacaataacaaacaaacgaaaggacccagcaaccatccaaatgtccacacagaggggaagaaataaatacacacaatggaatattgcccaggagtggaaataaatgaactatacctacatacagcagtataaataaatttcaaaaaaccaatataagttgaaaaaacaagtctcataactgtacatattaaataacttaaagagtgtaactgggttgtttgcaactaaatgtataaatgcttgaggggatggacacctcattcttcatgatgtgcttacttcacattgcatgcctgtatcaaaacatctctgtaccccatgaatatatacacttgtacccacaaaaactaaattaaaaaaaaatttgaaacagcaagtatccgaagacttcatacagaatgctaccattttcgcaaaacaaaaacataaagtaacatattacttaaagattaatgtaaaaaccagtattatttaaaaggcagtaaatgattaacacaaaattgaagaaagcggttgcaagacaccaggggcaaggagagcaacatatcgacagattcagctgtggtagttaagtctgattctatgctcgatggtaggttcttggcagatcactgtcatattgtgcctcataattcaaatacattcctgtttataccaagggttacttacataacagaaaacaagtggctatattgtggcaaatcagagctttgacaagtatcttgtttaggtaagcatcttaataattttcacacatgaacaaatgttaactgttaggtgacagattttctttattctccttgttagaaacaaaaccaaaggagtatataaagagatacactcaaaagaattgaaaaactgactggcagataaaaacttatagcttggtcaatcaaagaatgaggctaattcatatctaccaccactttggtctcaaataaagctaacataaatgcttgcttacttaattactgcgaacttcagaactgtctgatgaaagatgatcattttgcaaaaattacttaacatgagaaataggtaaactggagtaattcaatacacttcaggttcttaacaaaatgcattttccctctaaatctaaacgggcttttttctctctacttggtcacacaggccagcaatcatatattcaccatgacagccaaaactgtgatgagaaatacttaatccattttaaagagcaaagtttacttgcacaataaataactctttatatttattatatggtacttccatctaaaaaaaatacaattcaattttctcaacaaccttgcattacaggtaaagcacacactgttaagcaataaccactgcatgtagtataatacttaaaaatattttaaataagttagaaatgtgaatgatactctaaatcaaatttgctatccaaatacttcttgagtatctagcatgtgaaaggtactttataaggtgcttttttggcattttatgtgatgcacacggattgaaaatcttagctacgtgctgcattcttgttaaatgcaaatgagtacaataatcttgttaaaagacatctcacactaattcctcttcaaaagaaagggagtgagaagccattcatcctgataaacttgcataagatatactgtactgattctttctctgggcttggatttctttttaatgatgtgcttgcacattaactacaggctacacaatactgaggaagttggagtggggtaagatcgcctatttaataacacatttcctttagaaggatcattgcttcacgttacagaggaaacagtcataaaactacatccacaccattagtccttgggttgtatttctttttgtatgtatattttttacaaggtttggggctgaaaaatcaggcactgattcaaagattaaatagatttaatatgcaatttttaacactaacgtaggcactaaataaatgtacagtgtacaaatgtttatttgaatactcttattttaaaattacttccagtgtttccctgtgttgttcaatggaacataaaatatccactccatataacacttaatttttctatttcctattctttattgttattattgaaattacatacttttaaaagtcatttcctattattaatggtcaatatcgttcttttaaaaaatatacattggtccaaaaagtatttatataaacaagtgtttatctgacatccccatttggaggtctccaagcatttcaagtttaatatgtcaataactgagtccctgttattcctaatctcagatcagctccattcttccaattgttcaggctgccatccgagatgcctctcttcctctcacacccacatacaatcttttagcaaattctgcaggctttaccttggaatccagaatccagaattcagctacttcttactgtccccattcaagtcatctccttctctcctgaattatcataatggccgcctcactggtttccttgcttctgtttttgacacctctttggtctacttaacacaactgctgaagcgattctgctaaaacatgatattgggccactcttctgctcaaaactttctaggggcttccccctctgacctcatctcctgtgaccctccctcactcaccccactccagccacaggaacttcgactggaatactctccttcccagagggctgcatcactagctcccatgctgactcagcctctactcaagtcaccctccgagtaaggccttccctgggtgtcatctaaaacttcctggacatctcccctgcccctgccctcaataccctccattctcctctctttgcttcaatttttatttagcacttaataagataccataaattgaattgctttatcttatttgtctatctcaccaataaaatgtaagctccaggagggtagcaattttttttctcttttgttcactgttctatccccaggacttagaagaataaccgaaatacagcaggcactcaataaatatgactgggtagggtgcatagttcacacccataatcccagtgctttgagaggctgaggcaggagattgcttgagcccaggagtttgaggctgtggtgagctatgctaaccccactgcactccagcctgggcaacagagtccctgtctccaataaaggaaaacaaataaataaataaataaataataaacatgtctgtactttgtgatctcaccagagagtctgcagagatgagcaaaactcatatcctcaccagctgtgacaaacactgcagtgacctcctcaaaaacacactgtcctcttccttatccacctgtagaaactcaccctcttcccctcaggaggtgaatcccaattaagtaaagccacttgtgacaaataatgtctactctgatagtaagaggcagggcttaggcatgggtatatgatttaattatgaccagtgaagttgacaaggaaatgtgggaaaatagccatctttcaaccatgaggagtgacatcaccaagtcactcaagatggcagagtagaaaacagaaaataccatgtgggacactaataagatcattatgacaattcattaactgccaatactccaaattttttgttgagtgagaagatacacccttactgtttactttacttgtagtaaggccttctattacttatatttttattaacacagaaaagtttttacgaatattcacacagtttcccacactgggttaagtcaaactaacacgaagttggattgattcctctggtagaagtcaggggttttccctttcttcatgctgcatgcctagacaacatgtcacatgacaataaaacaagatatttcaatggaaatcatattttctcataggaataatatgttacaaacagggtttcctcttaattaagaattgaaaataaacatattaccaaagcaaaggcagtacaaatatagagttctaataagttaaatggtaaaattatgctcccaatgactacatatttaacaatgttctacagaataagtgctcactcagagggaggaaaacatggaaggagggagagaggaggataggtggtaaggagggaagaagggaggtcccaaggccaaataaattcaggaaatgatgatttaagttaaaatagatcacgacattccctttctatgtgtatacactctggaaggcggttggaggatcactaccttccccttctatgtgtgtacactctggaaggcgctcggaggatcaccacattccctttctatgtgtgtacactctggaaggcactcagaggatcaccacattccctttctatgtgtgtacactctggaaggtgttcagaggttcaccacattccctttctatgtgtatactctggaaggcggttggaggttcactacattccctttctatgtgtgtacactctggaaggcgctcggaggatcaccacattccctttctatgtgtatacactctggaaggcgcacggaggatcaccacattccctttctatgtgtgtacactctggaaggcgttcagaggttcaccacattccctttctatgtgtatacactctggaaggtggttggaggttcaccacattccctttctatgtgtatacactctggaaggcggttggaggttcaccacattccctttctatgtgtatacactctggaaggcgctcggaggatcaccacattccctttctgtgtgtatacactctggaaggcgctcggaggatcaccacattccctttctatgtgtatacactctggaaggcgctcggaggatcaccacattccctttctatgtgtgtacactctggaaggcgttcagaggttcaccacattccctttctatgtatatacactctggaaggcggttggaggttcaccacattccctttctatgtgtatacactctggaaggcgctcggaggatcaccacattccctttctatgtgtatacactctggaaggcgctcggaggatcactacattccctttctatgtgtatacactctggaaggcgctcggaggatcaccacattccctttctatgtgtatacactctggaaggcgctcggaggatcaccacattccctttctatgtgtatacactctggaaggcgctcggaggatcaccacattccctttctatgtgtgtacactctggaaggcgttcagaggttcaccacattccctttctatgtgtatacactctggaaggtggttggaggttcaccacattccctttctatgtgtatacactctgaaaggtgctcaaaggacaccacattccctttctatgtgtgtacactctggaaggcgcttggaggatcaccacattccctttctatgtgtatacactctggaaggcgcttggaggacaccatcattcatctgagatgctcccactcatctctgaagtaatcctaagttcaaagtggaggaaggaagtaggtcagtgatagtttgacccaaaggggtaattttgagtcaaagggttttgatttttagctcaaagccaagccattaataacaaagccagaactatgactatccaaaacaagaactcttcaaattctcactacaaccacctaacaaaccacacactgcctcattataaaagtcttaaaaactttgaaaattctaataaactccttgtactatcaagtaacttactgtagacaaaatagaagatattttttaaaactttcctataggataaacctaactctatccttaacacagtatctgtaatatacagtaattgtttagttatcagtagttttagtagctgtcatttttgaaaaaatatttggataaatgatggctctaaaaaaaaaaaccgttcgaagtcactgaaaaaaagtaggtatttccttcaaaaccttctcaccatattctctaatagtaaacaaaggcttaaagttattctgttggtaaaacttcaaaaagcagcaactgaatcaatttaactaaggactttagtccagagaggatgtcttgctcattgtaaggttgactacagaggtctactgatttcagatccaatccctgcttccttctgctctcccctggtcacactacattcaggaaatgaagcaggagatgcagcagaagggtgagttaagactggaattaaaagtctgaagccacagaaggaccaaaagatgtgtgtgatgtaaaaatgattttacaaaaatataaagtagtctgtttgatttcaaatatggttcttttaaataatgggccactgagaaagctgaaaaattaaaatgatcaccgggcgcggtggctcacgcctgtaatctcagcacttcgggaggccgaggtgggtggatcacgaggtcaggagatcgagaccatcctggctaacatggtgaaaccctgtttctactaaaaatacaaaaaattagctgggcatggtggtgggcacctgtagtcccagctactctggaggctgaggcaggagaatggcgtgaacctgggaggcagagcttgcagtgagcccagattgctccactgcaccccagcttgggcgacagagcgagactctgtctcaaaaaaaaaaaaaaaaaaatactgcatactatgtgccaggactacgttaaatgcttaacgtaggcttaattcctatatggtaattctcaaataactctatgaatttatttccattttacagatgagaacactgagccttagggaggtaaggtgatttgcccacagtcaacaatagtaagtaagtggcagagttggggttcatacctagattatctggtcttgttcaaaaccaccacatcacagcctgtgtcaacttcaatccatttacccataaacactactttggctgaaatgcagtttcttaaagattttaagtagcctcaagtatacttctatactgtaatggtgactttcaacatggaatgtaagttttaaaacaattatcgagtgggttattgtcagttatcattattaactttattaattagacactagtaaatacctgttacaatactgctaagacatacattatttcacttaatcattaattgtaaaatagatactatccaattttacagatgaggctgagaagtttggtgactttctcagttaaggggtaaatctgggattcaaactcaagtcagtgtgtttcacagtaaggcattccacaatcactccccagtaaacctcaacagtgtgagatcaattgccttggtcacctggtctcctgatcatttcatgaaaaattaaccatctgtttacaaatcattcatcaaatttcttgttcctggagctatgctaaagacacaaatataattacaagtccttgctggaccccactagactctttaaataaaaatatgttcctagggtcatctagattctggcaatttctattgcaaattcaccaaatcccttgcttttgttactaccacaggataaacaccctgaatttcccttactggaataaagcctgttaaaactttttgcaggaaaatctctaggactttttaggtatcaaaaagctgaggaaatgttggtactttaaaataaatcctgacccagtaagaactggcactgagccttttattttcttgcagtcagcaaaactacaaacctataaaaattcaaatagtagttaaggggcatgcattttgaagtagttccatatgtggtgagtcacttccaaactcatgctttatactgaaaactttttttaacctggatatgtaggcagaaatcacttttaaaacctatcacagccatactatgaaacgaaaagcaagtccatgtgggagtttactaattgtttcccctgaaaactgttttcctggggggaaaaaatgaatattattattgactcctatgtaccaccttgctttatagttcaaacaaattcagaaactgtttttcctaacccagtattgatctagatatttgcaaaaatgaaatgaaagacaggttaatcatccaacaaacataatacacaagtgtgtatgaggagaggagagctggaggaagtggaaagaactaggtcagtaggtggcagatgttaagtggttcaaacttgaaaggaatcctaaaagcatggaccgaggtttgtggaaactcttaaaagtaaatgaacataaaaaataaaaaataaaaataaaaatgtgtggaagaaaggttctaattagaaggacatggtgattaagtaaaacagtgatcatccaaaaacctattttctttgttttgaaaaatacattagaattaacaatattgtccataacacattatctttctatagcattacactgatgcactttatgtatttcctcatttattctgcataatattcttatgatgtaagatgtatcctcatcttacagatcaaaaaactgaagctcaggttaactgatttactaagagtatatgtgaagatgcagggctcaaatataaatcttaggattctaaagccatcattttccatactattctatttaactgtggctgtgacagtagctgctcttaatgcctactcaagaggtaaaagagaaatataccctttgttttaaatttttttaaaaaaataacaattacctctgctttttctgaagagaaaacaggaatccttatatctcaaataaatgttttcttttaaaatacaagtttacaaggtaataagtagtattcatgtgataagtttatcagaaacaagtctaaatgcctgagccaatttaaatagttcacatttattcatttcatacaatgttgctataaaaataaagtctgtataattctcattttacattaaagtaaccaagatgaagagaggttatactaataaaaggtttaaaactaagaaaatagctttctgtggtcaccagactaagtttaaattgtatatgacttttttttttttttttttgagacagagtctcgctctgttgcccaggctggagtgcagtggcgcgatctcggctcactgcaacttccgcctcctgggttcaagcatttctcctgcctcagcctcctgagtagctgggattacagttgtgtgccaccatggccggttgattttttgtatttttagtagggacgaggtttcactgtgctggccaggctggtctcaaactcctgacctcgtgatccacccgcctcggcctcccaaagtgctgggattacaggcatcgtgatgtatatgactttctaacaaatactgtaatgatgctattcatccttaatagaaatccatgggagtatttaaataatacaataatgttaacgatttcttattttctgaaattactgcgaaaatggcaaattagcagtaactcagtagaggagtatcactattaatacaaactgcatgcccatgtttttaaaacacttacaaaagtaactttaataacactccttgtgaggttatatccatttctatgacaataaacaggctgtctttcagaatttttgtttgtgatatgaataaagccagaagatcaatatttttttaacctacactggaaaaaaatgctgaatattttctaaactttatgccctagataataaagggctgtgtatactgcccacataatctagatggccaataaagttaacttcccaaacctattcagttgccaaaagggtatcccaattgcacatcatattttgttacagtaaagaagattgagaaactataatcatttcctcctcccaaattcagtttctgctactactccgtgtcaccaacatctcagcatttaaatacataaaaccacagtcagcccaaatgttcagggtctatgtatgattacagaattcatctttgcttatgctgctgattctatgaaactcatttcctcctttaaccttttaccatttctttctgtgaactaaatttacacccactacccagatatacatgatcttcagattttgggggtttttttggagggggggatatctctgaaagtcaaacttatttcattcttagatactgttcttagcacgagaaccatgccctaatcaaataaaaaaaaaagtcactatccccaattcagtcccatttagaatctccactagccaggcaggctacttagcaatatttaaaaaatactcttaagaaatagaattgaaaaggttgggtttatcttgaagaaatttagggaaatctgtgaaatgattcttttttaaaaatatactttaccccaatgtgaattaaatatgaaaaactaaggataaattttgggaagttaacaaaacttttatctttgaaattgttacattctaagcaggtaatttattactttcaccaaaagcgtttgtactttccctcttgatgaacagcaaagaatattaagtctatagtaacttataaggaaataataagcaaaatttaagcaaaataataagcaaaatttgtttagctaacatattaaataaattttgcttattcaggtaaggaacattaaaagagcattctacatatcacagtaagttaagtcaaagaaatgtacatattcaacaaaataaagtctgagtactgtcataattacccatatcacactttgcaacctgtaaatttctaacacacatgatatcatttcaagtcttcatacaaagcacatgaaaaaactgttgcacaaatgtaagtaacttgcgtaatataacaaagatgaacttttatcttttttgatcgtttctaagctttaaaattatatcaggacacactctggagttgtgtttcaccaatactttgatttatcaccctatatgtgggaggcatcaagttgagtgctttgtaagtcacaaatttataaaagatacaaccccctccatctagaagtttataattttgctgcagcgatgaatgaaacgctatgaaaaataaaggcagtgtgaatggcattcatcaaccactaggagaaagtagatgggagcacatgttcccttctgtccgagtgatcatacaaatcacaggatggatggccttttggtaaaagaaaactagtagggttcaaaagacatctgagctgaagatagcaaaaataatgtggcagaataagaaatgtgcaattaacatgcttaaggaaggggcaaaccaaatatttgatcatgagatatgcaaggaaccaggtagaaataggacttgtcttatcttgtgagcaaaggtctttgttcagggtaataataattttctgcagaaagttttactttgctgtgtagaatgtattgggtaataaaaactaaaaggcaaaagaccaaatagaaagttactgcagtaactatctaataactatctaataatcagaacgtaataaagcctgaatttggaaaatggcagtggaaagacaaagaaaccaaaactcataattcttcctgttccaatgaaaatgattattgacatagtcataattagggttgactgcaatcaaatgttaaatatgtaaaggtgtaatataaaaccaagaacctgccaacagactttcaggaaagactttgatcacatttatcatctcatatttatcctacaatgtaacaaacattataatgtcccctttgaatgtattctagggtaccatataccataacttggtatgtctttaattaaatttttgtactattttaaaaacatttattgtagttgacctaaaaataaaactttgagaactacaattagataccacctgtataaaatgaaagccaaactatacttctctttccaaagaggaaatttggaaaaattactttccaaaaccttttgagctctgcctgatctatactaagataccaaaatataatgtatgtctcctatattttacagaaacagaagaaatcttttataaatgtacttctcagactgattaccaacataattttattatccaaatgaaaaaaacacatatttatacctataagaaaaattacctgaccataataataaaccctattttttgaaaacttcatatttacatattacctttcaaagggatgtgtatgtcagtttgatgaaaaaaactactttcaaattattcaaatcatccaaatgtattcttatgcttataacttacaatttttgttttcatttcctttaaatattccctgccccagaaaacctataaaggcaaattttcagaaataaaaaaaaatgtgtatcttctccatgcattcaataaataactagtctataaacaggtatgtcctccttctagatgctcagcctcagactagcttcttcagatttattagtaacgaacgcaacagaaattcttgccttcagggagtcccaattttagaaagattaaacaataaataaactatactttaaaaagaaacacaaatttcattgtatttttaaaggtgttaagtgcttggaaaaagagaacagcataaaggagagaggaaaaagaggaggcttccgttttgaattgtgtggtcaccagggtgggcttcactgagaagacgccttttcagctaatgcaaggactttagttttataccaagtgaggtgaaggcttttaagcagagaaatgattttcttttcttactacccaataagaattgagtgtcaacaagagtaccaatttcatttaagagtgtggaggtagtattatcaaaaatgtgttgggggtagggctataaaacaaccactgtatcccagatctgggaaccaaaacaagcactaaagtgtgattatgccgtttatttctcaaagggctattccctccacaataagtttccatattgactgttctcacaggtcaatagtcccttatccacattcccaattttgaataccaagaagctttaaaacccaatttggtggcaaaatcaaacccacattaatgtgagatggtttatagtcttgatttatcccatttggcaaaaataaacatgaagaaacattaaccctcaaaatttaggtaacctttaaatatcctaagtaatgagaagtcataggcacatctatatgtacacatacaaactatctgtaaacttccctattttattaaatatggtggagttacagcatacagcaatttatcacattcaattaagccagccatgcttttgaaaaaagaaaaacacacttcccctaaaagtaaaattctacctagtataatagaagctggaataagatggaagatatgaatctactgttacagattttgattttttagtttaaagatatgtatctgtcattcaacatgccccctaaacactggctaattgatttatctgatgttcaaccaaagaaaatgctacttattccaaaatagaaggaaaaataggctgtttgaaacttactgaaagatggtacttcagcatttgacatggcacctttctactggatttttaagggtaattttaactagtcatgaacttgactaaagcactgtcttttaaaaacccaaaatgtaactctatagctgtgctgtctaatacagcaatcactagacacatgtggctactgtgcacttgaaagatgactagtcagaattcagagagctgtgcgtcaaaacacacaccagctttcaaaaattcagtacagatttacattatttttcaatgcaaaatatctcataattttatattgattattcattgaaaggataacattttgcagatactgggttaaatcaaatatattattaatttcaccagttacttttaaccatagctactagaaactttaacatttaaaatttaaacttacataatgtagctcacattatacttctagtgaacagcactgctctataggaaagacctagaaaaagattaatttttcaaatacttatatgctagaatgaataatatcaattttaatcaccagaataataaaaacacaaaggtcacaagaaacgcttgtcaggaatgctgaaataagtgttttgtgactcaaaagtatctattactttaaatattcaaagaggtgtccaaatattcaactaataaaaaaagccttcaatacatgttatgcctgatttgcttcaaaatccactttcagtatttcaatcatacgatcataagtacatagaggaggatattgtgtcctagtttcattcactagggttagaacaaacccaggttttgtgagccaaatacatattataatggaatcagaaaataggtaacttattttttaatagatgggaaaatttaaataactcctaagaaacaactttagagtttacattaagtcaaagaaaaataagtctctctaattataaaacctaccattaacaaaagacacactgattgacatttcctaaatattcttaaaagcactgtaagtacctattactctaaacacatgcacatcccaccacccagcagttccactcccatgcttacactgtactcatgagaaatgaaggcttatttctaccaaaagacccaaaaaagttcacagcagccttatttgcagacacaaactcgaaagaaaactaaatgtccacttacagtggaatggataaatggtggtataatcatagaatagaacatagacaatttagggggaaaaaacaaataacatacacaacatggatgactcttacagacataatgttgataaaaaaagacactgatgagttcatacgacatggttccaactttatatagtttaaaacaggcaaaactaatctatagtaaaagacgccaaagactattcctgttaggtagaggcaggatcgattagaaaatacacaaattacaataagccttctggagtagggtgctagttactcagactatacttacataaacaacaatcaagctagcaaataagggtgtctatttgattacatgaagttacacttcaggaggttttgtataaaaataagaaacttcttcttaaaaggaccttatgcattatgatttcttttcaaaataattacttaaaactaattcctatcttgaatatacatgggaatttgtcgatttaatccttcagctaaactttcaatttctttgcagtttctttttaataagaataactatcaactctattgaaacatacctttaattttgagatatgataacctttcatgaattgataattcatattagcattaaaattataacttccatctttatagctaagtgtgaatgtttatacgaaatatttataatagttcattctcatctttaatttgaaaagataactctgaattccataaaatccagtttctgatcatataatttattttactgataaagtatattttaaatttaattttttgggttcatttacaagttctttcacagacctaatttgcttatttacatttcttatttgcttttgcctttcccccgtaaccgacaaaaagaggaagaatatgctggtttgccaataaataataatcttaaacacagagtttccattttaaaagttcaatgcagcatgctggggagacttattaaaagactgtattcaaccaaccctagaaattcacactgcttgacagtgattaagaaaatcggtaaaaaccaatttttgtattatttcatatgaataaaaatcatgaatattcagctaataaagttacatctgtattatagtaaaagaaggtggccaattcactataatcttaacaaatacattattttattgcatgtatttatgcatccttccttcatctgtttctatcccaagcaagacagctggcaaaagtttttgagaaggaaaacacaagatacagaggaggtataaggtcgaatattaagaaggatgccttggatatagatcaagaagactatgttcaccactgacattagtcaaattggctggcatatccatatgtgatctatgaggtatgctatggcctgaatgttgtgtctccccaaaattcataaattgaaaccatatttgcaatgtgagggtaatttggaggtggggcctttggtgagtgattagatcatgagggcaatgccctcatgaacaggattagtacccttataaaagaggtcccaataattctctggccacctccacccatgtgaggttacagtgagaagtcagccatctatgaggaacaggcccttactaaacattaaatctgctggcaccttggtcttggacttcccagcctccagaactgtgagaaataaacctctatggtgtataagcctcccatctatggtatttgttacagcagctcaaatggactaagataaggtacaaaagacaaagcacaaagtgagtaagtttctcaacagatgattttaacataaccttccttcctagtaatatgtcacatgtcctgacactctgggcctacaagcagataaattattatgctataccaatctatccacaaatgataatgcaaagagagaatttcgcaaatggatgttcggaggcaaaaccaggtggcctggctgagtctgtccacggactctgatgacagactgatccaaatgcagatggcagctgatccctacactagaaggtagagctgtcacaggcaggaagacttttaagactgcctgaatgtttcaggtatacttcacactgtcttagataaaaaggaactttatgtatctcattttcaaatcaagacattctttaaaatagttctatagtagtaaagtaaaatgtaaatacctcagtgtttaaaataggtaaaactggtttactctaaaccagacgttttattcgcttacacaaaattttgatttaccaaaattgaaatataaccttctttgtgacaaatggcaaggtagtttatccatatctaaaagttaaagaaaaataacaaaatgtggcataacagtcttacttttctacaattggaaaggcttgataacatttttaaaagtggggcaatgagacaaaagacaataccttctggctgtgtttctcccaaatgttaaaataatgagtcctgagaacagttctgaaatagctcacaatccaaacacttcctgaaaattaagagaaataagtgttacttcaagtgcaccttatctcaaagatttgttttacaatggaattttaactactaactaaatcatctcaaaaaacaacaaaaaagatgtattacaaggtaaaaaaaagtattcatattcttcatgatacatgctttctttggacatagttgttgaccacatgtaacaaaacagctttcattacagaattatttgccaaaatacactacccaattgtttttttgtttgtttgttttttgaggtggagtctccctctgtcacccaggctggagtgcagtggcgtgatctcggctcactgcaacctccgccttccaggtccaagcgattctcccacctcagtctcccaagtagctgggattacaggtgcccagcaccacgcccggctagtttttgtatttttagtagagacgagttttcgccatgttggccaggccgatctcaaactcctgacctcaggtgatccacctgcctcggcctcccaaagtgctgggattacaggcgtgagccagcacacccggcccactactcatctgtttttattttactataaagattgtccctattgtcaatgatgtaaaaagttaatgtcaaagataaagaggaatttcagtcaaggattctgggagaaaaagtattagaattatttaacagtcattgcagagtttgaaacacctcatttcttttctgtaccactaggaacagaaaatgttaaactcagaattagaaccatactagatatagaatgacactgacgtggaaaagttcatactttcaggaacaaaagagtggatcaaagtttttggccagcaagagatgtagcaaacaatttaacattgtggtggctgaggaaactttattttggtcaacaggccaatggacagtgaagctagcggtgataagggaggtaccatgcgaactccctgataccaccatagcagcattccatttctatcagccacgccacttagatctgacttatacttctagaactctcaattcctagcctataacctatgatcagttctcacagattatagctttgaataaaaatacatctgtaaacctgaattctaacctcccaaaataaagtagctatttttcattttcatttcattttactgggggcccttcagtctccttaaaaccacttaaagataacaaattgcttaaagtaatacttccccaaaatccagctcttcaccactatacctgtaggtcacttagtctgtatcttgcttattgttattctccctgtgtctgtgagccttcaatacccagcatggtgcaaggtatacagctggtactcagtaaatgtctgataaatgacatcaattaatcacagagccttaatcaattaatatgccaggcttaagtaaaaatataaaagagaagacggtagttttatatggaccaactacaatgaaaaatatatgcctttaattactacacacacatgcacattctctctctcatccactcattcactgtcagttcttcatcagtaagactcctccagtatcttatttcaatgctctcctaatccccccggcccagacaatcagcctggttgggtggtaggtgtccattctacccagatgagttgggactctagtgtcgctgtctgacgtcctataccaaccagcatggtactcaggcattattaatacaagtctctaagcacataaaggcatacctcagagatatagtgggttccattccagatcactaaaataaagcaaatatcacaataaagcaagtcacacaagttttttggtttcctagtgcacataaaagttatgtttacactgtactatagtctattaagtgtgcaaaagctttatgtcgaaacaatgtacataccttagtataaaaatactttattgctaaaaatgctaacaatcatgtgaatctttagagagttttactcttcagtggtgggcaccttgcctccatattgatggctgccaaatgatcaggcttgtggttgctgaaggttggggtctctgtaatgatttcttaaaacaagacaacaatgaagtttgccacatcggctgattcttcctttcacagaataattctctgtagcatgtaatgctgtttgatagcattttacccacagtagaatatctttctagatgggagtcaatcctctcaaaccctgccactgttttatcaattatgtttacatgatattctaaatccttcgttgttatttcaacaatgttcacagtatcttcaatcaggagtagattccatctctagtaactactttctttgctcatctataaggagtaactcctcatccgtccatgttttctcatgagattatacaaattcagtcacatcttcaggctccacttctaattctagttttcttgcaatttccaccacatctgcagttacttcctccactgatgtcttcaacccgccaaagttatccataaggggtggaagcagcttctttcaaactcctattaatgttagtattttgacctcctcccattaatcacaaatgttctcaatggcatctagaatggtgaatccttttcagaaggtttacaattgcctttgcccagatccatcagaggaatcactatctatggcaactacagcttcacaagatgtatttcttcaatagtaagacttgaaagttgaaattactccttgatccacaggctacagaatagatgttgtattagcagccatgaaaattaacattaacttccttgtacatctccatcagagctcttgagtgaccaggtgcgtggtcaataaacagtaatatttcgataggaatcttttttttctgagcagttggtctcaagagggggcctaaaatattcagcaaaccatgctgtaaacagatgttctgtcatccaggcttcttcttccatttatacagcataggtagaagagatttagtataattcttaaggggcttaggatttttggaatggccaaacattggtttccacttcaagtcaccagctgtattatccactaacaagaaagtcagtttgtcctttgaggttctgaggccaggcattggtttctcctctctagctattaaagtcctagatggcatattcatccaacagaaggctgtttcatttacactgaaaatctgctgtttaatgtagccatcttcatcaatgatcttacctagatcttctggaagcttgctgtagcttctacatcagcattacctgcttcatcgtgcacttttatgttatccaggcagcttctatccttaaacttcatgaacaaacctctgctagcttccaacttttcttctgcagtttcttcatctcctctcggcctttgtggaattagagtgaggcgctgctctggattaggttttggcttaagggaatgttatggctgctttgattttctaggcagactactaaaatattctccatattagcaataaggctgtctattagtccgttctcacacagctatgaaaaaatgcccgagactgggtaatttataaaggaaagaggtttcattgactcagagttccgcattgttggggaggtctcaggaaacttaaaatcatggcagaaggtgaggggaaagcaaggcaccttcttcacaaggcagcaggaagaagtgccaagcaaagtgggaaaagcctcttataaaaccatcagatctcggccgggcgcggtggctcacgcctgtaattccagcactttgggaggccgaggcaggcagatcacgaggtcaggagacagagaccatcctggctaacatggtgaaaccccatctctactaaaaatcaaaaaattagccaggcgtggtggcgggcgcctgtggtcccagctacttgggaggctgaggcgggagaatggcgtgaacccaggaggcggagcttgcagtgagctgagaccgcgccactgcactccagcctgggcggcagagcgagacttcttctcagaaataaataaatcattaaaattaaattaaaaaaccatcagatctcatgagaactcactatcacgagaacagcatgggggtaactgcctccatgattcaattacctcccactgggtccctcccaggacacatggggagtataggaactacaattcaagatgagatttgggtggagacacagccaaaccatatcaggctgctttgtgttcttatcattcatgtgttcactggagtagcacttttaatgtcctttaagaacttttccttttacattcacaacttggtgaactggcacaagaggcctagctttcagaagagcttggcttttgacatgccttcctcactgagcttaaccttttctagctcttgatttaaagtaagagacctacaacttttccttgcatttaaatacttagccattatagggttattaattggcctaatttcaatattgttgtgtctcaaggaacagggaatcccaaggaaagggagatgagatgggggaacagccagtctgtaaagcagtcagaccacactgaacaagttcgccggctgatatgggcacagttcatggtacctcaaaacaatcacaatagtaacatcaaagatcactgattacagatcaccatgacacatataataatatgaaaaagttttatatattgtgagaattatcaaaacatgaccacaaagacacaaactgaaaacatgctgttgaaaaaatggtacttgctcaatgcagggctgccacaaaccttcagtttgtaaaaaacaaaattatcttcaaagagcagtaaagtgaagcacaataaaatgaagtatgcctacacatcagcaacaccaaagctaccctacatcattaacagggtatgtcacctaagtgtataagtcaaagatatctagaatcttaactacaggcaggatgttcccaaaatcttagtcgacagaaggcatctcctcaaaatagagtttataatcagacaaaaacaaacagaacctgaagagacctccaggtgataaaggaaaaacaaaaagcattatcatttcctattaggacattacttttttaggagctaaataaaaacattaccaaatcattttatgtaataaaatttaaccttattttgacctttctcataaagcaaataaacctctctatccaataaggttccatctgaactatgtaagatgataggcaataccttaattgcattcatttacatgactctgaaactattctgggctgaagtcactgaccgcaaggtcacagaatacaaaaaagtagaatgtgtgtaatttaccaaggagaaatgatccacttagacagtgtggcagcaccttttccatccttcattaggggatactaaatgcttaatgcaatcaacaggtgtagacatctccatttaaaatatatcatacaaatacatacacacacacacgtattcattttacaaatatataaataacactaaaatatatatttgaataagtccatcatatattatggctttcttcttaaaattaatctgcctaaataaagaacaattctataccctaatagcatttagaagcaaaatacaatatagggccattattttcccattgtcttataaaatttctaacacctaatattcaggttacaaagctatagttttaggaaaagaatttaaaacacaggatgccaagtatgttaagagttcttgctttcattttttataacctaaacacgaatatattcaactaatttgcttagagaagcatagtttacatgtctcaaatccaataatactatattaataaaagaaaagaggtacaatagattgacagattaacaatcatagattacaggggataatgtgtattctccaaaacctcaagagtatatcaaaacacacacacacaaaagttaaccctacaaattatttccctttagctttgtaaaatgcaattgtaacacaaacaaggtattattggcacttgaagttactggagaaaagagaaggaactcaaaagaataggatttagggtactttttaaatgtttataatattagtacatatgcagactgtgaagtatttgtttcaggtttaatacaacatcaccaaaagattcatttaaacagtttccacacattaaattaggtaaatctctcacatttaatttactatccaagcacttttacactactcaagccaatcttttgcaacttacaaatgatttaatgaaaaaaaagctatgatattataaaattcatgcttcttcattttctctccctatagagaagggcaaaacttttcttacgtaaatctatattagatccaaatcatttcaagagatgctactccacaaagaacacacagatggacatatatttaattaatatattcctaaaaaacttcaatacatgatgtcactttgtcctttgtaaatgagaaataaaatttctcaatgtcttcttataagttaagccaattcactttggattagcttagttttaaaataaatgcatacatatacataataaaatactaattcctattgttatctacatataactttcagtgaccacatcttggtattttaattttctttctataagaaacaattcagagtcagacatgaaatatatgtgtgtaactaggtaacaggcaatatttggttcctattctttgacaaggataagctattgagaccaatcagaaccttccaatgtgtttccaatgttcttggctacatttctacttaaactcaaacctcaggaagaatataatctgttaagataacttttgtttttctcaaacattctctctctgcctatcccaaaagaatcaatcaatgctttatgttactaagttcactgattatgaggacaatgtctgaagatttcatacacataatattgggatcttccctttccttgaatttcagaatatgttggagccaatttctataaccaaaacgtagtatttgtgtatctttaaatgagctacaatccagaactgaaaatgaactatactaatggcatcgcacttaacaactttcaatgaagaaagaaataggttagagtctaagttcaaacacacttcaaactcacgtgaccacagtaaatcctacccttaaagcaagtacatatgtgtgtattgtttatgtttcttattttctgtatattatgatggttttgactcctttctggctgggaagagattgcccctctaggggccagccaacgcttagagaaggcaaaggactcagcgtgcctttcacatgcaaactaaacaatccacagcgatacctcctctacctgacccatacacccaggaggcaatattcccctgcctggtatctaccaggcaaactagggatcactcttacagtttagagcctgtatacctataacttattcaaagctactattattacacacctatagcttattagtagtagtagcagtagcatttacctacagctaatgcaaactagcgaatcctaaacttggttacccgccctgccttgcctttcccacagatactccagaaacggctgcagcccggtctctcttctagctcctgcccctttggcccctagaccaacactggggctttctcatgtggccctgaatggcatgctgtgcctccgagaactcatgagtataataaactttgttttcctgagcccctcctgggtctccttttcacatgcacctgactgaccacataaaagaacacagaactctgtgtgtgtgtgcgcgtgtgtgtgtcattttcattttattttcccttgttcaggtggtcaataaaaaattattacacctttaaaaagaggtacctaaataaacaaacctaccaattctgtatgcaaaattaaatcctggactggcagtgttgctcagataacactcagaaaagaacaatgtgactgaaactgtaaggaacaggtcaaaaacactccatttaaaatgtgaacacctgctacagaatattttgattcacaagtccatctaggaaatatttttcttcctccctcacctgttcccccacctatcttgcattcaacaccataaacagcacttatcccccattataaaacagttgacggttaaaacaatgagccaaccaagaaagtataatactctataactgacatttactgcattggccttggacttctaatctttaccagacgggcacacaaatcaatccatcagctcataaaggtgtgcttttttaacctctaaaacagatgggattggccagaagtgtctggcatgtcaaactgctaatcactgctgccctttgcacaaaataacccacttaagttgaggcatggttgcactgtaaccgacattagtctgtgggaaacccatttaactgtcacacactcctgccactcctgctctcccttaattaagcctaatgccttatgctttgaccttttgttctagcctattaaccctatctagtacaagttcaattatgttaagctaaaaactttgctgtaaaatattaaatgccaagctcaaaaaatcataagggacatcctctcagccctaagttctattcaccctgatactcaatacatttgaaagtaaaacctcactttcgaagtaacgctgatactgaagcaaggagatgttgaatgactcacccatttcatagcttttccgtggcaaagcctcactaaaacctatctaatccctagctccaattctttaatctccatggtgcttctgattaatagttaaaccacccggaagtatgttaaggatactaacattttcaccccgaagtattatccttcgccatcctctagaatatgctatgcaaagaggcctaaaacaaaataaactgcgacttcagcagctgagaagtaatgattcctttcccctcccacacatcaaaacttcctatcctatcccctcactactttttttcctttttaaaagtaacaatggtcattgagaactactaaatcctgcaacactcacaaggtagtatgtacaaccacagttttcccccgcgatacttcactgaagtattcaatacagccaatgacttaaactacagaaggtaattacaacttgctacttatcctcactggacaaattcacgcagcatatcttttcaaatacgtcttttttacacctatatgcatatgaattgctgctcacatttaccagaattccaaaaaacacaatgaaaaacacttcctaattcactgtaaaataaaacaaaacgtagtccaaagtaacatgctatcattaaagatagttttaccacagtgatgtatactgttatttttccttccatttacttcatacaattaaaaaaaaggttcctaccactctcactgtgacacataaacaacttaaagatcagtaacataaaacaaaatttgaatttctgattggtataaagaaatccatattaattttagattttcaaaagatttaaagtcagattttaattttacttttgttgactgcccaaaggcccatttttacctattctcaatattaacaaatattgtcagcttttgcctttagcaaccctaaactttacagttttaaagtaacatgccattaaacagaatatacaatgattttgcaaaagcaagatcgtttagagtactgccaaaacaatgaataatctcaatgagataatttattaaaggaggaaaaaagagaacgagagtttaaaattcacagtgaatgtgtttgtgttgttagaatgatgcctgcaaaggaaagcattccttggcattatcgggaggaatacccatggatgtgtaaaatgtaaaataaatagatagatgtatggtcaaagctaagcaaacacttgtatcaggggcaactaccaggaactttagttttattcacccttttcattgcaaaggataatagtgttaattttgatcagatgtcatgccttagctacaacttttagttcatgaaataaaaattaagtttgggtgtctgctgaggaatccaacagtgggaaattcacactcacaactaatttatagaaattcacacatttctataacataccgactgacactaatgaacaatgagggaaaaaattgttcaggaattcaggataagtaagcactggaggaaagcacacagtagaacacagtgcataaatagtaaatgtgctcatttttctgcccttttacttcatatattagtccattagcttgttcctttttgctatgatttacaagcaggtgaatacacagaaatatgagccaaaagaaatatactgtcaaatactcatgaagttacctttgttaaacaaaaaagaaacaacaaacaactttgtcttcacaaagcaagaaactaggttaaagttattttaagagcatctgttaaaaatcagtgttataaatatatatccatataatttattttctattagcattttaaaataaatttctcgtctagaaatctctgagctccatttcaaaataattttattttctgtctcttaccagcagttattaatgtagttgaatatgactcttagaaaagagtcaggaaattcaccttcagtgaagagcaaatcctaatttttaaaacatagatgggcttcatatactacttaatcccataacttaccaagttctgaatcatcaactgttcttgataccctcttaacttttaaggttactgcacaccaaaatgaactctggatgtgaaatgttaagatttccaccttaccaagccgtcaaatccaaggcagttaagtgtgcccagctggcgggtccctttgactacaggaagtgatgctaaggaaactgcctagtaggctccagaaatatttgtattcatttccttacaaaaaaaatgttgcccccaaagattttgctaaacgttttctaatataatttgcgtattactgaagaaatgtaatattacaaaacaaattatttcaagtaccaattaattataatgtcaataacagtcagtttcactttttccctcataattagtatgcctggaaagaagaagatacattttaaggaaaaaatattgttccttttaaaagtcctaatttaaacagactaaagaaaaaacgtggaagagcttccattattcataagttacacataataattaacaactgctatgcataaatacataaaggttctactgctgtgccaaattttgccagtggttgggactggtacagttcaatttaacaaatgcttatagacatccttctgtgtgccagacacttacaggaccaacagtacactgatgaataagctcctattcatggagttctaccaaggaaaacagctataacacaagtttaacttttacaatcagggcgtacacaaaactgtgaaagaaaatctgatcttgttagaggcttggggacagaagtaagcctacaaactcccttgcccactgtcccatgagggagaatattcctttccaatttgtttcaccaacatcaggaacgtggccagtgtgtggtccatgaaaaggtctacacataggtttcttctctcttgctctcttttctaggggtgtagaccaacgtgcacttggttcatggcacattatcaccactggtccacacagtgccccctcatcttatttgttacctttctcaagagaatagaggaatggggtccataaactttgagatatgtttccagttgaaccaacagacccaaccacctacattaatggtgttggaatactactcatcagtaaaaagtagagctggcctgtgagtgttctggtcaactaaaggtatctggctctctttgtctgcaaataaatagcaagtctccctacttctttttaaataaaattccaaatgtacgtaacatgtaaaacaatgccactgcatgaacatgtacataactgtactattctttttttaaattctcagcctggaaattacatttcaagtactagaatattcaacaaatcctaagacttttatgaagaccatgagaagaaaataaggtactagaacaaaagtgatgcagccagccaattctcgtttcatgtctcaagacccagttcttattattatagatccctttgtggggttagcttggattttactgcgggatccatcaccaaaggttattaactattccttaacacctggtacacaaacccctctttctgagactgctttgacaaaaataaacaaaaaagtgtgaaataaatcaagatttgactgaccatcctaggtctacccaactgctagctgaatgactttcaaaacgtctttaaattcttaaggactcaatttcttcctccgtaaaatgcagatagtaactgttttgggcattttaacttaacagcaataacaaaaactacaggaagataagtaattattgaccccattgtatcacatggatcccctggcaattaaaaaaaaagatgaatgagatattaagaaataaaaaggaaaacagagtaaagacaaaacagaaataaagaaggaaacccaaaaggaaagaaaatggcacataagcactaaatggtagcattttatcattattttatttatagtctacactaactgtgtgctcttccatacaaaagatgcatctaaaaactaacttgtttgataaatggggggaggacaaggtgcctctaagataggtgtgcttaaatccagagcagccgtagcttttatcaaattctcttccaacctgaaaaatctaacgattctatgaaataacttcaatttgtgaaagcccaagcaaaagaaattcaaagttaaaaaaaaaaaaaaaagaaaatgtgactttgactcaggtcagtcaagtattaccaggatagataaaagtagatttttagcaatacagttaacaatgggtcttgccacaataatagcaaacatccagatattggaaaggaatcagatggtaaatttaaaaaagactgttttcaatccttatatttggcttcacatagattcagtgtattttaattcatttttttttaaaaagcatggatcagttaaggaaataatataagttcattctgatctttaggaagacattcttccccccatattgttcactttgacaatttctcttttttcttatttggccaaaatataacgtattctctaaacaaaacacagatgtttcctttgcagcttttatacaaatctcttgcttttccaacatgatttggcaactcaaaatccaaagcaccctagaaaatattatgtttacacgtcttattattcatctttgtgtctccaatatagtttcaatttgactatacctttcagtgtatagggaaccactcagcttgaatcttttaggttcaaaaattccataaattttaaatgaggcaagtaaaaggaggtggagaagctcataactccatttcttatggctttaacaataaaagaacgtacctggtatgtacttaaaaatgtactatgtgccacaaagctcccccactcaacaatctccctcctgacacagtctaccctcaaaataaagtcaactactcctcatctctctgcttccacttccttccaattcacaaatacattgttaatttcctctttgcatttcagagagcagtttatcagcacaggatagtctttaacaaaattgttgtgagtgaagatagggtaattaaaaaaaaaatcatgttaagaactgttaatagtcaagagttgtaacttttcaaccaggaagagctatggttctgaatttgctacaactgctccttgaagtggacaaacataactagccttgggaacactcagtttaagaccatgacaagctatttcaatgaattatataaagaaacatagttgctttcactgcctcaaataacaccgcagtaattctgtgatacacttcagaagagttagcactggagggaaaagagcctgtgcggcagcccttggtgactacatttccctccagcgcaatgcaggtagcaggacatcagcgctttgagaactagcataagctgctgcagaatcatcgactggcaacaatgtgccttcccagagagcctggtcttggagaatccaggctatgaggcttgcaaatgctgcatgagttttatggctaccaggttgggagcaaggttttttaacggcttcctgaatgtcagatggcaactggttttttcttcaaacaatggcatattctttaagaaaatcaaattatcaatgaaatttgccatgtgaccacaggcaagttaactattcttgcatttttcagactaggtttccttatctctaaactagagaaaatgatacctacatgtcacaggggaactggaaggattaaaagacaaaatgtgtgtaaagcttccagcacaatgtctggcacaaaacggttgccccaaaaagttcaatactcttcctttccctgctccccctcccaacaaaacaggaaaaggcaacagccaagtaactaaacaacttcttaatattccaagtttctacccaatcatctcttcttcttttaaaaccacaggcttgaaatctttactgtttactgtcaacaacggcatatactgctgtacagtcagaattttagaatttagaaatcaaatataacccccttattcaacagatgctgccgggggagataaaagggctttccttttatctgtatcatcttgatttagtagcagaacctaaactcgaaaaataaacgtggaataacaggaatactattttttaacatgtttttcaaaaatcaaacctgagcctacataacccattgtgcaaacagtccctttaggagaaaaactgcaactgtgattaatttctctcaagaatatttatttcccatttggagagtttcacatgtttccaaacatattttcttgatgtcctccatgtcattgtgtattctctccttcccttaatttgtttcttttccagtgtataaatctattgctctattatagattattataatataaactcataaattcaggaatttaaaaaaaatctttaaaagcatgcttctcagaaatcattacactctgttaaacacttgctatctctcaacttctagatagattcctcaagagagaagtccttttttcattctgaacttctaattctcaaattttgattgtgtcctgttagttaccaaacacaccattatactactactctcatttcaatattgtacataaacgattccccatcttactaatgaaatgcttttttaaagcagtaacatatttaacatgtgcacatgttatgaagagtataggcaaactcaactattaaaaacatgtaactataaggaaagccatcttagacactatatgtgactacagctaagcttttctcttaagtatctaaagcaaatcaccagacttttacatagtaccctcacatagctagataagaaagtaaaagtaaaataatgaaagcagactctaaacagcagaagctccaaactccttagtttctctgttgtgctcaatcctttagcaaattacaggcctgaaaacaaggagtagctctatcacttaacaagtgactaaggaatgactttgttaattagaagtccaagggtgagaggctcctttccaccaaagctctgaataaacatcaacatcaggtcaaccagagttgtcttggtcccaggagtagcttaagcggatgactcaaattcccagcagaattctagtttaatatttattggaactccgagcttagtcacacagtgacttggaatttaagacacatggggtctcttctttccatccttaaagatatttttgctaagtgacacaaagttaaagaggcaagatgggttttaatttagagtttttattccctgaggtgtaagaaattaaaattttattttctggggagagtgaaccatactagctctgaatttcaaacacaactattaaccctgtcagataattctattatcaagttttacaaaactgtttactattattatttttttttgctaccccagccctatgtattgaaagtggaaagaaggaagggagggaaggagggaaggagagagggagaatggatgaatggatgtatgtcacaatcacctttctagccaaaactgcaacatatgctggagttcttgaaattatttcaaccaaaaaaagaatcacaggactcataatttgtttagcaggtaattatttgccccattatcttcaagaacaatctatcttaaaactgtgtatagctttttaagaaatcttaatactaagaggatcctttttttcataaccccaaagagtgttttcttcctctatttttgaattgccagccttctcaattctttaaatctgattcacattatactacttttagagttctaggctaaatgtttatccatagcatgattcaaggtattaatttcaacaaaatactaatataatgataaaatgtatcacatttattttcaactctttcctattcttctgatttaagaacttaaagaaaaatattttatgtttcgggtgcattttgataagctaaaataccacaacttttgtaattcttcatttgtaatatttgcaagatagtgtagggatcaatttgaatttcaaggttcatgatatagagtatgtaccataacagtgagaaaagttagtataaattcctactcatctcagtttctatatttattgcaacaaattaaaactgcatttcataactcgtagtaaaacaaaaggaaagttctgttttaaataaactccaaccttcagaatcctatacattcagtatccatcaacctgaacactaaatttcaagaaaaaacaacagatgggcatccatataatagtttgcaaagaaaccctgataagacttcaggagtttctgtggtctctattttccccctaccatgaatcataggtaatgtgcttaaataaagcattatttctgcagttatttacatgtttatctttatcagagatcctataaaagaattatccagttcaccacccaaactttagcactcagaacacggttttccctgttgatgaagacccttgtaaaattccagatcttaaaagattaaagaaaatgtgatctaatattaattcattttcctccaaagtataactcctgattccatgctggtacccaattttgatcctctactttaaagatatctcagagacattcaaaacaaagtgtgaacatgcacaaaaggggaacttgtcgtttctctccctcaaacaaccactatttatataatattgctggcctcctaaaagagaatagaatccattaccatcagcaattcatgtctctgcttcagcatcagatgcaaacaggatacagaaactagatctctctcctccatttactttttgttcattccaacctctcgacataatcttcagttccattccaatggcctgtttcaccatctgacactcctggtttttaccttctcaagtcttagtggccatagtggtgttacatttctctaattgttgtgttatctaaatactacaggatgagcctgctcattccccctcccccaaaagtccctgaaaaaactacaacttaaggaaatgcaacttgaacctttttagttcacagattcaaactcatatcctgcaagaccctagcatatcttgttgaaaattttctttgacttttcaacagtagtcaagattattttaatgaaaatatttctccagttggaagacatgggtatacaggactttgctagaacggcaaatgctttttcccagtcttcatccgtgtaacagtaaatcgttattaaacaaacacacagaacaaaacccactctgattgtgtatcaatcacctgaaggggcagaagggaaaagtacaagagtgaagaaacttctccccacccacagccaagaaggaacgctgcaactaaggcagtttttcatggaagaaaatatccaaagatctagacagtgtttattttagaaaaggggaagagagcaagggagggagggaaatggtagggaagggactaccatttcctcttactaacctacattaaaaactaattgtatcaagcaatctcaaatgcgaaaagcaaaactgaccctagcacaatttaaagtgaataatgttttccttgacaaaaattcggtattttaaactcattctgagcaaaattatcttttaacctgatacaccaaactattactgcttttcccaaacaacagttagaacatgagcttttgagtttcttacattctttacgttttaaaattaaaagccaaattcctttaacctcatatatcctaagccactctgatttaaaattacttctatgtcattgtcttctagcattggtctgcaatagaatctgtgcaattaacaataatcttcttccctctgatctttctagagtcaaggatggcatatctccttatcttatttgttccattagattggcatattttgcctcatctgtcaccttctatcaaactctgctttcagatatgcgttaattcatttttagttgtcctcaatgttctaaaatagtgatgtttgacagaattaatacagtgctctagttctttctgttcaactggtatttaattaaagatcttggaggccatctttctctcaggctacaccacttaaaggaggaacattacttcctccatggacaatgtgataagccacatggcaacaaagctgcctccctaaggtctctcatttaatagactgctttaccacatataaactaccagcaaaacagattatcactttaattcacattgattttactcttcatatctctgaatcacaactctgtcatgggctgcgttctctcttaacttctgaatttccagaatttctgtagttgtaatgctctcctgtatttttgcttttgtttcatctggacttcaaaaagttctaatggcatctgattgggaagatttcttgaatctctgataacaacgcagaagtctttaagcaatcagaactgccttggcgcacaaactgaaaactccgttttaaaatcttctgaattaacatcttttggagaatagcccactcaacttgatatgtcataattttcaattctaaaggtggcacggataatttaaagtggcacttgctatttattacttaaataattgttctcttggacgggcttttgaaagctagtacttcttaatcattttcgactatatcagaactgtaacagacatgtcaatttaagcaaacttcatgagcaataaactaacaaacagactctaggtggtggtataggttattttttatcatgatgttttgcacttataactgcaagagtcagaaaagcctttagtctcttcacacacttctttagtgcaaagttaacaatattttagggtgttaaaattagcaaaatccaagttctgcagagtttagaaatgcatgtaaaagaggcattaaacctggttttcaactaacttcccacaggcattaaacctggtttttcaactaactcatttgaataaaatcaacaacgaacagtccttttttttttctgttatgttctgatgtatattttactcacactcctagggcacttttaaaggtaagtttggaaagaggtctttctccaccagagtatgaaacagactagaacaaccaatcctacaacctgcagggcagtagccgctccactaattgattctccttctttgtctctaggaactatgcccaggcagaaaaaaagttactgtaggtgatgaagccagtgctccctgaaccaaataaaccctatcgacgttaccgaactgccgggcaaaaccagagcaactcacttacttggaaggtgaaaaacacttcaacatactccaggcggcaaccgacacttaggggccaggcagatgaaacaccatttgtttaaaaagtctattatttcactgtctcttcaacaaaggtggaaaactgatgattaaacactgaataatgccacccacttactaaacctatgattcactaataagcaggttcaatgcaattcataactttaaagaatgaattaccgaagccccttgcttcacaaattcccccaagaaacagaaagagcattcatcacatataacccgacaaccatttttactatggacacctacagatggcttctcttcctctaaggacacaatttccttcacaatcccacatgtaatcatttacaataccagaaacaaactccaactcagttccaccaactgggtttttaaaaatccttgtgcctaagaacgtcttttttccccaaagtaaaatgtgccattaaaaaatatttttaaaacgcaaaagtgcttatcattccgtacttcttttactaccttcagcagccaattattgacgtgataaaaggtagaaactcctggaatgcttcagagatcaacatgtgtcacagactcccagcctgtccgcctctaagacacagttggttcctttgttccttctgactgaacaccaactcctgatcaaaattgggaaactactttggaagggatgggagggtctgcagaatacatccacggaaaccttcataaaacaatattcaatcgtaataaggtggacacagaagaagggagaaaaggcagcctcccggacttccaccgggctcaccctaaatgggggccggcccctggctcctggtaaaatgatggctgaggcctcgggtccgtgagcctcgccatcgggaggggaccgcgagtgcgggcagagcggcccggggtcgggtgggggccgggcgagctgtcccttttcctattcactttcccagccgggtatccagcgagcaaggagcagggaggcacccaggcgaaaggcgccgcccaggatccggctggacagcaggacggagagcggcgaggcgagcggtgcccggggttcgggaccgagagggcaagcgagcgggggcaaccccgacccggccccccgagtccggccccgctcaggggccacgcgacggccgcccccttgcccagaactggcacggacgggcgggccgacccggggccactccacaacttgccggcccgccgccccggccccccgcgagaacccggagactcgaaccaggcagcagaggcaggatttccccggaaacgcgccctccccgccgccccgacgcccccgcggccctgccagccaagcgagagccgacgcgggccgcgctcccgggccgtttccggcggcgccggcggccgctactcctggcgccctggccgcggccgtcactcaccccaggccgccgcggctcccagcctccggctccgtcaggctcggtccgcgaaggcgcctgccgccccgtcctggcccggcgccccggcgagctcttccctccgaccagcggcgctcacggcgcagcggcggacgcgaggccacgggcggacgggcgcgcgcgggtggcgggcgggcgtggggccgggtcgtccctgcgcctcgccgccgcctcctccgccgccgcctcccgagttcggggctctgctgcaatgtctgcgaggctgactttgagcgcctcgctcaccgcccgcccgcagccgcgctcctccctccgccgccgagtccgccgcggcccagtccctcccctcgccgccccacgccattcagctcttcagccaagtttcttaacccttttctccccctccctcccattgtcacccggtcaggaggaagccgcgcggatccgggcggctcacaggagctgcggaaccccctctgtttcgtggatttccttctcgcctgctctccgggtgtcccagacggggctgcaagacccggaggcagcgagaggaccgcgtccccgagagaggggctgcacggcgcgcccgggccgtcccccgggctcccagctctgtccagccgcccgcgaccgctgcaggcgcctggacagctcctcctggggaccggggaaagcgctcttgggacccaggccgaatgctcccgtttgggcacagcctgggggccggggcgccccagacgctccagggtccccgcctgccttaagcgtctacctcctccccttcaccccacaacacgcgctctctgggccccctttcacccacccacccccaatttctatctccttgtaatctgtgtgtcctgctttaatgttggggggcacgggcgcgaactctgggtcactttgaccccacgcccagcacgtagtaggcgcccagcactcgtgtggagcgactctgggaggaaaactaggaaggagacctgaggagcgccccgctcagctccctggacagacgtaggacccaggagcagggttaatcctcggctgctttgtcactgcgaagtctccagcggagtctgtcagccaatctgcatcatccccgggaaggatctgacccaacaagacaagggaaaaggagcagggctgctacttcttcagcagctctcctcggttcggtctccgaataagaaataacaattacatcacgaggccggggcggcagcgcggtggagcctctcggtttcctgcagcctaatctcactgaacccgcctctaaattgggggggccacagattggtgaaacgagaaagtggaaggaggagagagtcatacgaaaccataatttccccttatccttgtatttgctgtttgaaaaatcgtatcctcaacgctccccagacatctcactagaactattaacaccccctcaacacctccccagatgtcaggtttctttttgacttgagcatctagcatttagtaattcgccatgaaaaaaattaccaggggaagcgagtgttgttgctgaaattgtttttgcttgacacaaaaaagctaaagtacagcttagtctcacccgaaattctgaaacggcatgcccgtgttaaaacacttattacataagacaaatgagccgatgaggcactccattcttatatgtaggttttcatatcctgaagaatttgatagcatttggaaatgaagttgctaatgcgcttaaaaaacaaaaactatccaagtcatgaaactgtattctgtgcctgttatgtaatggctgtattgtgtattgcaaatttcacttaacctttaaacaatatgaatgagagttttagaatactgtcacagtcttgaaagtgaaagcaatttttcaaattaatgcttaataaattcagcacccagcacagtgccgggcacatagtgccaatgttttccttagtggcaatggcacattttaaaacaattatttttcatcaccctagtgattgaactatgcaatctgttgccattttatatagttaaacctcatataatataataccatattatttgcatataccacaattcaaaatctgctctaggcaaaataaagtctgctgttttttagtgcatcatttattcagaattgatacaaagcaaaccgtttcaattcaatgatgaccagcataattggagcttggcccttagtggggggtcaaactttttttatgaaaattatttttaaccattatacagatttttctacaatgtattgcaaatgtttctcttaagcagtttgttgaacgtcatttagcattttcttgataattcaatgttaattttattaaaagtaattattgtagtaggttgtagcggattcagtaaatatatccagttcctattctatattctttctaggtgttaggaatgctcccaggaggtacaaaagctatcagtcgctgcaccgaaggactctaggatgctatgacttagtgattatctctgccttttgtaatttctctctctcccccttcactaactgacaatctattgtccttactgttactagcatagctgccactaacattctcctcatcttctgatgggtaacttccagtctagtgcggactgggaatccagatagcctcacttgtcacaattctgtctaaagtaaacttaataggttctgggtaagggactaatgggctcaccaaggagtagggcgcacacacaccttagtgcatagactttgggaaagatatttggactactcaagtctatcttttaaatacattcctcttacttcttaaccaggttttggaccatggagattgcccagcaagccgagaatattccagccctccaacattgttgttaaaaagtccactgctgtatgttaggtgacttcccaaagctgctcactacttcttcttattctgttttctcaaccccacaaaaatccaatcactgaaatcctgaactcttttgatagtggcatgagtgttaagtaaattgcacacctcttgtggaattcattttcacttaatcatgctaattatgtggagacttgtttgttgttgttctttgtttttttaagtaaatcaatacctaaatttcctggctaacagagtcattgcaaggatactagggcattatatgtaatataagaatgcctatttggtaatttgtactttgaagtcaagtctcatttgaatcatttgtgatgtgaaaacaatgctgttgggtttatatacttaaacacctaattattgttttacgtccagggttcctgtgggatcacatgcctttagttcagtctcagtatacctctccgccacaaagatgtagtctgggtgtgttctctagcctttggttctgtagcctttggtgtgttctctaaatctctcctctatagcattttcaaaaaccgttttgttagtgggtatttgcttgtccgtatcccactgtagaatgcaagcagtacaggcacagggtccatatccctctcattcacatttggggacttccagctacccatccctgtgcccagcagacaatagacattcagtagatattggccaacatactgtcataccccagaggacagaatgtatctttctcttggggtcctggctgtgatgtaagggagttcagagaacattttgcagagaaaataatgcttccgctggccattaaaaggttaaaagaattagccatgtaggcaaagtgggaaaagaggttctcaggagaggacatagactgttcaacagtagagaggtatgagaagacaaaaatatgcactgagaagtattgagcccatatttacactatggagtgaactatgacacctgagtagggagaaatatgtgtaatataatagatcacagacaaatggaaccccactgcagttaccttattagccacagtcccttagcctctggagcagcactgaccaataaaaacataaagtgaaccacaaatgtgagccacataaggaatgttaaattttctggtagttatattcaaaagtacagaggaacaggtaaaattaattataataatgcactttaacccaatacatcaaaaattaccatttcatgtctatacaacatacagaattattaattagatattttacaatcttttacagtcttcaaaatccagtgtgtcttttacatttatagcacatcttcatttggactagtcttattccagggctcaacagccacatgtggctaacaactaccatatcaggtagtgcagctccagagaatgtaggaaatatttaataatatagtttaagaaaagtttcttaagaggaaaatctaaatcttgttaactctaaaagcttatgccgattattagtgttgaattatgctaggttataaagaccaccttcttgtgtttagacttttacgccaatttagagaatcagcaaagtttgcattttatgtactgtgtcttcattaacgatgctgtagttacaactacttctatctctattaactatggtggtggactgtaaatgtaaactgtctttatggcagaaataaaacgctatagatttggggttgactaagctttaaaaaaaattctctctacaatatgaagctatctcttctatgcagttactgccaagcatcttcctagctgtagaagtccaggattttgctctctaattcttttatgcccagttacttgtagatgacaaaaaccaccctgacctttgtttgaggcagtcgcctacctgaagctgcagtaaggatttgctgcagctccctgagtaccaagaaaggtctaaagagctgacttgaagatgcttagacaccctctctgcaggttactgtgcagctttccctaatgagattggagcccttttggtttcattgggatttgagtgcggaagactggcaaatccagggcactcattttctacactaaaatgaatcttgaaaactgtatctttttaaaaaaagtctgagaatgattgtgtacaagtagccaaacctgtgcaaggaaaaggcagatactttaatgaaatgcatatgtggttgatgccgtctcattccttctcaaaacaagaaaatgtctagtatagttaaagggttagaaaaaccaagaagtcccaacgaagcaaggaaaacctgtcagttttaataatgtgtcagtttgatatgtctaaatgattgagagtaaatatcacatgaaatctttccttttatgtagaaatggcgtatgcagctctcattaggcagtcctgtcgtaaatgcatatgaaagtttcctttaagggatttcacaaacataggaccatgttatgaatcaattcagtaaaaacatgatcctattatttttagagatatatttagatagacttcaactaaagaaaagtgaagaacacatctgtttttccaaataattcagggttctaaagggaagaaagatacaaagaaagcatgatgtatgcttactatttgtataattgtttggctctcgaagacatagacactgacctatctgttttagattagtttaagaaacatgaaaatctcgtgtaatttttcttttcacaaagaatttgaacacacacacacacacacacacgattgcatgcaattcaatggtggaaagaatcatcttttcaacacatggtgctatgatatctacatgcagaagaatgaaattggactccttcttcacatcatatacaaaaatttactcaaaatgaaatgtagacctaaatgtaagaactaaactattaaactcttagaagaatatattgcagtaaatccttgtgacctctgttaggcaaaaccttcttagctatgacactgaaagcatgaataacaaaaaatagataaattggactgaagtcaaatttaaaatcttgtgtgtttcaatggataccatcaagaaaatgaaaagataacccatagaataggagaaaatatttgcaaatcatatatcaggtaagggacccatatctagactatataaaaaactcttacaactcaataataaaaaggcaaatacccagtttttaaaatgagcaaagtgtctgaatagacatttctccgaagaagatgtacatcaagcacatgaaaagatactccataggattagccattagggaagtgcaaatcaaaatcacagtgtgatgctacttcacactcaaggcaaatgactataatagaaaaaaaaagatgaaaacaagtgttggtgagcatgtagagtcattggaacactcaattgttattccttattgatgcatagcaaatcgcttcaaaatttagtggcttaaaacaagaaacacttattatctcatagtttctgggggcaaagaatgcaggaacagcctagctggatggttctgacacaaggtctctcatgtggctgcagtcagggtgttggcagggcctgtggtcatgcgaggcttgcctaggtctggaggatcgaattgcaagaaggcaccctcacatggttgttgacaggaggcctcagatccctgccacatgggcctctcctcaggctgcttgagtatcctcatgatgtggcagctaacttccactagagcaagccgtccaagaaagggcgagagcgaagccacagtgtcctttctgacccggtctcctaattcacacatggttacttccattttattctattaattagaagtgagtccctaagttcattccacactcaaaatggaaagtcatcttgaagggaggagtagcaaataatttgtgaacagattttaaaaccaccacagcacgcaattcacatttttgcctgtggtctgcctctttggtttcctaaaccaacttgcatgtccttgtttccatacactgaacaggctcactgcctccctcgagggaacaagacttaagcgtcttctggttactgcatcaaatctattgcttaagaattctgggtgatatgcagcactcccaggatgccccgatgaggccccttgaaggctggtaaacgggcgtgctttcagccacagcacatttacattttcaaccatgaagaaggaacaagatcattgcaataaatctgtccatttggaaaaggaagaatgaggaacacacattggtcaccgttccatagtaattatcaaaacctactaagcaggagtagccaggactcctttccttggcaatacaggaagttccttgattgaccaacctggtagcctctgattctttctcctgaatgttctccctcgtgccttgccctctgctgttcctggatctgcctttgaagtttcacatttgacagttttcctcaacaaatgtatctgagacagacacgggggaggttgtccttcttggagacctcttggattttgaaatatttcagcacagggattattttaaagttttaacaatgagattattgcaaaccaagttggggatttctttgggatgttaatttcttcagacacttagcaggcttgatttgtttccattccattccatgtacaagttaccatagccaaaagtcttgcccagacatggttttcaaggctgcagattctcagtttttatttactgggctctgtactctgcccatccctctggcccttaaattaatggtgtctaccttgagatcatctgaaataatagctttaggtggggaggcaatacaatttatcacctcttgctaacaatatcactgctgcattatgacaaagcacaagtcttacctcctgctaagccagcagttacatggccacagcttaaaacttcttcaatttcaagtacagagtagatgactttttcaacactgcaaggcccatatcactggactcttcatcagttgttagcaagtatcggcagagaatgtctcccttagaaaatctttgcttccttccacctctgttttcagaatgtttgattctagtctgagttcacctaactcaaaagactttactgaaaatagcaaaactataccaccacctacaaacactatgaatttatcttttatttcccttaacattatggcctcagtcagcaaaaagtctgcttttcaaggtaagcagttggcagcttaaccaaatagtttgctaccacattaaaaacagagccctatcacacactgcccaaatctttctgctaaatcagtggtacttgtaccatgcagcataccattactggtacctactggccatggttcctggttacagaaacaaaatttactcttgctagtttaggcagaatgtgtgtgtgtgtgtgtttttttttatataacaaaataattaacaacatttcttctaggacccagaaaccaggcttggataatacatgagagaaacttccagttgcacaaagggactgccgtgtggaaattccactcacctaccatctgctacatggaaccaataaggatacagactaaatactagaaccttcattagaactctacagaataaccatacacttcaaccaaccactttatttgccaagcagccctatagattctgccttacaatgttcatatccggcttccatgtcttatgtaggtgcattttgttggtggagaccaggtcacatgtgaaaccttagcttcatctgagtctgagaaatgccacattcagccttccagtaacctggaaaatatactaggaagagattagagtagtatttagtgtgtgtcattctacagtatctggcacagtggccaaaggtttatttttgagttttcattatattttaactgacatactaaaatttgaggaaagtcatgatgaaatatatagtaaaattaataaatagcatgaattacattgacttactatgtttccttttctctgtaggattcttcttggtttgagcgtttgtattagtcagttttgggtcgctataacagaatacctgaggctgggtaatttataaagaaaaggtgtttatttagctcacaattctgtaggctgggaagtttaagggcatggccctggcttacggagagggctttcatgctgcattataacatggcagaggtcaaaggaaaagcaaaaacgtgtgaagagacaaaacccgaggagcttctcacctttataacaaagcactctcttggggactaattcattcccaggaggactaatccagtcctaccagagggaaaactcactaccaaaagaatggcaccaagctattcaagagggacttgctgccatgagccatacatctcctattaggccctgcttcccagcaccactacactggggatcaaatttctcttctcttctcttctcttctcttctcttctcttctcttctcttctcttctttctctttctttctttctctctttctttctgtccccttccttccttcttttttttttttttttgatacagggtctcactttgtcacccaggatggagtgcaatggcacatggttcactgaagcctcagcctctggggctcaggcaatcctctcacttcagccccacaagtagctaagatacaggcgcatgccaccacaccccgctaacttttttgtattttttgtagagatgaggttttgctacattgcccaagctggtcttgaactcctgggttcaagcgatctgcccaccttagcctcccaaagtgctgggattataagcatgaaccaccttgcctggcctagagatcaaatttcaacatgaattttgatagggacaaacttaaaccatatctaagccatagcagcattcttgctgttgtagtttgtttggcctacctgtctattttaaagccactaataggattccagaaatgtttgatatatatctccatatgcagataaatcaataactgctcagttcatctccacaatttttcatagtcaggtgcatgtctttgttccaggcccttccctggtgaagacacagaagtggaacatggttgtggggcaatagtgaacagtgaagtatggcaataattatgcctgaggatcagagctcttcagtggtgagagaaaaatatcagctggagctaaaagtggcatgaaattaagggagcaggaaaggtcaaatatccagtaagagagcaaaacccaagtttctgaagcacgggaagtattgtagattgtaaaatgaacaataactcacccaatgatcattaaatttgggtaaattttgcattaattgtatttcactgtattctagttcttggaaagcaggctaacactgttaactggtatatcatatattgattttgttgggatacaaaaaatgtgcttactcttggataagtagataaaacacttttggttgtaaggaagagcgacttatgccaattaacttgagagaaaaggaacttctaattcataaaatccaaggaagtgctgtcccatcaatcctcaggagaccatagctcttcatcctggtgctccaccaataatgtgccttttttctccccttattcagtccctattggtccaattctccaaagagaaaatttgattgacttttggccagccagtggactacttcttttatggtcaggtgtccagcccttgtctaaccagtgatactgaatggaggtgagggcaagttcacttaattcaaaggattgacattcccaagcctgtgaatagggctggtaaaactagcagggtaagacgagtgtggtagatcaataaactaatgactccagtacagttattatcttttacaccacataaattaagacttgtaatattgtaacagcatcattaatcttatttacaaaccgcttgcaaattaatgcttgtgattcttatatacaaaatacattaaacatattcattctttcactaattatttaatggtgcctacaagtaccctgtggcacagtgtatcaagttctcttgatgccaaatgaacaaaccatggatacattctttgaggcaccacaggaggagacagctaatatttactgtgatgtattttttaatacaggcataaagatgaatattatggggaaatgaggcattggttcatatatgggggattgaagggaaggttccttccttcaaggaaatgatttttgaactagatcatgaatgatgaatttaccagtgtgcttttttcttatggtcattgctgattagtgtttatatacttactataacatcttattatcaagtcatattttacaggtggtatttccctttcgggaggttttgttgattctcaatgtgtcaatatatagagctagaactgtattttgtcaattgaaagtaaattcagattccctcacatggggtaaaattgttttatttttctttcttcttgtaattttctttcccttttcataggcattgaaaaatcgttttctaataacatagctttcatgaacgtgagaatttttcaggtgtctagtagtggtggtgattgtcatttccatagtctcttccttggtatcaaggccagccttaaataatgttgtgaaatgtgccagccatacctttggtaccaatacatgccctttctctaacacacttttagtgcaatgcccagtaactgcataataacattgtatatttagggaccaaatctttttcctctaatgcaccatcaattgtttcatgtactgttaagaaagaagattggaaccaaccaaataatggcacaatgctttcttatgacatagaattctaattttataactattgaaagggcccttttaaacttatttatacatagatttttaatcctctatcactcatatatataaataaaaggacaatataagtgaatcacattctttaagatattcctaaacatgttcacattgagcttgtcccacaagaatcactttttgacttcatcatcaaggtttatttttaacaaaacacaatttactcttttgtgccatcaagcagtgttgttgatgcagcatgccttaaaagagtgctccgctactatgtctgtaaatttttttccaagctgctgatctccactgtacaggctttgatgtaaatgcactagcaaatgacacccacagacagtgacacgaagacaccttcccatttccgagatgttaaaatatcaaatgatgaatcaatggcatatgacatacaattaaagagatatgacactacttgataacttccaaagtattagtgcagaccttatgtttctttatcattatcataatgtaagccaagttaggtagtcattggttcttatttcacagacaaagtactggatgtcctccaaattaagtaatctgctcccaatgacacaaagaaaacaaatagtagatttggtactatgcttgatagtactggcatattttatttataatccaaggctttttccaccaattcatgctatttctgccataaaagtaatgcacactaaccaattgcacccttggggcaccccaatttatactatttcccatcatatttcttagatattcataaacctacactgcaactctcaatctctctacctgtcacttatccttgctgattgaaaaatttaatccaacagttcacaaactatgtcccccaaaatactgttgtttcaagattttctgtttttaaatcaagtaacagtcatcttttctcaatttgcaggaaaaattcaactatcaaatggtcttctaaatcaaaatttttccatattttttgtttagtcctagtttctgctatcatttgatgataatagaatcttgtttcatatgatattgaatttacacaaaacatgatcatttttcatttaccacagcaacatttcaaggtattataaaaaattttccacaaatgttacatttcttgaacaaatatgaaaacctttgattttattcattcttctggaagcctgctgtcttccagatacacagatacactaatggttcaaatacacggatctgtgctatttaattggcaagttactttgtcagactcctcagaagagtccttagaaaattcatacagagtgaattgaagattgggaatttgagacacttcataagacaaaggagtcattttttgccagtcagcctttttcaaatttctttaattacataatgtgaacaagatattctaatttcaggacagccttacctgtgaccaacactttttccagctaatttttgggggagtaggtcaatcctgcatcaaagaatcaaatttacagcttctttctacccaggaaagagctgatgcacttaattaatctttccaggaagccaggctgacgctcattatttcaacgcgttgtatgcttaaagcatgtataatttaatcctgtttgaaagataagtgaaagagaattgacataaaatagcaagaaagctctgaagtgaactgagctatataatttgggcataagcattcttaatatcacctttaaaagaacttgaaatatatttgatggtgggagaaattttagtatagatttgaaaactatcaaacagcatctgttgccttctccattttgattaaaacatgctcacagggaaaatagtggtttgtctgttaagtcaaacactaatgaaatatttgctaaaataatctctttaatttggacaacatttggcaataaagtgcactcattggatcatttgcctgtattctgaggcttccgagttaactgagcacagctaagtctaatatggtaatgggctctttgttaaaacctggacatatgcatttctcatgcttggttgtgttctcctctggtgaagagagataagaaacgttattttgatggcattaaaggtttctcattgacatatctaaataccatgagcctgaactgtctcatttcatcatgtctcatttctgtatatcttttgaatcaaaggcactatggccataaggctcaggtgaggaatgaggattagtggtattagtcaagtcaccaaaaacagagttagtaattaatctataaaaactgtagaaatgctttttgattagcctatgggagttcatgtgaaacataatattgctggcatgtgaaacaaaataaatccagcaggtaatatcagtagaaaatagaaataacttatcacgacatactattgttttatagaaattagactaagtgttttcaaattcaaattggttcttgtttctaaattactgttttaaattttatgtacgtgtatgtttgcaaatatatgtatacaatacacacacacacacacacacacagcactcttgcactccacacacataatgtgcttcgtgttaacattttctactcatagtcaattaggcaagtaactagtggacatacacacacacaaacacaaagtatacctacagctttgtcttgcatcctgcaaaaccaaagccttagttgtccatgtatacttggaagaactgacctgaaatgcccttccagaagacatatgtgtctagatcattatgttgcaacccttcattagttttgagtttttgcactattaaaagaagagcaaagtgatcacctttttagtctcttattccattaccatagctcaagatgggcttccttttattctttgtctataaaaatattcttatccacctggagagtcaggccaaataccactctctacataaaacttttcttccggtataatatttctcttatacttctttgttagtatttcatccaggcttgaatatggtcacatttccagatgcccttttctcggttggactgtcaggtcctggaaggcagggacttttgacaaatctgggagcagctaaagaggcagtgtcagtagaggcggcatttgaggcgctgacccatgacaggaggagcacgggctacagccgaggacacactgctagcagccataacagtggcaagggttgaacaagcagaaaagatgtaatagttgtgaagtcagaggagtagtcagcgacattggcctgggtccttccgtgaggagcagactcgaatgctaaaatacactcccatgcctcttcccacagcactgccaccacctagaattaaatttttgacagtaacagcaatcgcgtgtttttaggatgtattctttattagtaaactttattatttaatattatttctctgggtaaatccttcctcatccctaacactgaattctaggaaaatagtctcccaggaatcttcttagttgagggtaaggaactctagcagattgctattaaacaagtaacatgtaagtgaatatccttacacatcagttcattgttaacagactatttctctccttttaaccaagtattctcagtgattagcacagttccgaccacacatataggtgtcaataaatatttaaatgagtgactaacaataaatagtatttacttggggcttatgtatgttgacatggtacaaaatactttacagatattgtgtcatttaatagtactgttattcctatctgatagataagtaaactggaccttgagagtgtaaataatttgttctaagttgcatagttagtaggtggtaaaattaggatttgaaccaaagaaacctacatgcagtgccataactcttaacctgtatactacattatctcccaatactgaaaacatgcaggaatgaatgactgaatgtcccatacttgataagagacaatcattctctgagttaattgtgcatcaagaataaaaaactaattaggagtacaaagatgcagggcactgcccattcttataaacaatttgttttggtaacagtaactaatttttacttatttttgtacttgggatggaatgcgctatcaattttttaaacattatttttaaacctatctacatgataaaaagaaacttaagatgacaactatttcagcaaagaatgataagtgaagcaccagatgctacatattttcaactgcaaaaatatcatgggaagccagctgtatcttctaaaatttcatgatgtcattgtatggcttcaggatctatttagctgctttataatcttattagcttatctctgcttccagtcatgcactaggccttaattgcataggtttgtttataatattgttagtgttctggtgtcatatttcaagcaagaagcatcttgcttacaggctagtgcacaaaaacttgccaccctgagcaaaacctagtgatccattgcaaactgatatcactgtcccatttttctgaagaggtcatcgtttcctggcattgagctatcatgctagtgactcagagttttttattttattcaacttttcccaaaagttcgagtctaggatgatgatttcaaagtgtgatggaagcgaagtgtttcagttcagtgagtttcaatgtcacagtgaaatttaccacgttttccaggaatcagttacactgccaggtcgaaagagatttcaattatattagggatggaaataattttggatttcttacagttctactcttaatttcactgtcccatctttttgccccccaaatttattcatcattttattgtctccaatctacattcttttacaggttaatattttctcgttacagaattttagataagctattgtcagatattttcttggagatctcatacaaataattgagttgtaccactttcaaaagtttcaaaagtggaaccactggcatttcctgcccaataagagaggatgctcctcatggccctaccagaactaacttgggtcttcatagagaatgggtggcaaattatctccataagacactagctctacctatatctactggttagttgggcaaaaatgagaccatctttctttccctcattgccttctgtgagtaaaacctattaattaagactcttctatgtacaaccaaacaattcaaactggtctggatgtttggggaatgggaattgaactgatttgcttccttaagtgagaagtccaggagtttcagggatggcttcaggtggggctggtgtaggcaagagctccagcagtgccctggttttgcttcttctcagtcctcttggtggtagacttagctctccacccttggtatgttagcatcattctcagcttcattcacagagacaagtggcaggaatctccagcctttaaattccccaaattcctagaccagcagaaaaggacaaatgatattcctcataaggacaatataaaatttccccaaaatcaatgtcactggctttgattggcctgacttggccatgagctcactgggaagcaattactgtggccaggaaagtgtgatgctctgattggccagttctggattacaggccatccctggagtcatggtagtgttttctccacaggggccatgagaaccgaaactggaggagccagttcccaaatagatcagctagatacagttatgagaataggatgaatggatagtggcaactactaaacagcaccatttcagttattcatcctacttattcacacgtttggatattttctctttctctttctagttcttttaacaagcatattaaacactcggtctctgtttttctttgggcctgtttgctttgaagctgtcatcttacatctggcttttttatatttactcttgggtcatgcctacattttgctttgtcctttttacatattattaaattttgttatcattgttttctttggttactgtcctgaaacatctaatttcaacatctgctaatgtattcatttcttcatattatgttgcctggatttggggataaatattgaaaagttgaatgagtggccagttagcatctaagtacccctttacgcagacaatattatttttttgatagcaaaggagaaaagtcagtgttttgtagtaagtagagggcacagatgtgaaagaattaggaatgaaaagaaaaaaataaattaaaaatattgaaacatcttaattactctactcaaccttttcttcataaaacctttttatttgtgcaattaataaccaataaatgtatttgaattttgcctcctctttatgaccatgcccactggagctgttactgagtaggaaaatgattaagaggcaggtggcagaggagcgaaggatgtgaatcaaagaggctagataatgcacaagctcaatagtgagcgctaaataattgatacacaggtgtatacaatacacagacaggacactgatacacatggcaaaacactattgttactaatagtctcaggttagcagctgcctttcaccaataatgactctttataatcaattcttacaataatacagtccatgtttttgagccagcagattctaaaataacttcttctggaagcctttggatatatatttttcacttgataaaatagccattagacaacaatagaatggatactaaaatctgtcatgtatttacttcaacaaaaccatcatatatacctattgttagtagaatgcagtttttgaaacccataatgtctgcatatggtgctacattcaagagacagacaaggcatacagggaaggtaagtctttctctgtccttcagttacccagttctcctttccagaaaattgctgttacctgtttcttatgtatcctactacagacaatgttagcatttgcaaacatgtgtacctctacaaacataaatgaatttttatatacatacctagtaacacattattaagcaccttactttttcacttattaacatatgtcagaaatctctaatggttaaattacaaacaaggatgttgaggaccaggtttctaatataaattctgacattttgaagagtggtattgtaattgctatgatggtaggcataaaataagccaaaacacccccttggcccccggaataaacatatgaaaagaaatgtaaattcaaattcaaatgagaaaatcattgctacctatcaaataagcaaatgataacaacaatgaaatagttgttatttcaatataaaatcgataatgcctatggccaattgctgaagccagaaacctcagcatcatttctgatttctttctctgcttcatccacatttaatctttcactaaggcctcccatgtcatcctctaaagtatacgtattaaatttctccggaggacatagctgagttgcactcggaaactgtaagataataatatttgctgttttaacccaccatgctttgagctaatttgtttcactatgatatgtaaccaatacacctttaatagcaccttgttttttttagttatggtactttttaaactctgtcattgattgttgtgatatttattatctcgtttataaatgcatacgccagagagtaagaatcttgtgtatttggtccccaaaatacctgtgacatttattatagtcctgaaattcagttgttgaataaaagaataaataaatgaattgatattctggatttactgcctatgggaaaatgtaaactggtgtaagctcattgtctgtaagtgagtttatcacttttgtatcaaagatcttaactttgccaactctttgacccagcaatttcattgttagaaacttatcctggaatatgaaaatttagctagaataaagtttattgtaactgtgtttataatagcagaatagtgtaaacaatgcgtcccacaatagagtattcaattacggcgcatcctatgtatccatgaaaaataatggtatagaaaaatattcattaacacagagcatattcactatatgtggctgagtggtgcaagcaagttacaaatcagaaatataacaataggtcctgtttactgactgtttagtgtatgccattcactgtgatacacaccttacatgtgtgatgtcatatgtatagcatatccagaggggtgtgtgtgtgtgtgtgtgtgtgtgtgtgtgtgtgtagattcaaaggcatcagatagctgctttttccaaacactgatctacatacttggaatatgtatatagaaggttatgtcactaaaatgcttacagtgattatctccaaaaggaaaggtgggatttgtattttgctttttgtttctttccctcatttttctacggtgagaaggaacctcaggccaaaatggagagttgccaaatgataagggttacagataccaaacctagaaaaaggagccagagagacaaagagcagaacagtagaccaggggttgggcaggaatccaggacatgcctagaataaggagctattgttaatggttctgctgggatatgctgccacttctctaagataatagggatcctgtaaagtctgggaaagattctgggtagtacctctgctgggcactgacataattaggcatttatgtgctgctcaaactgaatggtctcagtcagctgcagtatggcctggctggagagaaggttgccaggtcagaggagcttttaaagaggtgtctgttctactgagccatgctggtttgtgtgatctggtatcttcttggtgctgactgctcaggactgagaccttctgcaggttgaagcatttgaagaacatagtccatttcacctatgtattctggttggtttggctctcctagtctgcagtgtttagatgccttgtcatcacttgcctgaagacctgactgaaatttggaatcgattgccagaattgtctattccttgagcagtattgatttcaagtgaaacaaagtttctagagatatgggcatggagattttgtttgctaggatgctctttaagtatcagcttcaatggtgatatcaacataagaatcagaattttcaactgttaggatgctataggttcattcatggaccagattactcattttaattcctgagatctttactggggtggtcagagtgaaaaagtacggcatgaaccactgtacgcagaaaatcatagaaattgttaaacatccttgatc

SEQ ID NO: 1934 - DNA, 615 bp, Homo Sapiens
gcagcccgggctcagtctccgccgccgccgtgaacatggagcccccgtgacgcaccggcccaggctgcgctggggccccgcggctgctgttgctctgcagtcctgctggctggcgcacccagatgcccatggcggatggtgcgcttgtctgtacccccgctggtggaggtgatgcgatggaaagtctgtcattctggactgcacccctacgggaacccacgtaccattatatgctggaatggttccttaccgaccgctcgggagctcgcccccgcctagcctcggctgagatgcagggctctgagctccaggtcacaatgcacgacaccctggggccgcagtcccccataccagctggactcccaggggcgcctggtgctggctgaggcccaggtgggcgacgagcgagactacgtgtgcgtggtgagggcaggggctggctggcactgctgaggccactgcgcggctcaacgtgtttgcaaagccagaggccactgaggtctcccccaacaaagggacactgtctgtgatggaggactctgcccaggagatcgccacctgcaacagccggaacgggaacccggccccaagatcacgtggtatcgcaacgggcaa

SEQ ID NO: 1935 - DNA, 488 bp, Homo Sapiens
tttttttttttttttttaagaatggcaccaccgtttattgctgccagtctatctgaaattccgtgagtctttctgggtttttggagataagtgcaccagagttaaattaaatcatttaatttccaggagtgataggcatagggacacattactcaaatggatctggaatcccatttttttccaagaaatctttcttgattcattggatgagtggctataatggacatatcttcctattaattgccaacagcacccccagctcccaaattcattcttttgtctatgtgtagaggtaacagcccttatcagatgttacatttgtttaattggtgactgtgtggctgtgatttaatctaagtttccagggagctatgggttagatgccaagctcactaccttgagcagacagggactgctggagaggagggtggggtgagctccctgagacccaacgagagcctgggaactggctgccattattgtgttgg

SEQ ID NO: 1936 - DNA, 339 bp, Homo Sapiens
tgttgagcagaacaacggctactgcaccgtgggagtcgagcccacctacctgtcctcccagaacggccagcccctgtggatcctgggggatgtcttcctcaggtcctactattccgtctacgacttgggcaacaacagagtaggctttgccactgccgcctagacttgctgcctcgacacgtgggctcccctcttcctcttgaccctgcaccctcctagggcattgtatctgtctttccactctggattcagccttctttttctggactctggactttctctaataataaatagttcttctttatgttggtcatcctgttgtttttggaagggagtttt

SEQ ID NO: 1937 - DNA, 604 bp, Homo Sapiens
  misc_feature (383)..(383): n is a, c, g, or t
agagagcgagctccagtggcagactctagtttctggaataagagcaatacttttaccttcacaggtttgagcctgttgtttgctatattttataactcgttaagagttttttttaatgcactggtatcttgaaggagttcttttcctctggcagtagacctctggttttataatggaaatctttgaacaagtaagatctgcttagatttacattcatctttggtagagtaaacctcatctctaaattaaagagtttgtaatttcttacctttatgattagaatgaaaattcttggagagggcctaatccacatgtcagtttttaaagcttaaagacaaaagacaacactggcatttgtgttaatatctgcatttaaatatttntcatacacacacaaacacacacacacacacacacttagctatatggaaaaaatggatccctaccttacagtatatgcaaaaagtcaattctagatggggaaataaaactttaaaaaatttttaaagaaaatccagggccaatattctttatgaccttaaaattaaagaagggattttttaaaacaagaaactaccgcttattaagggaaaaaagttggttt

SEQ ID NO: 1938 - DNA, 3950 bp, Homo Sapiens
cgagaactagttttgttccgtgccctctggactggaaccttttggagagaacccccggcaggaccaaccccgcacccgccagcaccgcggcaatgtccagcaatagttttccttacaatgagcagtccggaggaggggaggcgacggagctgggtcaggaggcgacctcaaccatttccccctcgggggccttcggcctctttagcagcgatttgaagaagaatgaagatctaaagcaaatgttagagagcaacaaagattctgctaaactggatgctatgaagcggattgttgggatgattgcaaaagggaaaaatgcatctgaactgtttcctgctgttgtgaagaatgtggccagtaaaaatattgagatcaagaagttggtatatgtttacctggttcgatatgctgaagaacagcaggatcttgcactcctgtccataagcacttttcagcgagctctgaaggacccaaaccaactaattcgtgcaagcgctttgagagttctgtcaagtattagagtgccaattattgtacctatcatgatgcttgctattaaggaagcttctgctgacttatcaccatatgttaggaagaatgcagcccatgcaatacaaaaattatacagccttgatccagagcagaaggaaatgttaattgaagtaattgaaaaacttctgaaagataaaagcacattggtagctggcagtgttgtgatggcttttgaagaagtatgcccggacagaatagatctgattcataaaaattaccgcaagctatgtaacttactagtggatgttgaagagtgggggcaggttgtcataatccacatgctaactcgatatgctcggacacagtttgtcagcccttggaaagagggtgatgaattagaagacaatggaaagaatttctacgaatctgatgatgatcagaaggaaaagactgacaaaaagaagaagccgtatactatggatccagatcatagactcttaattagaaatacaaagcctttgcttcagagcaggaatgctgcggtggttatggcagttgctcagctgtattggcacatatcaccaaaatctgaagctggcataatttctaaatcactagtgcgtttacttcgtagcaatagggaggtgcagtatattgtcctacaaaatatagcaactatgtcaattcaaagaaaggggatgtttgaaccttatctgaagagtttctatgttaggtcaactgatccaactatgatcaagacactgaagcttgaaattttgacaaacttggcaaatgaagccaacatatcaactcttcttcgagaatttcagacctatgtgaaaagccaggataaacaatttgcagcagccactattcagactataggcagatgtgcaaccaacatcttggaagtcactgacacgtgcctcaatggcttggtctgtctgctgtccaacagggatgaaatagttgttgctgaaagtgtggttgttataaagaaattactgcaaatgcaacctgcacaacatggtgaaattattaaacatatggccaaactcctggacagtatcactgttcctgttgctagagcaagtattctttggctaattggagaaaactgtgaacgagttcctaaaattgcccctgatgttttgaggaagatggctaaaagcttcactagtgaagatgatctggtaaaactgcagatattaaatctgggagcaaaattgtatttaaccaactccaaacagacaaaattgcttacccagtacatattaaatctcggcaagtatgatcaaaactacgacatcagagaccgtacaagatttattaggcagcttattgttccgaatgaaaagagtggagctttaagtaaatatgccaaaaaaatattcctagcacaaaagcctgcaccactgcttgagtctccttttaaagatagagatcatttccagcttggcaccttatctcatactctcaacattaaagctactgggtacctggaattatctaattggccagaggtggcgcccgacccatcagttcgaaatgtagaagtaatagagttggcaaaagaatggaccccagcaggaaaagcaaagcaagagaattctgctaagaagttttattctgaatctgaggaagaggaggactcttctgatagtagcagtgacagtgagagtgaatctggaagtgaaagtggagaacaaggcgaaagtggggaggaaggagacagcaatgaggacagcagtgaggactcctccagtgagcaggacagtgagagtggacgggagtcaggcctagaaaacaaaagaacagccaagaggaactcaaaagccaaaggaaaaagtgattctgaagatggggagaaggaaaatgaaaaatctaaaacttcagattcttcaaatgacgaatctagttcaatagaagacagttcttccgattctgaatcagagtcagaacctgaaagtgaatctgaatccagaagagtcactaaggagaaagaaaagaaaacaaagcaagatagaactcctcttaccaaagatgtttcacttctagatctggatgattttaacccagtatccactccagttgcacttcccacaccagctctttctccaagtttgatggctgatcttgaaggtttacacttgtcaacttcctcttcagtcatcagtgtcagtactcctgcatttgtaccaacgaaaactcacgtgctgcttcatcgaatgagtggaaaaggactagctgcccattatttctttccaagacagccttgcatttttggtgataagatggtctctatacaaataacactgaataacactactgatcgaaagatagaaaatatccacataggggaaaaaaaacttcctataggcatgaaaatgcatgtttttaatccaatagactctcttgagcctgagggatccattacagtttcaatgggtattgacttttgtgattctactcagactgccagtttccagttgtgtaccaaggatgattgcttcaatgttaatattcagccacctgttggagaactgcttttacctgtggccatgtcagagaaagattttaagaaagagcaaggagtgctaacaggaatgaatgaaacttctgctgtaatcattgctgcaccacagaatttcactccctctgtgatctttcagaaggttgtaaatgtagccaatgtaggtgcagtcccttctggccaggataatatacacaggtttgcagctaaaactgtgcacagtgggtcattgatgctagtcacagtggaactgaaggaaggctctacagcccagcttatcataaacactgagaaaactgtgattggctctgttctgctgcgggaactgaagcctgtcctgtctcaggggtaacctgcttacatctggactttagaatctggcacacaacaaaagtgcctggcatccactactgctgcctttcatttataataatagcccttccatctggcagtgggggtagaatacactcttgacattcttgtctcctgctttagaatgctagtgtgtatctatcatgtatgcaatactttccccctttttgctttgctaaccgaagagcatatattttactgtcagttgtctcaactcttgaatccatgtggcgttttctctgtcctgctgcttcttttggcctcctcgttttccttctctttttcgacaatggtagacatgaatgagatatttaaagttcattggaaatcttcttccctacagcagtaagcaaaaattagcaaagagatagtctaaatggcctctcagcttggtatgtgaaaatgagatcacatactttttaaatccaaatacaaaagcatagtctctgcaagattttgttctttgaatttcttgatattgtaattgattattgataactgtcatcatgaaattatctctcaataataagataaataaactagcatatgaatc

SEQ ID NO: 1939 - DNA, 587 bp, Homo Sapiens
gagaagaggatgacatttattcactcaactgaacacacacacacatacacacacacacacacacgcagcactgatggagagtacagctgcttatatattcatctataattgcaaagacaaaagtgtatcttccagaagatgcctctggttgctaaccagtctctgtgaagaagctgcagttacccaggcttctgtaactcaggacattgaagtagtcatgcagctcggcacagtcctctccccgctgctctccacagagcccagcaggtgcagcttctgcctggacacagcttcctgggggtgagggagcactggggctccattcctcctgtccagctgattttctcctgaggtcaccttccacagaatggattctgagggctttctttctagtcaacgcgaccaccacgatgactgctgtgcagatgaccaccagcgtcgggcccatggctccaagcaatggaatctggaacctggaacggtgctcagccactgagcttcctaggacttccaggaggatctcccaatgtaaggtccacaagggtagtgttatagattccgaataatcccccgtatcgtttacaggg

SEQ ID NO: 1940 - DNA, 549 bp, Homo Sapiens
aacttttattaatctttattttaaaacataaccagatgcaccttggttgtttacattctctggttgccattcagtctcaaagtaaacactgggagcatatgataaatcgtagtttaaggaagccatagcacttacagagttctcaaatggttacaatataaaatctgtcataaaaatcagtaaaagatgcaaggtagaacacattttaacactggtacaatggcagtagcagctttgcaaatgtttgtctatatgatttccacaggactttttttttttgcctggcctcattatgtagcaaagcattttttcttttctttttgagatggagtcttgctctgttacccagcaggctggagtgcagtggtataaacacagctcactgcagcctcaacctcccgggctcaagtgattcttccacctcagtctcctgagtagctgggactacaggcacacatcaccgctcccggctaatttttcgttttttgtagagttggggtcttgcagtgttgcccaggcttgttttgaactcttggcctcaagcgaacc

SEQ ID NO: 1941 - DNA, 471 bp, Homo Sapiens
  misc_feature (6)..(6): n is a, c, g, or t
ggcacnagcggcctggtcacatgctctccggagagctacgggagggcgctgggtaacctctatccgagccgcggccgcgaggaggagggaaaaggcgagcaaaaaggaagagtgggaggaggaggggaagcggcgaaggaggaagaggaggaggaggaagaggggagcacaaaggatccaggtctcccgacgggaggttaataccaagaaccatgtgtgccgagcggctgggccagttcatgaccctggctttggtgttggccacctttgacccggcgcgggggaccgacgccaccaacccacccgagggtccccaagacaggagctcccagcagaaaggccgcctgtccctgcagaatacagcggagatccagcactgtttggtcaacgctggcgatgtggggtgtggcgtgtttgaatgtttcgagaacaactcttgtgagattcggggcttacatgggatttgcatga

SEQ ID NO: 1942 - DNA, 5160 bp, Homo Sapiens
gttccaggtgcaagcgccgggtttgctgcccgctgggcgcccctgcagcggcccgagctgtggccggcgtggatgaggggcaggcgaggcagggccgcccctccagtattgccgcccctcccgccccagggcagggctgggagggtacagcccgggggcgggctcgggtcgcctcccggccgccgcgtcctcgctgccccgggccgggcgggcgggcgccgagagcctcccagcccgccccgtgccccgcccgcccggctgcttccgcggcggcgctgcccgcacatgggctaggctgccaggatgttcagcttcgaaggcgacttcaagacgcggcccaaggtgtcccttggcggcgcgagcaggaaggaggaaaaggcttctcttttacatcgtactcaggaagaaagaagaaagagagaggaagaaaggcgaaggttgaaaaatgcaataattatccagtcatttattcgaggctatagagacagaaaacagcaatattccatccaaagaagtgcatttgatcgctgtgctaccttgtcacagtccgggggcgcttttcccattgctaatggccccaaccttacccttttggtaaggcagcttctgtttttttacaaacaaaatgaagactcaaaacgtttgatatggctgtatcagaacttaattaaacacagctctctgtttgtcaagcagttggatggatctgagagacttacatgcttatttcagataaaaagattgatgagcctctgttgcaggttgctgcaaaactgtaatgatgacagtttgaatgttgcacttccaatgagaatgcttgaagtattttcgtctgagaatacttacttgcctgttttacaagatgctagctatgtggtgtcagtgattgaacaaattttgcactacatgattcacaatgggtattataggtctctatatttgttgattaacagcaagcttccatcaagtattgaatattctgatttatctcgagttcctatagcaaaaattttgctagagaatgttctaaaaccattgcactttacttacaactcctgtccggaaggtgcgaggcaacaagtttttacagccttcacagaggagtttctggcagcaccttttacagatcagatttttcatttcatcattccggcgcttgcagatgcgcagaccgttttcccttacgagccctttctgaatgcactgttgttaatagagagtagatgttcaagaaagagtggtggagcaccctggcttttctatttcgttttaactgttggcgaaaattatttgggggccctctctgaggaagggctgctggtgtatttgcgggtgctgcagaccttcctctctcagttaccagtctctcctgccagcgcgagctgtcacgactcagccagtgactctgaggaggagagtgaagaagccgacaagccctcaagcccggaggatggcagactgtcagtatcatacataacagaggaatgcctgaagaagctggacacaaagcagcagaccaacaccctgctcaacctggtgtggagggactctgcgagcgaggaggtcttcaccaccatggcctccgtctgccacacgctgatggtgcagcaccgcatgatggtacccaaagtcaggcttctctacagtttagcctttaatgccaggtttctgagacatctttggtttctaatatcttccatgtcaacacggatgatcacagggtctatggtaccgttgcttcaggtgatatccaggggttctcctatgtcttttgaagattctagtcgaatcatcccactcttttacctttttagctccttgtttagtcattcactaatttccatacatgataacgaattcttcggtgatcccatagaagttgtaggtcaaagacaatcatcaatgatgccttttactttagaagagctgataatgttgtctcgatgccttcgagatgcatgcctggggatcatcaagttggcttatccagaaaccaagccagaagttcgagaagaatatattacagcatttcagagtattggagttactactagctctgaaatgcaacaatgcatacagatggaacagaaaagatggattcagttatttaaggttatcaccaatctagtgaaaatgttgaagtccagagacacgaggagaaatttttgtcctccaaaccactggctgtcagaacaagaagatattaaagcagataaggtcactcagctctatgtgccagcatccagacatgtgtggaggttccggcggatggggaggataggcccgctgcagtccaccctggacgtgggtttggagtccccgccgctgtctgtgtctgaggaaagacagcttgctgtcctgacagagttgccttttgtggttccatttgaggaacgagtaaagatctttcagaggttgatttatgcagataagcaagaagttcaaggagatggtccatttctggatggaattaatgtcacaataagaagaaattacatttatgaagatgcttatgacaaactttctccagaaaatgagcctgatttgaaaaagcggatccgtgtgcacttgctcaatgcccatggcctggatgaagctggcattgatggtggtggtattttcagagagtttttaaatgaactactgaagtcaggatttaaccccaaccaggggttctttaagactactaatgaagggcttctgtaccccaacccggctgctcagatgcttgtgggagattcttttgccagacattactacttcctagccagaatgcttggaaaggctctctatgagaacatgctggtggagctgccctttgcaggcttctttctttccaagttgcttggaaccagtgccgacgtggacattcaccacctcgcctccctagaccctgaggtgtataagaatttgctctttctgaagagctacgaagacgatgtggaggagcttgggctgaacttcactgtggtgaacaatgacctgggagaggcgcaggtagttgaactaaaattcggtgggaaagacatccctgtcaccagcgccaaccggattgcgtacatccacttggtggcagactacaggctgaacaggcagatccgccagcactgcctggctttccgccagggccttgccaatgtcgtcagcctcgagtggctccgaatgtttgatcagcaagaaattcaggtattaatttctggtgcacaagttcccataagcctagaggacctaaaatcctttacaaactattcaggaggctattctgcagaccatcctgttattaaggtcttctggagagttgtggaagggttcactgatgaagaaaagcgcaaactgctgaagtttgtaacaagctgctctcgaccccctctcttggggtttaaggagttgtatcccgcattttgtattcacaacggaggctccgaccttgagcggctccccacagccagcacctgcatgaacctgctgaagctccccgagttctatgacgagacacttttgcgaagtaaacttctctatgcgattgaatgtgccgctggctttgagctgagctgaagctgatgctggggtcagacccctacagagaaccagtgcttccttcgtcagcagcgcctccccagacccacgaggatactcacactgcacgcctgaggctctcctaagctccttctttcattctgccattcctccctcccttccttttttaaatgatttttattacggtgtggtcacttatttagatggacattgcttttcaaataacttaaaataacacgttatgtgccatgtggctactttagtaatattgccaagaagagcacagtttttacactagtggcatctcagtgaaattaaccaaagatgaagctttggctttgctggtgagatcagagccctcctgagcaggcagcgccactccagggttcagacagggctgcacaggcggcagagatacagggtctgagggctgagacgccatggggccgctgctgcttatgtggttggattgtttacaagcctcattattaaaactgaaggcattttttttttctgctgcctttcccaaagtggttaggtttggaaaagagatgatgatggtaatattttatttgtgctttttaagccatttccccaaatgggactagcatgcttgttttcagtataccgtggcctgcctcatgatggtttggagatactgtctgtggatgtgaggtggggacttcattcattgtcctatttctatctccactttgtgcctggagagctttcaggggaggtggaggaggagggtctgccaagctactgcaacatctgtcacccactatacccagttacttgggggaggacagacactgtggtgtcattaaagttgtttgaaccaaagtggcggctgcatctttgtcccgatgctagccgtgccggtctcccatcatccgctcgccctcctttcccctgggctgcgcccacttgtcttcctggatatttgggggtgactcgccatgcttggcaccctctgcttcctggtgctgctctgactcgaagacgggacagtccctggtgcacatccagggaagaggagtgtcggtagttcttgcagtaggcactttatcaggacctgacctgttgctgggtgattttagtctctacaaacagaaagcgtttcaaagcgtcagctgtgggagcagagtgaccctttgctgatgctggggggaggggatctaaatcctcatttatctcttctatgtctagtattttactgtcactggaggctctgtgggctgtcatagttaattgaccataattagcaatatacttttaaagtgggaaagctgaatgacacttttaagacaatgaacattatcaaaacaaaatgtataatttcttaatttgaataataagcgtttaaatgctatttgtagtcttgatatacagaaataaaataattagggttggtcttttttattttaggttttatgttgaatgttctatatcttattagttaatttgtatattttattagtattttggaaatagcatatctgagactgaggagaaattgacaattcacttatttgtggtttttttctcagctattctgagcttatttatttatttgtatgttctaatggctaaacatttacattaaatattttttttccc

SEQ ID NO: 1943 - DNA, 2260 bp, Homo Sapiens
aagcccagcagccccggggcggatggctccggccgcctggctccgcagcgcggccgcgcgcgccctcctgcccccgatgctgctgctgctgctccagccgccgccgctgctggcccgggctctgccgccggacgtccaccacctccatgccgagaggagggggccacagccctggcatgcagccctgcccagtagcccggcacctgcccctgccacgcaggaagccccccggcctgccagcagcctcaggcctccccgctgtggcgtgcccgacccatctgatgggctgagtgcccgcaaccgacagaagaggttcgtgctttctggcgggcgctgggagaagacggacctcacctacaggatccttcggttcccatggcagttggtgcaggagcaggtgcggcagacgatggcagaggccctaaaggtatggagcgatgtgacgccactcacctttactgaggtgcacgagggccgtgctgacatcatgatcgacttcgccaggtactggcatggggacgacctgccgtttgatgggcctgggggcatcctggcccatgccttcttccccaagactcaccgagaaggggatgtccacttcgactatgatgagacctggactatcggggatgaccagggcacagacctgctgcaggtggcagcccatgaatttggccacgtgctggggctgcagcacacaacagcagccaaggccctgatgtccgccttctacacctttcgctacccactgagtctcagcccagatgactgcaggggcgttcaacacctatatggccagccctggcccactgtcacctccaggaccccagccctgggcccccaggctgggatagacaccaatgagattgcaccgctggagccagacgccccgccagatgcctgtgaggcctcctttgacgcggtctccaccatccgaggcgagctctttttcttcaaagcgggctttgtgtggcgcctccgtgggggccagctgcagcccggctacccagcattggcctctcgccactggcagggactgcccagccctgtggacgctgccttcgaggatgcccagggccacatttggttcttccaaggtgctcagtactgggtgtacgacggtgaaaagccagtcctgggccccgcacccctcaccgagctgggcctggtgaggttcccggtccatgctgccttggtctggggtcccgagaagaacaagatctacttcttccgaggcagggactactggcgtttccaccccagcacccggcgtgtagacagtcccgtgccccgcagggccactgactggagaggggtgccctctgagatcgacgctgccttccaggatgctgatggctatgcctacttcctgcgcggccgcctctactggaagtttgaccctgtgaaggtgaaggctctggaaggcttcccccgtctcgtgggtcctgacttctttggctgtgccgagcctgccaacactttcctctgaccatggcttggatgccctcaggggtgctgacccctgccaggccacgaatatcaggctagagacccatggccatctttgtggctgtgggcaccaggcatgggactgagcccatgtctcctgcagggggatggggtggggtacaaccaccatgacaactgccgggagggccacgcaggtcgtggtcacctgccagcgactgtctcagactgggcagggaggctttggcatgacttaagaggaagggcagtcttgggacccgctatgcaggtcctggcaaacctggctgccctgtctcatccctgtccctcagggtagcaccatggcaggactgggggaactggagtgtccttgctgtatccctgttgtgaggttccttccaggggctggcactgaagcaagggtgctggggccccatggccttcagccctggctgagcaactgggctgtagggcagggccacttcctgaggtcaggtcttggtaggtgcctgcatctgtctgccttctggctgacaatcctggaaatctgttctccagaatccaggccaaaaagttcacagtcaaatggggaggggtattcttcatgcaggagaccccaggccctggaggctgcaacatacctcaatcctgtcccaggccggatcctcctgaagcccttttcgcagcactgctatcctccaaagccattgtaaatgtgtgtacagtgtgtataaaccttcttcttcttttttttttttaaactgaggattgtcattaaacacagttgttttct

SEQ ID NO: 1944 - DNA, 623 bp, Homo Sapiens
ccatagaggatcccggtgtaaccggatcaggttggtgggaagcgtgcggtgccgcagcaatggcgggctcacaactgccacgggtactggcaattggttttcggctttggcgctcggggtgactctcctcaaatgccttctcatccccacataccattccacagattttgaagtacaccgaaactggcttgctatcactcacagtttgccaatatcacagtggtattatgaggcaacttcagagtggacgttggattacccccctttctttgcatggtttgagtatatcctgtcacatgttgccaaatattttgatcaagaaatgctgaatgtccataatttgaattactccagctcaaggaccttacttttccagagattttccgtcatctttatggatgtactctttgtgtatgctgtccgtgagtgctgtaaatgcattgatggaaaaaaagtgggtaaaagaacttacagaaaagccaaaatttattctgtcggtattacttctgtggaacttcgggttattaattgtggaacatattcattttcagtacaatggctttttatttggattaatgctactctccattgcacgattatttcagaaaaggatatggaagggg

SEQ ID NO: 1945 - DNA, 608 bp, Homo Sapiens
gagccgagaggggcgaatccggcttcgctccgcgccgccgggaggagctgtctgcagccccctcctcccgccctcgcctctccctcctccttctcccgccctcctcgccgatccgggcggtgctggcagccggagcggctggcgtggcgggccgagcagccggggcagccgcgcgtggtgcatccactggtgcgccgatgcctccgtcctgtgtctctatccctcccgtggcctttgtcagctgctgcccgctgggagctggggcctgagagcgccgtgttccacgtcagacagccccgcaggtcagctggccgggccgagggcgccagagggggccatgtcgtaccagggcaagaagagcatcccgcacatcacgagtgaccgactcctcatcaaaggtggacggatcatcaacgatgaccaatccctttatgctgacgtctacctggaggatggacttatcaaacaaactaggagagaacttaatcgttcctggtggagtgaagaccattgaagccaacgggcggatggttattcccggaggtattgatgtcaacacgtacctgcagaagccctcccagggatgactgcggctgatgacttcttcc

SEQ ID NO: 1946 - DNA, 368 bp, Homo Sapiens
  misc_feature (302)..(302): n is a, c, g, or t
gtcttttcactctgctttgggtgttgaaggaagacgagcttctcacggagcctctcttgagcctcttggcagtttcccccttggtgcccctcacgtttccaccagaaacgtgaaggcagaggccacagattctccctgagccacctcacttggaagcaccatgtccggatgagatcgcacttcctgcagtgggcattagccacgtccaggtagaaccaaacctgttgcttttgtatgttgggtcaacttggcctgacgtttcagaggtagacacgagatagggagtttgttgcgggggtggngagaagtggtagacatgctggctaactgattatgattaagagaaacttagaagctgaagccagaga

SEQ ID NO: 1947 - DNA, 1902 bp, Homo Sapiens
tctctaagtgagtttggtcggaggctgccattcacagtgacttgtatttgccacagcagctctttctaagcccagtcctgggattatctcagggatcatcccacaccccagcggggagatgggccaagtccccacctgacctcatcttaggtagagaggcttccatggaagtgtgggctggctgtggggggttgagacctagccccgttcttttgacatttcaccctgtgttctccaaactccagcaagcagcttccatagctcattaaatttgactgaaggtctgatggcttgcaaagcaaattctttacaactgttataaaggtttcattgcttaagcatataatctagcaaaactgccaagccccctccactccctaaactctaagacttgccagggaagagaacagtggccagtggactgcaggagtaactgcactcagcccagaactccctggaggacacagggaaggttctggaaaggtggcggtacctcacagggagagacgtggtgctccagggcccaacttgctcatgttcagatcctcactctgcaacccaccagccggctgtgagtggctacacaatctctgcctcagtttccctatctgtacatgggttgttcatagcctccacctcagagggtagtaatgatgccaagctcttagaacagtgctcagcatgtgtgcatcctgtgcctactctatgccaagcactacagagagaaaaatgaacaaaatagggagaaatccctgccctcatggagtttacatcggggcagggggcgggggcggcacagagcagacaatcaatacagtgattagcccccagttaggttaggcatttccaatctttgccaataagccacatatttgcccaagttagggtgcatccttcccatgaactttgactgtgacctttgactatggggtgacatcttatagctgtggtgttttgccaaccagcagctcttggtacacaaaatgtgctgctagcaggtgccccggccaaccttgtccttgacccacctgcctgttaagaaaagggtgttgtgttttgcaacagcagtaaaatgggtcaaggtttagtcagttggaagttgtgtcaaaactcactatggttggttgagggctcgaagtctcccagcattcattaacaactatctgttcaatgattatctccctggggcgtgttgcagtgagttggcccaaagcataactgaccctggccgtgatccagagacctgccccctgacgtcagtggcgagcctccctgggtgcagctgaggggcagggctattcttttccacagtatttaaagctgggaggttctgccaccaagcacggccttcccactgggaacacaaacttgctggcgggaagagcccggaaagaaacctgtggatctcccttcgagatcatccaaagagaagaaaggtaagtagagctttgcatttacattttgaaaaattacaaagatgaactcatttttttcctgagagcaataactatttggcaatgcacagccctggcaaaaggccgtcgaatgtgtttgaaggtgtctgttgttgtttttgttcaggacgcttgcgttttctatttcaggtgacctcacattcgtgccccttagcagcactctgcagaaatgcctcctcagctgcaaaacggcctgaacctctcggccaaagttgtccagggaagcctggacagcctaccccaggcagtgagggagtttctcgagaataacgctgagctgtgtcagcctgatcacatccacatctgtgacggctctgaggaggagaatgggcggcttctgggccagatggaggaagagggcatcctcaggcggctgaagaagtatgacaactggtaagctcggcccccgctgcctgtcccagcaccc

SEQ ID NO: 1948 - DNA, 315 bp, Homo Sapiens
  misc_feature (61)..(61): n is a, c, g, or t
  misc_feature (232)..(232): n is a, c, g, or t
  misc_feature (239)..(239): n is a, c, g, or t
  misc_feature (246)..(246): n is a, c, g, or t
  misc_feature (273)..(273): n is a, c, g, or t
  misc_feature (286)..(286): n is a, c, g, or t
caagggaaggggaggagaagaggggtggggaaggacattccacaggcttttttggcccctnccagagacagaagggggtcaaagagaaagggaaaggagcaagccaggaagccagacaacaacagcatcaaaacaaggctgtttctgtgtgtgaggaactttgcctgggagataaaattagacctagagctttctgacagggagtctgaagcgtgggacatggaccgttcantgggatngcaaggngaattctgtccctgaggacagggactnaagctgggatcangcgtttcctgggaggacaccacggttgat

SEQ ID NO: 1949 - DNA, 448 bp, Homo Sapiens
tctagattcactggagctcaggattcatgtgtccttctttccctactctaccttctaccttggtctggacacattctggaacactggacaccctcgccagggccacttctgcactagggctctgtgctggaacccaggcatgctgccagccttttctctggatctgtcaggcctctgtccttgactcagatggacccctggtttccaagtagaaagaggctagatttgggccttgtctagctgttggctttggctgaaccggaaccagtctcagatgaccacgggtttaaccttcttatcccagagacacccaattctagagctttatggagccgtacttccccctgaatcctagctctaggacatagatcatgactctcagcccttttacccaggatggagctggggcctgtatagccatattattgttctaagtaagttctagccc

SEQ ID NO: 1950 - DNA, 93443 bp, Homo Sapiens
gatcacgaggtcaggagatcgagaccatcctaacacagtgaaaccccgtctctactaaaaatacaaaaaattagccaggcgtggtggtgggtgcctgtaatcccagctactcaggaggctgaggcaggagaatggcgtgaatccgggaggtggagcttgcagtgagccgagatcgcgccactgcagtccagcctgggggacacagcgagactccgtctcacaaaaaaaaaaaaaagaaaagtttattattcttaggcccagcatggtggcttgcgcctgcaatcctaacactttgggaggcagaggctggcgcatcacttgaggtcaggatttcaagaccagcctggccaacacggtgaaactctgtctctactaaaaatacaaaaattagccggagtggttgtgggcacctgtaatcccagctaatagggaggctgaagcaggagaatcgcttgaacccagaagcacaggccacaggctgcagtaagccgagatcaagccactgcactccagcctgggcaagagagccaggctctgtctcaaaacaaggaagagaacagtatgttattcgtaacaaaataattaatattttaaaggagatgattggtcagttacattaatgctgtgggctacaggcacagtaagccttttttcagcagggttacctcgatgagagcctggctggcttcctcacttagccgcggcatgatggtgctgtgcgcgtaggcaatgtagtcctttagcaccgccatgtccaggagctcctcctctgcctgctcctcgctctggtagtacagtgcgaccaggtggtgagccagacgcctgtcataggcttcgtcctgagggtccagcaagaggaagatcaaatcaaacctaagaaaacaaagtaaaaatactgtttttccagcaccttgtgaggccgaggcaggtggatcacctgaggttggtagtttgagaccagcctggccaacacggtgaaaccttgtctctactaaaaatgcaacaattagccaggagtggtggtgcctgcctgtaatcccagctacttgggaggctgaagcaggagaatcgcttgaacctggaaggcgaaggttgcggtgagccaagttcgcgtcactgcactccagcctggccgacagagggagactctgtctcaaaaaaacaaacaaaaaaacccaaaacaacaacaaaaaaactgttttcctagttgagacaccaatacacctacaaacgacgtactaaagactgcttgagcaccacagatgtgcagtcaatgtgcaccctgtgagcgccatcagggagaagcatctttgcctggtgtggaaagggccttcgtgtccatccactcaccccactcaccctgtgctgtccctagtccttaggtcggcccagggaacggctggggaccaatcagctgagtcaaaggaagtcttcccttagggaaacgttactataattttgacgatggaaagttttttttttttttttttttttgagacagagtctcactctgtagcccaagctagagtgaagtggtatgatctcagctcactgcaatctccactcccccaggctcaagcaattcttgtgcctcctcagcctcccgagtagctgggattacaggcatgcgccgccacgccgggctaattttttgtattttagtagagatggggtttcatcaagttgcccagggtggcctcaaactcctgagctcaggcgatccacccacctcagcctcccaaagtgctggaattacaggtgtgagtcactgtacctggctgacaatggaaagatttgaatgaaaacacattcaactgtttttttgggaaaaaaaacttctgtcaaaaaaaaagaaaaaaaagcaagtaattaaaacctaaaatccatttatgaaaaatgtccaatatttgtagtggggccaagagtgaagattatgtgattgcactttaataaatctaacttttcagagcctcatctactgtacggaattgttctctgttgactctcagcagtggctttaggactaagagtagtgagtgacagccatgtgtaaacggcgtgggaggtaaacatcccaactgcttaaaaaacaaatgagaacacacatcatccttgtcgtgaaaactcttgaccaaccaaatttgaaacatcttgataagagtgaagagtttccattagcagttgctgaaatcttagtagctccttttcaatctcaccctgaatattctacaaatgaacaaaataaaaatctgttttaataccttgataataaagtatgaggcagctggatgttttcaatggttgtttttttaggattccactgagactcaatgggatttgctgctgccaggacagaggtgcgcgcattgagctgacagatgatcccagcctatcagagcaaagagtgcagttagaagcctctccctgacgctggcaattaacaagcaccgtcttcgcccggccacctactaaacccatattccctccactgagtttctattgcctgagccatgttgcctttactgacttcagcagttcacctggataagccctgtcctcagattcatgccaaggactgagtttagatgaatgtgtgctataaccacatctttctcaggaagcaggcaccttgcaagagctttaggacaaattcaaggctagtacagcaataaagacaaaacgtgacaccctgtagaagacatgttgagatttagctgaaatatgatgtggaaagcacttatcaatctccccaagttagaaccaaggtagcacagcacagttccacagaccctgtctttcaagggtccacatattttaaacacgtccatgttcacggtggagaaggcgactcacctttgcaatggacagagtctgctgttccatgacttcatgcaataccgatcttgtactttcattcatcttgtcgaactcatcgatacagcagatgccgttgtcactcaggacaagagcacctgtctgcaggaccagctgccttgtctcagggtctttcattacgtacgcagtgaggccaactgcactggagcccttcccagacgtgtactggcccctggggacgaggttgtacacgtactgcagcagctgggacttgctggtaccagggtcgccacacagcaagatgttgatctcagcccgaaatttgccccttccagtgtgactaaaatccttccttgtcccgccaaagagctgaagcaaaattccctaaataatcagagacatgtctaaacattcattttctgcacagttaactgagatgtagtttaaactttagaggtacttttctctcttataaagaactacaattaagaaatcacaggaaggtataaaaaggctcgtgaaagtgcttgatatgctttaagttatcactgaccagttcatcagcacctatcattacaccagaatggtggccatgcaagtccctattctgacactgtgtggcctcttctgtttagaaacctaagtttagaccagagatgaggatagacaatgctatgattcttctcaaccaatggcaagtcaggttgccagcacttgctctaacaggccacaactctgtcctttatggcggatggctcgagtggcggagtggatgtttatactatttgatcccaaagaattgtaaatcccaacccctagtttaaaatccactgttaccttctttatatcttcatgttcataaatgcttggagccaaggctgaagcaagcctctcataaatgtctggtttcctggaaagttccttaagcaattccacacgtttctctgaaaaaagtttctgttctgcttcttcatcaaggccatgcagacgttttgcatccgttttccgataatgaatgacatcaatgtgggttttgtagacagacttcacattactcactcttggattgactcgaataggcacagctcgatagatgcctgagggcacaaccaggagatgcacttttaccttcccatatcttcctccgagtggctcagcaaccagcgtaggcaacaggtgcacttcagagcgaggcaccacgtcgggctggccctggaaagggtgagctccaccgtctcttaaatgaccctcccaagcccaggactcaggcccacattgcaaagctcccgcttgctatgagcaagcagggaaatagcagcaggaaacggacaagctcgaaagaaccaaggtggctcatgtctgtaatcctagcactttgggaggctgaggcaggcggatcacctgaggttgggagttcgagaccaccctaatcaacaaggagaaccctgtctctactaaaaatacaaaaattagccgggcgtggtggcacatgcctgtaatcccagctactcgggaggctgaggcaggagaatggcttgaacctgggaggcggaggttgcggtgagccaagatggtgccattggactccagcctgggtgacgagagcaaaactccgtctcaaaaacaaaacaaaacaaaatgaaacaaaacaaaacaaaacaaaacaaaacaaaagagaaagaacccaggtttctgcaaatgatagacccgaggacgtgttcacctgggcccactagtcagcagtgctccagggcaactgtagctacgtgagcatgcccacgggcacagtcaccctgagggtgaaatggagctgctgtgcttctagctcaatgctgggttcgtggttgtttttaataagcagtatttttacttccctaagttgagtgtacagaatctgcctagcacttacttgactgcaacaaaatgctaaaatcctccagtcattaaaactagactaggtccccccaacctacccaccacccccgacaaaagcatgcaaatcatgcattcttctggaagccaggctcctcacatacagaggtctgatctgatgttcgtcttttctggatttcaaaccagaaggctttaactccaggctgattcctgcagcttttggagaaagcctggcctttccccgttacagctatctcaacgcaatggcacagagcactgtccttgtttattcagtgggtcagtgtaattcttgtttaacacaacaaaccagtttacacacattcttagaatacacactattcttcactccaatataggctagggatggaagattatgtttaaagtggcccggaatgatttatctcacagagcagcattgatacttatttcacatctacacagcactttccacagccccttggccccaaacactctcacacatgtatcatcacattaactccactttgtaggtgaggaaacaaaaatattggactaaatactttatcaaaggtttcagggtagcaggactggaaatgcgcacgtcactcactaaaaactacgcattctttcaaattctccatgacttcaagtacttttacgacggaagattgccagtgataactgcgggacttcacactggggaagaaacagggtgagcactgcctcactgaagacaagagccgatgcgtggtgtgccccaggccctccgctcaggagcagattcaggcactccgcgaccgtcgccaccttgcccatcaatgaagaaccgtgctgccatcaacactcccttgcccccaaccaaaatccattgtgactctacagcatcaaaaggaggactgccacactcatatggtgctgtgcaaagagcactcttgtggcagcaagagaaggagacctgggtcctgggttctgatttaccgtggcatctgagctactgctgtctatgcatccctgaacctcagcttctacacatggaaacaagtcactgactcatttttctctgtaacaaacaaatgttaacccttggctatacatttgggaaattaagtaaaaattacttaaaactccagcattggtgagtaatacttctctgagctgatggcataactcaaaactttacccatacaagcctgtctgaggctgctctctcatgatgccaacagtactgacttgagacacacacagctccaggatactgaggtatcaagaggcgagtgaccacacgaaccatgagctccaacattcaagtttgggaagaactgaacaatttcatactgctgggccatggtactcagttaaaaaggtggcagataaagcagggatataccccacagtctcaaagacaagcagtgacaactggaggtagaactggacctgtgaccaagtccaatgactcactaaagcacagcattgaaagcaagccagacatgctcaagtgctggtgcaaacctacactcttacctgtaacattcactctgtccccaggctggaccttgtcaacgagatcattgtgagcaaacaggataactgtgtgtggtgtctgccctgcaggcatgtcttccggagactcctgaagcttgatctgaaggtcagcaaacagagaacatgtgggccacaaagagagggcagggggacaaaatctgcatgtctttgtactgcttttgccatataaggctgcagtgcatatccccacataaatgattgtccatgtttctcattatttccttagaaattacttcttctaaagaagttgctgcaacagacagcaacaaaacaggggaaggaatgtagggagctgcggtgggggaagctgagatgcttttcataaagcagggtcgaggaaggcctttccaaaccaggtaccctctgagaggcctaaggatgctgggcttttctctaagccactttgggggcctgcatgattctgagaataggaggccatgtgctcctgcggagcaggtgcctgcctttctgtctccagctctccatcccatgcaacattaaagaaaccatgcacacgcagtcacagaaaaactcaaatcctgtcctcccacatctttacagtcacaatcacggtaaataagcaattttctaccttcccctcacttttttctgtcattttaataacttcatcttaaaatttcatgaatatagagaaaaaagaccaaacttcttagacagtaaaatttgtgaaaaaatttcagaaaaattcctcaatcctttaccaatggaaaaagcagaatgacatttaaccaagtattctcatctcaaacgtttgaagcattttaggccatgaaaatacagtgtctctaacaacagacagtgccactggcaacagcacagggacagtgccctgaagcaggggctttgcgtgctctgcatatttagcccataggccactaacgaaacccacaagaccagagagggatggatgccattcgggaagtgaggctcagggtccgagggacaagttatagttggccttttgaggatacagacaggcaaagcatagcctggggggccagggtggctgcgcaccatctgcttgtcagagaagagggagcggttgtggatgagtgccatgctgtgggtggtgtggcagcgcccgcacacactgggctctgcaatgcggccgcggtccatctccacccgggtcgtgtgggcacacacttggcactggaagaaggcctcctgcatctcgggaatcagctgggatgtcctgatcaccatgccgctgatggtgatgagctggtcaatgtctgtgaggggagaagagaggtcagcacacctgacctgaggtgtggaggtccaggaatagctgggatcacagacaggagctaggtgcccaagactctgcctagggcgacctttctgtgtccagtcatctgcaggctatgtcttcaggagactctcaagcccagcgaacctctggcccttcttcctcagggcccctgtccagcaggcatccctcgttcccttcttgtctgcctaccctgctccctgcctcctgcctcactcacctggcctcctgtatgacaccctgctgtgtcaggaaaaaagccagacagcctggactgagtcctgaccctagcctttctgtgtacattttgtgtcccctatagaatggggtggtatcagcacctatcccagagccaaggactgaacgtgccaatgtacttcaagcctagtaagagcacctggtagagaaaaagtcctctatactttaaagtcattattatccacacaggagaaccccttagatgctctgatctttcactcttgctcgtttcctctattatttgaacctttcctgacagacaactttttccctttgaaggtcccactgcccgcaactaatttcccctgctggtttcagacaagctaccctgttctggcctgtatttagccactgctagccgtgaagatcaccctatcctgccactgattcatgagacctctacaattttgttgttgttgagatggggtcttaacctgttgcccagactggagtacagtggtgcaatcactgctcactgaagcctcaacctgccaggctcaagtaagcccgtcacctcagcctcccagagtgctaggattacatgtgtgagccactgtgccttgctaatttcttcttaaaaagagatggagtctcttatgtcactcaagctggtctcaaactcctggcctcaagtgatcctcaaatctttaaaatctaatttttttttttttttgagacagggtctcattctgtcacccaggctggagtgcaatggcacagcctctgctcagtgcaacctccgcctcccgggttcaagcgtttctcctgcctcagcctcccgagagtagccgggactacaggcgtgtgccaccatgccctggtaatttttctatttttagtaaaggagttttgccatgttggccaggctggtctcaaactcctgacctcaggtgatccgcctgcctcggcctcctgaagtgctgggattataggcgtgagccactgtgcccggccaatagtcacatctcttatatcagaaacttcaattaaatttaaaaagtatagggggttcataagtatataggataactgaatctatattattgtcaatttataatccgtcaccttgactaccaccgccaattacttctttcataatttctcaatgaaaacaaggctattttcatgtaaggcattttccttcaacaaaagtaatcctatgaaaaatacattaccttctggattcaggtttctcatattcttagtcttcaatgcgttgaatggtcttacttgaatctgatgttctaagattgagtcagggtaacggtcaaagaagatttcattgacagccatgtcaaaagttggaataacttcctgtaaaaacaaatatgaagatgtatttgtattcatatctcagtgttaaatataataaaggcatgtcagattagcaaagtataaaaagacaacatgtcatgtccccaaagtattaccctacagaatcatgcacgtgctgttttcaaatttaggtatgctgaactatctatttctgcatattttcaattgggttaaatttcataatttatacgaaagtgccttcttgatgtatactggcatattctttgctttctattagaagggaaaaagattttgacctcacactttattttccttctataatgaagtgataccaaagtaagttttttatttatttatttttaatttttgaggcagagtttcactcttgttgcccaggctggagtgcaacagcatgatcttggctcactgcaacctctgcctctgggattcaagtaattctcctgcctcagcctcccgagtagctgggattacaggcatttgccaccacgcctgactaattttgtatttttaatagagacggggtttctccacgttggtcaggctggtcttgaactcccaacctcaggtgatctgcctgcctcggcctcccaaagtgctgggatcacaggcatgagccaccgtgcctggcgataccaaagtaagttaaatcatatttattcaaatttcttaacatatggttcccattttacagatgaggaaacagcttttggttggctaaggaacttgaccaaggttatgcagccagtaatcagcaaaaccaagattcaaaaaccaagtctgcttgcctccaaagactacacccagagtcaacagagctgatacttcattaatagaaactgacctgaggcttagaagtaaaagtctacagtacaatatattctttcaaagcagcaggaagtatgtaattcatttaaagtatttccatttaagataacttacttcatgaaacccaagaagctatcagttttaagattcatcatttttctacatgaaaaacactgccaagtaaaccataacctgtcattgatagtaatacaagtcccactttcaggaacattaaaatgtgaaaaaaaaatgttcatcttaaaggagatgatacatagtttttttttgtttgtttgagatggaatctcactgttgcccaggctggagagcagtggtgccatctcggctcactgcacctctgcctccggggttcaagtgattctatcgcttcagactcccgagtagctgggactacaggcatgcaccaccatgtctggctaatttttgtattttttagtacagatggggtttcactttgttgcccaggctggtctcaaacttccgacctcaagtgatccatttgcctcggcgtcctaaagtgctgggattataggtgtgagccaccacaccgggccaaaggagatgatactcagtttcttaaagtgtttgcgcatactatcttcattactgaagaatttctgttatctggaaacattctttctagactgttactaaaattcatcaaggtcaaagctaaattcttacctgtgggtaagagatgagttgtctgtacaaatttttgtcaaatgatttgatgtgttcacagttcacatttaaaaatggctcaccaataacattaatctagaaaataaaaatgaacaagttatattttgctaatttaactattttaaaacacgtaacttgaatttaaagagtatttgattacctccccaagtcgttgcatgtatagaggttcagtaatatctatgccaacattttcttcttctttagccagagggtcaataaaacgctgaagaaatctctttaagtggagagaaaactgtattaggcatatagcatttgggaacaggcaactactaaaaacacacaaagttatgagtatgtcactatcaggagacagaaataaataatatttttcttcctttttcttttctaaaatttaatttggagatggagtctcactatattggtcaggctgctatcaaactcctggcctcaagtgatcctcccaccttggcctcccaaagtactgggattataggtgtgagccaccacaggtggcccttctagtcattatggctacttagatatagattataaacacggtctcccaacattttcagagcccaaagtaagaattttaatacatgtagctcacctgaaagttttctttgcatgctgccacatttacatctgttccccagatcacaagtttttggcctagagactgctcacttgccactatatcttctgctgctgcctacacagaaaaacatgacagaatcatgaaaacagagttacccacatgatacccgccataagatggtttcaggagactgcatactcaccccgtcagactgcagatccacttgcaggcccttctgtgcagagcccaggtcaggcctctgtctcacaggtgtgcccctaacaccacttcttggggttccctctacccgagagctgggagtgccgtatgtcagtggtgaactaacatcaaagtcaagagggatagctataaaaacaaaattaggaaattctggtggcatatcaaacctgaaattacagcatgttgtctgttgatctataccatctaatcgcaacagcaaactgaatatttattgcaacctgcggtggctgagattctgagcactcttaaatgttctattaaaaaaaagcaccagagaagctgcttcctctgctcactaagccctaaaactactattttctgcactccgttcagctcctctggttaagaacatgctcagtcacgtgcagaggggatgctttaggcgttatgccaactgttataaagccagtaaacctgagcagataaagcatcagctgtgtatcaagcacagcaaaaccaagatcttcagacacgcacctgaagaatgcatttggggagggctggaaaacagcacgtcctgcgcagcagggctctgcaggtccactccaggcgaggttggcatcggctgcaactcccccgtggaggtggaatcctcgcctctacgtctctgagagggagatgacctggcatcctcactccgagcttgtgtcacacaaaacagaaaagacagccattaactttcagggccggccttcctggatttgtcttttccttggggcattatgactcaccactgaaccaaaccaaacagaggcaaatggcaatcgaattaagcagcacccaggccacagcctgctgtgggtgtctgtgcgcaccaagcggcagcgcccagcccgaggctgagcgcccgggtcccgcgcacccacccagcgctgccagctgcggcgagagggcagacggggcggcgccgggggctgtagtgggcccggctcgggggactcacgcgtctgggcgggggtggcccttccacgccggctgccgcggcggctcggggtcgacgccggggacgacatagtgctcggagtacctgcgcgacaaggacaagctcgggccgggcccgcctcccggcttccctgccctgctccgcagcgcggacgttcccgtcggctccgcgccacgccctccccgccggcgcgcggttaccgtggaaaggcggccgcttgccgacgacgctcgcggactccgagtccacctggcgagtagcgctcccaaaccgcgagacccagagttcccgccggcggcaaggtcgtctccgcccctggcggggcctcaccaatcacagcggcgctcgtacgtggctccgcctccgggaggcgccactgcgcatcggcagggggggacagtgccgcttctttcagcgcccgtgcgtaaaccagaagtaggcctcgctcggccccccttggtccagatggtctgaccccctgcgcggcagcgttttcgcgggaaaactgggtcctacagcaccagctctcggggtgtgttcctctagcgttggctagggagcgtgtgcttctttatcccttaggcgtttttggttaataaggacattacagatgcatttctcacttaaagattttttttattaaaaaaaattaaggacgggaggtggtggggatggtctcattatgttgcccagactggtctcgaactcctgcgatccccccgcctcagcttcctaaagtgttgggactgcaggcgggcatcaccgcccccgaccgcgtttgtcgttttttatcgaggaacaaacttggaactcttgacctaggcccctcgcttgttttatctgcctctggtatttatttagccaagtccaacaccaagtagccacccaaactacctccgcaggtcagacgtttttccttaggtttccatgttgattcgggccaaagaggcgcgcttactggccaggccttcccgcaggggtccccgggaaagttcctgccgccgcgccccgcagccccgcctccgcgcgtaggggcatttccgggtccgggccgagcgggcgcacgcgcgggagcgggactcggcggcatggcgggctccggagccggtgtgcgttgctccctgctgcggctgcaggagaccttgtccgctgcggaccgctgcggtgctgccctggccggtcatcaactgatccgcggcctggggcaggaatgcgtcctgagcagcagccccgcggtgctgggtgggtaccggcccgagctgggccgcgggtgggtcctggcttcccgagtcgttctggagccgggcagcccggcgcttctctgtgtttagatgacggtattttgaagtacagcaattagattcttgggggaatttctgtgtatgtgtataaagggatttgtcatactgctttttaccccctagtattagaggaaagatattttaaagccaaagttggtgaaaacgacccctaatatggcaatcattgctatgcagagtggggggcagggcaagagaaataattttttttttttttgagacggagtctcgctctgtcgcccaggctggagtgaagtggcgcgatctcggctcactgcaacctccgcctcccgggttcaagctattctcctgcctcagccccccgagtagctgggattacaggcgcgcgccaccacgcccggctaatttttttgtatttttagtagagatggggtttcaccatgttggtcaggctggtctcgaactcctgacctcgtgatccccccgcctcggcctcccaaagtgctgggattacagacgtgagccaccgggcccggccaagagaaagtattttctttcacctgaatctcgcctaatcccaccagtaccttttccaaacccctctatttgccgttcctactttgagaaaaattgaagaaatgtaattgaagtcatgttcttttaactctttagcaatgcctgggtgggaactttttcccctttgtagtaaaagtgcctctttttagcattttaaatattcaaatacttaattatgtggatctcctgtattccttctttaaaacacgagtatgcagaccttgatgttgtgccctattaaaaggtgagattttcttccggagggtctagtagtgaatatggtgtaggaataacttaaacagtttaaactagatgctatatgtggcacggtgcggtggctcatgcctgtaatcccagcactttgggaggctgtggcagctggatcacctgaggtcaggagatggagaccaacctgaccagtatggtgaaaccttgtctctactaaaaatacaaaaattaactgggcatggtggcgagcgcctgtagtcccagctattcgggaggctgagacaggagaatgtcttgaacccaggagaaggagattgcagtgagccgagattgtgccactgcactccagcctgggcaacagagcacgactccgtcccaaaaaaaaaaaaaaaagatgctatatacatgtatcctatatgtactctatctgttgtcaagaatatattaacaatggggaaatatcaaacaaaaaactaacattgcgtgattactttctcttctcagggtttcaaatttagaattcatttttgttcgtttagtaacttgtttctaaagcacttccaagtttaccttccatttatgccatatctcctttcacttgagagattccaggggaagtgtattagttccttattgctgctgtaacaattaccacaagcttagtggtttaaaacagcacaggtctgttactcttacagttcccactgtaagggggattctgtgagtcagaatcccacacaggtctcaccaagctagaaccaaagtaccagacagggctgctttctttctgaaggctcttggggaggatccattgccttattcattcaggttatataggattgaggtccctgacattccatacttcttgaagctgtcccctttccttggatcacagctcccttcccttggtcttcaaggccagcaacagcatgtcaagtccccctaactagaggtttggaatctcccgctttcccaacttcctgtctctctgacccactcttcttcatctccttactttaagggcctgtgtgattacattgggctctctggataatccagtatgatcttcccattttaaggtcagctgattagctaccttaattccatctgcaagctcaatttccttttgctatatacatttaacatattcacaagatgtgaccccagggattgggatgcaggcatctttggggccattattttgcgtactgcatccctgtggaacattgtctagaattttctgctttgttttaatacagcaaccttgggttagtgttttatatttataaggctgccttgaaaaccgttgcaaccttggccaggcgcggtggctcacgcctgtaatcccagcactttgggaggccgaggcgggctgatcgtgaggtcaggagatcgagaccatcctggctaacacggtgaaaccccgtctctactaaaaatacaaaaaaaaaattagccgggcatggtggtgggcacctttagtcccagctacttgggaggctgagataggagaatggcgtgaacccgggaggcggaggttgcagtgagccgagatcgcgccgctgcactccagcctgggcgacagagcgagactccatctcaaaaaaaataataagaaaatcattgcaacccctttaggagtggtttacatgatgctcttggcactctcttaacttgtttacttatttttttgaacagcattacagacatctttagttttttccagagatttcggtttgcttgtatttgtccggaagtcactcaacagtattgaagtaagttgacaattttggttttgcttttcttgtatattcctggagtgactcctcttacccatatttacaatatgtatctctttcattacagtttcgtgaatgtagagaagaaatcctaaagtttttatgtattttcttagaaaaaatgggccagaagatcgcaccttactctgttgaaattaaggtaagaattaaaaaacataccttattacattatatatcaacatctgttttaacttatggtgtgaggaacttggatttttattttaaagataaaacattttcctttctcattggggaatttgcttatttctgcttcattgtgttacaaatgaagtgggctcttcattaggttttttttttttttttttttttttgagatggagttttgctcttgttgcccattagttatttagatttagtaagctaaggcctttgtgagagaaactactttgataattttttttaataactatcttaatacttttttttcctgaggaggtggcagtggcaccctgggctccctggggccctgatggcctcttgataacttcactgcagcctgggcgacaagagcaaaactccatctcaaaaaataataatttttattttgtatttttttatttttattgtttatttgtttttattttgtgagacagggttttgctctgtcatccaggctggagtgcagtggtgcaatcatggctcactgcagcctccatctcgtgggctcaggtgattctcacacctcagcctcccaagttgctgggaccacaggatgtgccactatgtccagctaatttttgtatttttttttttttttgtagagacagggtttcgccttgttgcctaggctggtcttgaactcctgggcttaagtgatcttcccgtctccgcctcccaaattgcttacaggcacgaaccacactgtaatcctcaaagggattacaggcatgaaccacactgtaatcctcaaagggattataggcgtgaaccacagagtcccgtgaatactttcaggctggagtgcagtggcacagtcttggctcactgcaacctccgtctcccgggttcaagcgattctcctccctcagcctcctgagtagctgggattacaggcgtgcaccaccgtacctggctaatttttatatttttagtagagatagggtttcaccatgctggccaggctggtctcgaactcctgacctcaggtgatcgcctacctccgcctcccaaagtgttgggattataggcatgagccactatgcccggcctaatgttatattttccacagctaaatactgaattttggtattgctcctcttggagaagtagtttcaggtattgctgagtcttagtttttatatcttattgatgattttggttattttttttttaaaacctagaacacttgtaccagtgtttatacaaaagatagagctgctaaatgtaaaattccagccctggaccttcttattaaggtaattatgtttctaagtacacgtattttacattaaacatgtaacttttaaaagaaaatcagagttttgagttgtgttttgggtgatgtgtttggggaaggataggatctaatcacattgatgtgtgggtaagatgcacattctccaaccatcacctgacaataccctggctttttgttttcagactcttctgggtagtaaaagaagaattctgagttgtgaggagaatgaaggaggaaaatgactaaggaatttattgctctttcatttatcacccttactggctttggcaaaacctaatgctattaggaattgctgaaagatcaccttatatctctgaggtttttcctaaaaccttagcaatgggaaagagttcatatgttttcttttttttttttttttttttttttttgagacggagtctcgctctgtcgcccaggctggagtgcagtggcgggatctcggctcactgcaagctccgcctcccgggttcacgccattctcctgcctcagcctcccaagtagctgggactacaggcgcccgccactacgcccggctaattttttgtatttttagtagagacgaggtttcaccgttttagccgggatggtctcgatctcctgacctcgtgatccgcccgcctcggcctcccaaagtgctgggattacaggtgtgagccaccgcgcccggcccatatgttttcttttctttctttttttgagacagagtcttgttctgtcattcaggctggagtgcagtggcgcaatctcggctcactgcaacttctgtctcccaggttcaagcgattctcctgcctcagcctcctgagtagctgggattacaggcatgtgccaccatgcctggctaatttttgtatttttagtagagacggggttttactgtgttggtcacactggtctcgaactcctgacctcgtaatccgcctgcttgggcctcccaaagtgctatgattacaggcgtgagccactgtctggcgggaatcagttgatacgttgcagttaagtggttgttggggtcactgtgacctgtttctgttttttttgtatttgtattttagaattcctttgtttctggttgctccttggttttgtaggcttctgggagaaaggttctagtcatgttgttggtttcttgggaaggtaacacacctagagcattcttcccctgatgttcttccaccatacccatctcaacctctaattcccagataagctgggtggatgtgaatcctgtgagaccaagtgtaaatccttgagacacacctaattctgaacctttgctgtggacagatgcactgagatagaggaatcccgttatttccctctttagagagaatgctaatttgtattgtgttttttttcttgattcccgcactacattgatgtactaatttgtattcttttagttacttcagacttttagaagttctagactcatggatgaatttaaaattggagaattatttagtaaattctatggagaacttgcattgaaaaaaaaaataccagatacaggtgagatgcatttacatgttattttcaaatagtttagcaaattaatattaacaaattattagcataagacttaggttttctctaccaaggtcttattttacagtcgaatcctttttgctgaaaataaaccaaaatggaaccaaacaaaaacaacatgtgaagacttcccttcacaaaaatgttaatttttacaaaattattcctgtaaatagaaaactcacaagatatgacaaatatgattaatacatttgcataaaacttaggaaagaatgcagtcctaaaagctttatattttatatctcttactgtaaaatcaattttgaactttattttattttattttcttcatacattttggttagtttaacttatttaaatgtagtttgaggccttcacttgtctaaaattttcttttcagttttagaaaaagtatatgagctcctaggattattgggtgaagttcatcctagtgagatgataaataatgcagaaaacctgttccgcgcttttctgggtgaacttaagacccaggtatgatgaactttatgacattctgcttccatagatgtggttgtgtttttctcttgtaatgacatcttcttaaatcttttcttttagatgacatcagcagtaagagagcccaaactacctgttctggcaggatgtctgaaggggttgtcctcacttctgtgcaacttcactaagtccatggaagaaggtattgcttggcttcacttgattttctttattcaaaaactgtaagtctaaccagcaatgcctgattatttctttgaactcttaaccaatcctgaatttacatacagtagtgagaaataatctagagggacctgtgggccctcccgagttcccctgatgatgacatctttcccaactacagcacaacagcaaggtgggcattaacattgatgttgtccactgagctttgtcagatctcaccagtttaacgtgcacacatttgtgtatgtgtatttagttctgtgcagttgtttaaaattttatttattttttttgagacagaatcttgctctgtcgctcaggctggagtgcagtggtactttcttggctcactgcaacctctgcttcccaggttcaagcagttcttcacttcagcctcctgaatagctgggactataggcacgcaccaccacacctggcaaattactttctttttttttttaaacagagtctcgctccgtagcccagggtggagtgcagtggctcgatctcaggtcactgcagcctctgcctccctggttcaagtgattctcctgcctcagcctcccgagtacctgggattacaggcactcgccactaaatggcaaattttttttgtatttttagtagagatggggtttcaccatgttggccaggctggtttcgaactcctgacctcaaatgatctgcctgccttggcctcccaaagtgctgggattacaggcatgagccaccgcacccggcctaatttttgtatttttagtagagatggggtttcaccatgttggccaggctgttctcaaactcatgggctctggtgatccgcctgcctcaacttcctaaagttctgggattacaggcatgagccattgcacctggccctttttaattctttttttttctttttataattgagacagggtatcattatgttgcccaggctggtcttgaactcctgggctcaagtaatctgtccaccttgatctcccaaagtgctgggattataggcatgagccaccacacctagcgagttttgtgtaattctgtcacgtgtatgtaccattgtaatcaaggtattgaacagattgattagcacaagggtcccaatgtgctactgacttagagccatagttaatctcttcccccatcttggccacctgataacccttcatctgtctccatctgtggtttcgtcatttcaaaaagttacacagatgaactcatggtatgtagcttttcctgtgtggcttatttcacttagcatagtgtctttcaggtttgtccatatcctgatatgtcagcattgtctttttttttgaaggctgaatcatattcctgtgtgtatttactgcattttgttgattcattcatccgtatatgggcacttggtttgcctctacttactggttattctcagtagtattgccatgatcattgttgtacagaaatctgttggcagtccctgctgttgattcttttggatatatacttagaattgtgattgttgggttgtatggtaaccttagttttaattttctgagaaatcgtcatactgtttttcacagtagctgcagcattttacattcccaccaacagtgcacaagggttgcagcttctccacatccttactaacttgtcattttctgtgtttttggtagcagacatcctaatgcctaatggttgcgaagggatatctcgtggttttgatttccgtttccctgatgatgagtgacgttggttgtgcatcttttcatgtactcaccatttgtgtgcctttagagaaatgtctgttcagatcttttgcccattttttaggttaattggtttgtttgactttttgttgagttgtagatatcattttctttctttctttcctttttttttggagacagggtcttgctctgtcacccaggctggagagcagtggctcaaacatggctcactgcaccctcaacttcttgggctcaagggaacctcccacattagcctcccaagtagctaggaccacaggtgtatacctgatattaaaaaatgttttgtagagacacggtcttgccttattgcccaggctggtttcaagctcttgggctcaagtgatcctcctgccttggctccccagagtactagggttgcaggtgtgagccactgtgcctagccagataccagtttcttaacagatacatgatacatgagttgcaaatattttctgtctccctttttcttttcttttttttttctgagacagggtctcactctgttgcccaggctggagtgcagtgatgctagcatggctctctgcctgcctccacctcctgggctcaagtgatcctcctacctccgcctcccaagtagctgggaccacaggcatgtgccaccacagatgggtaatttttgtactttttgaagagacatggtttccccatgttgcccaggctggtctccaaccaagagatctgcccaccttggcctcccaaagtgctgggattacaggtgtgagccgctgcacctggcccttctctcattttttgagttgccttttcactgtgttgattatgtcctttggtacacaaaaatcccttgttttgctaaagttcagtttttttattttttttatttttttaagagatggggtctccccaggcaaaagtacagtggctactcacagatgcaatcatggctcactgcagtcttgaactcctgactcaagcagttctcccacctcagcatcaaaaatagctgagactataggcaccaccatgcctggctccttttatattttgcagagatggagtctcgctgtgttgcccaggctggtattgaactcctcccatcaagtgaccctcccacctcagtctccaaagcattgggattataggcatgacctgccacgcctggccaatgaaattcttttctttttttgaaaggacaaatataactttttatcctgaaataatcttttttttttttttttttccggagtcttgctctgtcgcccaggctggagtgcagtggcatgatcttggctcactgcaagctcccccttccgggttcacgccattctcccgcctaagcctcccgagtagctgggactacaggcacccgccaccacgcccagctaattttgtttttgtatttttagcagagacggggtttcaccgtgttagccaggatggtctcattctcctcacctcgtgatctgcccggctcggcctcccaaagtgctgggattacaggtgtgaaccactgtgcctggccgatcctaaaataatcttaaggggagggaaaaagctcctttgctcttccttatcacttttttttttttttttgagacagagtttcactcttgtcacccagcctggagtgcaatggcgcgatcttggctcactgcaacctctgcctcctgggttcaagcctttctcttgcctcagcctcccgagtagctgggattacaggcgtgtgccaccatgctcagcggatttttgtatttttagtaaagatggggtttcaccatgttggccaggctggtctccaactcctgacctcaggtgatccacctgcctcggcctcccaaagtgctgggattacaaggcatgagccaccacccctggcctccttatcactttatcttcaagtaattaccaaatgtttggacctactttgtttttcttccattaggttgaaacttacaaaattacttatatccaatgatttttttttaacctatgtaggcagcagtttcattttaagctaatgtttctacccatgccttcttccttgcttatcaagattgttagagtagccctgtgtaattttccttcgtgtcttctctctcctctctcctgtatcctatggctcccacttcctcagcttcttttcaactgtcacccctcttaggaagcatttatgattcccctgaggtgagcacttcctctggcctctgtactcccctctgtgacagcacttacggtcatattttaagtttgttaggtcatatgtttaattctctcctttgaccctgttggcaggtgatgttgcttatttgtctttatgtttacttggcttataaatcagcactcagtgaacatatatagtggaaggaaaatagtagcacttagtgctcatttattgtgtgttaaggactattctagacgtgttgcaaggcaagttcctgtaatgactcttcatggcaggtaaaatgtctctgttgtatagattagtaaactgccactcagacaggttaagtaacttgccccaagttacacagtgacttgcgtggttaggagaataatggccaccagggtgtcccatcctaatccctgttatgcttcatggcatagcggaattaaggttgctaatcagctgaccttgaactgaagagatgatcctggatcatccccatgggcttggtgtgatcacagggtccttaaatgtggaagagggaggcacagaggaggtcagaggaaggggatctggaaggcggcaggagccaaggcatgggggtgcctctggaggctggagaagtgagaaaagggttctcccctagagcctcttggaaggagcacagccctgctgatgccttaaatttagctcaatatgagaatcatttcagacttctcacctttagaattataggtaataaatctgtattgttttaaactattaagtttgtggtaagttgttatggcaacactaggaaactaatatagctaacaaatggcaagtctgggatttaagccttggtctgaggctaaaatttatactttttttgtgatgccatgatcatgtgacttcaagcactaaatactaattcatgggtacatatatataaggcacccagggccgggcgcggtggctcacgcctgtaatcccagcactttgggaggctgaggtgggcggatcacctgaggctgggagttcgagaccagcctgaccaacatggagaaaccccgtctctactaaaaaatacaaaaaattagctgggcgtggtggcgcatgcctgtaatcccagctactcaggaggctgaggcaggagaatcacttgaacctgggaggcggaggttgcagtgagctgagatcacgccattgcactccagcctgggcgacaagaacaaaactctgtctcaaaaaaaaaaaaaaaacaaggcacccaggaaatacagactgtatgaatgacttataaaaataattgtaaggccaggcaaggtggctcccgcctgtaatcccagcactttgggaggctgaggtgggcagatcacaaggtcaagagatcgagaccatcctggccaacgtggtgaaatcccgtctctactaaaaatacaaaaattagctgggcatggtggcacatgcctgtaatcttgaacctgggaggcagaggctgcagtgacccgagatcgcgccactgccctccagcctggcaacagagcaagactccatctcaaaaaaaatttttatatatatacatatatataaacgcgtgtgtgtgtgtgtgtgtgtgtgtgtgcaaatatattttttttgagacagggtctcactttgttatccaggctgtagtgcagtgctgtgatatgggctcactgcatcctcaacctcctgggctcaaatgatgctcccaccgtggtcctccccaagtagctggggactataggtgcatgccaccatgtcctgctaatttttattttatttttctttttgagacttgagtcttgccctgtcacctagactggagtgcagtggcgcgatcttggctcactgtaacctctgcctcccacgttcaagtgattcttgtgcctgagcctcccaagtagctgggattataggtgcgcaatgccatgtccagctaatttttgtgtttttagtagagacggggtttcaccatgttgcccaggctggtcttgaactcctgggctcaagcaatccacctgccttggcctccaaagtgccgggattacaggcataagccactgtacccggccccaactaatttttgtattttttgtagagatggggtttcaccatgtcggtcaggcttgtcttgaactcctgagccgaagcaatccacccgccttaccctcccaaaggtgctcagattacaggcttgaggcactgtgcctggccatgggtgccatctatctaaagagtgatgaacttggtgttaaaccagtaattgaaatcaccaagttcctaccatcatgagctcagtctagtggaggagacagatgaacaaataaagcagctctgctgattttggggttcagcagtgcccagaggtggggtgtagtgaagaggaatgccagaatttggagaggtggagcacacgacccacgggtactttctgaggatgtaacgcagaagtcgtgatcagaaggaggagagggagacagctggggaagtgctgggaagagcagtcattccaggcagcagctgctcagcacctggccccatgctcggccagtctctagccctgtgcttagcctgcgtgcagtggtccgagggtccacaagagctggtgtgtcaagagtgtggaggtacacaaagtgggccagggtgagatgggaaggacgcagggttggtgtttgacagttttctgagctgggatctcattccagatggaatgggagccagagcttttcaaaaaggagtggatgtgggccaagagatgtttcacaggggtctgcctgactgctgttgggtgtgggatgtgagttagtgtaggattgagagactgtgagtgagggactgagggctgtgcagtgactcctaagctgaatgggatgggagagaccgggttttttgtagaaacctggccttttgtgttggatatatttaactagagacacttaggaagcatccaggcttagatatcaggtgtgcagttgtgcgtgtaacaggggatcttgcagcagaaatcagacttcaggctatacatttggaggtcttcatcacgtaggtagtatttaaagttaggagtgtgagcaagatgaggagggggtgagagtgcagagaccaggcggagggtctcaagagagtgctgaggaggcagtgcagggctgcctcgcatccggtggagtttggggaggaggaggaactggcagtaagtggtgggttcagctccacgagaaccacatccattgaacattggagaaatgggacctctagagtgaagagcgggaggaagtggaggccatttgtagaaaacatgctagacaaatcttgtaatggaagagagcaaagaaatgggctgtggctgatgggagatgtgggggtaagagaggggtttttttttgaggcagagtcttgttggagtgcagtggcacgatcttggctcactgcagcctctgcctcccgagttcaagcaattctcatgcctcagcctaccaagtagctgggattaccggtatgcgccaccacacccagctaatttttcctatttttagtagagacggggtttcactgtgttggccaggctggtctcaaactcctgacctcaggtgatctgcccaccttggcctcccaaagtgctgggattacaggtgtgagccactgcacctggccaagagagggtttaaaaagtagaagtaggccgggcgtggtggctcacacctgtaatcccggcactttgggaggctgaggcaggtgtatcatgaggtcaggagttcaagaccagcttggccaagatagtgaaaccccatctctactaaaaatacaaaacaattagccgggcgtggtggcaggcgcctgtaatcccagctactcgggaggctgagacaggagaatagcttgaacccaggaagtggaggttgtggtgagctgagatcgtgccactgcactccagcctgggtgatagagtgaaactcggtgtcaaaaaaaaaggatagaattttcacacctatgttcctagcagcaagtccatagtgagccaaagggccagaaccacccaagtgttcatccagggatgaatggataagcaaaatatggcacgtagacacaatggaacattacttagacttaaaaaggcaggaaagtctgacacatgctgcagcatggatgaaccttgcagacaggatgctaagtggaataagccagccacgaaaggcaaacaatgtgtggtttcactcacacgaggtacttagagtagtcagattcacagagacaaagtaaaatagaggttactggggctgggggaggggaaatgggagttagtgtttgatgggcacccttctgttattgatggtgaaaacattttgggtatagacaatagtgatggttacacaacagtgtgaatatgtttagtgccaacgaattgtatctgtacacattgtttaaatgataaatatgtctgttttaccacattgaaaaaaacagatacaagaccatgcttctacagggagtgggccactagagggaggggctgcaggagagtggactgtggagggcagagcctggagaagtctgtccttgctaagtccccaccctaaacccactgtgtactgtgggtgtccttgtgtctgcacacttgcgtttattaacatgactattttctatctgaatgaccttttccccaactagtacctattctttcagtcttagaacaaatgctaccatatctggaaagcctttatagaatactcatagtcagaagaaatctgcttgtcatgaattccaaagtagctttttttgtatctcatttatgccaccattctgcaaccatacagatgtttctctgctttaaggcctctctgaccacattctctctccacctcctatcacatcatcatcagggctctgtctcaaatatgtcagtccttgcaatgaaaagcaaacagttcttgagtctctgctgattacaagtcactgttagaagggtagagaaattagtgatgaataaagcatgactctatagctacaatgaataatgtggtgggagacagttatgcaaataattgtgatgtcagtcaggccaggattagagcctcatgttatagttatgtgcctgttttatcttcccttttagttaataagtatgctgaggtcaaagatcataatttatttgtatttgtaattgtcataatatcttggcatgtactatgtttttttttctgttttttttttttttttaatttttttcttacatgtactaggtattgaataaatgcctgggtgtattggggagaatggtatgtttggccatgagtaagttactttatttaatcctccagactatcctaaaaggtatatacggtccctattgcaaataagaaaattgaggctctgagagattatctaacagagcttttaagtgatgagttggtgtttaaatctcttagagcttgtaagtgataggttggtgcttaaaccatgtctttgttattccagattttctttctgttttctcgcagtcataaccgtgcagcagtaataacttgcaactttagctggatggaatgatgaaagatgtttctcctgaattcacaagagattaatggggttaatataggtgtcaagctgtctgtaaagtgtgttatgtgatactgttattacgatttgtaacaggcttcttggtatttccctagatccccagacttcaagggagatttttaattttgtactaaaggcaattcgtcctcaggtaggattaatattactattaatattattctaatgcctttacagtgcagactttcaaatactgatggtgaatttttcttttctaaaatagattgatctgaagagatatgctgtgccctcaggtaggattctgtttataatgaggtataatattttagattactaaattaacatctcaagtaagcttttgcttaaactttgaatgaaagcaaatgtgataacatctgtgatgtttcacacacagttatttacagggaggctttcggtgacttagtaagctctggttgaaatgctgatactcaggttacatggttgaaagcactttattttagggtatctttcaggggatccaggctgtttgattctgactttgcctcaatgaatcctgattccacttctgacccttgttttgggatttgtcagccaagttatgggcctgttaattggtagtgttagagctctgacaggaatccctgggttactgtagtgtaatggtactagatcttcctgagcacagtgttgactttgacatatccctgcaggtttgttggttttctgttctgtgttatgtcgtctgattttaaatataatggcatttgcatttgcagctggcttgcgcctatttgccctgcatgcatctcagtttagcacctgccttctggacaactacgtgtctctatttgaagtcttgttaaagtggtgtgcccacacaaatgtagaattgaaaaaagctgcactttcagccctggaatcctttctgaaacaggtaccacaaattcaactgtcatttaacaatatttctttcacacacagaattaaattccctttgcatgcatgcatgtttgaaaataaatacaagttgatctgtagcttctgtagtatttaaagcagaaagatgttgatcagccagccatatgggaggcagccagactgaaagagagctagggagatgccagatttgattagggcctcagagcctagattgagacaagtgtaatggagcaaagacgtggtgaggtgatggccggaagggctgggaggtcagggctggagagtgggtggagggctgaggggagccccatctctcctggaagaggagggctagctgtctccaggggatagatgcttgtgtgtcaacttgaaaacaaggggtgcctctttgccattgtggattttccacctggataggaggtggttacagaatctgtacctgcgtatgtggaagcttgtctggtcggctgaggagaccgtgcttgtcattctgagcactggtctccaggatgtcctgggtgtccagaggtggctgcaggggcctggccattaaggaagtggacttctggggttgctctgagggaaaggactggagattcacaacaaatgttttcttaggggccctgctgtacatgggtaaacagtagctgcattcacagggtatccatgcaaacctgtgtgaacagtgtggcagttgtgttagcctgagagtcacagccgggatgtgtggaaggagaagagagagcactggcatccttttttcatgtctgggcctgccttccaaaaaactgagccgatgggcctcatctttggcctctgcctctgccgcctgtccctctcgcctccttagtctccctgctgtacttggccttcccgtcagacttgtgttccccctgaagtcactcttggctttgaggttaccttggtccttctcataaaactcctgttacgctgaacttggctggccttacttgctaagggaaataaaaatcagaggaattattttttactgattcatatgaatatgtttggatctcagtaaacatttactgcgataaacatcttgacagagagaatttcatgccttgttagcaaggaggagtgtccggaatgtgtgcagagggatcatccctggtggcaccctgggggccttgttccctagcgatgcctgcctttcctagcacagggctgggtggggcgtgggcctgcagggaagccggccagccctccctccactgcgctggttgtctttaatgagccacgcagacatctctgtttcacatccttgccagagacttttcagtcccccactccaattcttaatgaaaactacattgaatagattttagagtttcattgaggaaatatattctacctgctaatctctacctcgtgagaaagttatttgagcttagtcaggggagaagttcaagagaactatcctcaatgctgccctcagggctgatgcctgttgcaagtttgggagtttgcaatataccctcaaatttgatactcacatctatggtttattacagctaaagggcccagataaaaatcaaccgaaggaagcggcacacagtgcagagatgaagaaagtaccaaatgtggatcttccctggtcctctccccgcagagtcagggcagcattcctttcccagcatccatgtgtggagcattgactgggtgctcccccaaacctctgtgtttggggtttcccttggggccccaccctgtaggcatagtgggttgttgggtctcggcttccagggatgctgtgtgacccaaagctcccattccgagtcacattgttaccaggtgtggtcagctccaccctgagtcccattattagatcatcccttgtgacctgaggccccaggcaaggagaggcaccctctttccctccttcttcagaatagggagtgaggagagaggaagaaagagggaaagaggactttacataaaggatacataattttttggccttttttccactatgttgaatatattttcctcacagtgacatctatatgatgtgttttttttgttgctgtttttttggtttttttttttttttgagatggagttttgctctgtcacccaggctggagtgcagtagcgcaagcttgggttactgcaacctctgcctcctgcgtttaagcaattctcgtgcctcagcctcccaaatagttgggattataggcacctgccaccgtgcctggataatttttgtatttttgttagagacagggtttcaccatgttggccaggctgacctcaggtcatccacccttcttggcctcccaaagggctgggatgacaggcgtgagctactgcgcccggccaacatctgtgtgattaattttcagtggcagtgtaatatatgatatttatgagccatagtgttttaatctgtcctctgtctgctactgttgaataattattttcaagtctttaatactatatccaggaaatagttgaataaagatgcgttaaaaacatgcttactgggaatacaataatagaaaattagcattatagtatataatatttgctattctgtaattaagtaaaatgctgttgtttacttcttgagaaacatttatgatatgttttgtgaagaaggaaattatgaaacagtatatacaatgtttcattcttctaaaacaaataaggagcaaagttccccgaaggtcaggcgctaagacctagtggctttagggggattgggaagtgtatggataagttggcagtggaaggtggatttttttttctgcctttgataattgtctagatagatttcttccattcttattctgggcagtctttgtgctgaaatggggaatgctctttgaatacctgtattagttcttgcatttaggctcttgtctcttggtttggtaaataatgatctatttgcttctcagacgacattttccccttgcatcacttaatttaagctttatagtttgtagcttatttttttgaaaactgagatgctttgtctttctgattgttctgaactctatttattgatgacgtctgaagtcactggtcccctgacagctctctttcaccctgtgggtgacaggtgagattgttctgaactctgtttattgacgatgtctgaagtcactggtcccctgacagctctctttcaccctgtgggtgacaggtgagctctaaagactgctctttgcttcctcagagagccttaattcaaaacctgtttttggttttttttttttttttttttcagacttatgtgtatccttggtctcttagtcccttctctaggaaaaatgtatcacatagccttatttaagacacttttctgaacctgatagagactaagcaaaatggaagcaaagggtctttatgattaaaagcaattgcgtgtaactataacagtacattagtagcatctaaacagttctagtttttccatgtttgtatagattccattgctattaaatatttccaaaaaaataaatattatgtatttgcaggtttctaatatggtggcgaaaaatgcagaaatgcataaaaataaactgcagtactttatggagcagttttatggaatcatcagaaatgtggattcgaacaacaaggagttatctattgctatccgtggatatggactttttgcaggagtatgtctcattaacttactctattttgtcttggtttcacgtgattgtttaaaggaatctaattcattgcattttgaatagtgtctaatacttgtaacaatacagtagacccttgaataacatgggcgtgaactgcacaggctcacttacatgcagatgtttttctaccatacggatcaaaaatacagtgtgtgctggatgtgaaacttatatagagggctgaccttttgtatatgaggcttccacagggtgactgtgggacttgagtatgcatggatttaggtatactgaggaggcctggaaccaatccctcccgcatgtactgagggtcactgtattagtattgtttattaacagttaagatttcttcagtgtctgctgtgtactagaattctttacatgtggtatctcaaaatctcctaacccttaggagctcagtattactctgttttgcagattagcaaactgagatgcagagaaattaggaaacttgtcaagagactcagaattgacagaaccaaggcataagtccaagtgtgaagaatagaaacaccatgtttcccctctgtgctatgctgctccttattcctaaagtaaaattgtagttgatttcacaacgttttaggaagagaagttaaaaaaaaagtttatatgacagaaagagatatatttaagaatattagctaggtgtggcggcccacacctgtaatctcaccatctcaccgctttgggaggccgaggcgggcagattgcctgaggtcaggggtttgagaccagcctggccaaggtggtaaaaccctgtctgtactaaaaatacaaaaattagccgggcatggtagcacatacctgtaatcccaactgcttgggaggctgaggcaggagaatctcttaaactcaggaggcagaggtggcagtgagctgtgatcgagccactgcactccaatctgggcaacagagacactatctcttaaaaatttttttttaaagaaaaaatattgagaataaccctagttatttcctcttagtggaattctgtgacttctgctttgtagaaaaaacaactgatttcttttttcttcctacaatctctccctttttttcttctttctttttttctttcttttttttttttaatttttgagttggagtttcgcttttgttgcccaggctggagtgcgatggcatgacctcggctcaccacaacctccacctcccgggttcaagcaattctcctgcctcagcctcccaagtgctgggattacaggcatgctccaccacacctgggtatttttttttttgtatttttagtagagacggggtttctccatgttggtcaggctggtcccgaactcccgacctcaggtgatccgcccaccttggcctcccaaagtgctgggattacaggcatgagccaccgctcctggcctctccctttttcctttctttttcttttttgcctctcaggctggagtgtagtggtacaatcataactcactgtagccctgacctctagggctaagcaatcctgctgccttaacttcccgagtaactgggaccacagacatgagccaccatgcccagcaaattttttaatctttcgtagagacgatatctcacttcgttacacagactgttcatgaactcctggcttcaagcaaacctcccgcctcagtccccaaagcactggacttacagctgtaagccacagtgcccagcctttccctttttcttaatcttcatctccatttgtctctgttggcgactttaaatatgcttagggcagaagaaacagaatggcagaaggctctgagctaaaagattgcatgagattttccctttacacagtgatctatccccacttgagcttgtccctgtggctagagcatgataggcaggagaggggaaatggatctgaagaggtgcaccatcagatcctcggggagcctggactagattcagaagtcctagaaaagaagccttggaaaagtctgaaattgagcaattacattagcgcatttgtgagtctgaaaaaatggctctggtgtggtagggtgtgtgacatggagcatcttccagtcatgtatggactcctggcctctcctgtaggtggacagccttggggcagggactgcctctcatttgtcctcagtacccactgtctaaacagtgcctagaacatagctgacaaccaataaatgcttcctgtgtgaataaatatttaaaatgtggttacagattattatacaaagcatctttataatgagatatattttatttatttatttattttttgaggtggaacctcactgttgcccaggctggagtgcagtggcgcgatctcagctcaccgcaacctccgcttcctggattcaagtgattctcctgcctcagcctcttgagtagctgggattacagttgtgcgccaccatgcctggccaatttttttttttttttttttaagtagagacggggtttcaccatggtggtcaggctggtctcaaactcgtgacctcaagtgatctgcccgcctcggcctcccaaagtgctgggattacaggcatgggccgccgcacccggccagatactgtattttatatctgtatttcttcttaattaaaaagcttgtggctgggcacagtggctcccgcctgtaatcccagcactttgggaggctgaggtgggcagatcacctgaggtcgggagtttgagaccagcctgaccaacacggagaaaccctgtctctacttaatacaaaaaaaaaaaaaaaatagccaggcgtggtggcacatgcctgtaatcccagctactcgggaggctgaagcgggagaatcacttgaacctgggagttggaggttgtggtgagctgagatcacgccattgcactccagcctggacaagagcgaaacttcgtctcaaaaaaaaaagaagccttgttaaacttgtgtttataatcacatggcttaacatgacaccttaaatattattttgatcttgataagattgatgaagacttctgttttaccttttctaaagccgtgcaaggttataaacgcaaaagatgttgacttcatgtacgttgagctcattcagcgctgcaagcagatgttcctcacccagacagacactggtgacgaccgtgtttatcagatgccaagcttcctccagtctgttgcaagcgtcttgctgtaccttgacacagtaagtgaactaaactgagcacaattttaagtatttaatcttcatttcttcaaataatttgatggagtcatacaatacatttagtgtaggcactgttgggaacaacatgacagttttagttagtactttgtggcaatagaattattgtcatgaaactcgattttttgttatccagaacaggaaaaaaatatttgtttctccttccatctttctgaaagatttggaattgttgcttgggatagaattgcacctcaagacaatttttactctgagtgtgtgttttttttttaaggcaatcacagtaatacatgttaagcagcaggttagatgacaaaccatgtttttcttttaataagtatctaattcagttgtaattactttgaatatttgtattattcctgtattcattgattacctcctctaactcacggtttgctgattatttccggtaggttcctgaggtgtatactccagttctggagcacctcgtggtgatgcagatagacagtttcccacagtacagtccaaaaatgcagctggtgtgttgcagagccatagtgaaggtgttcctagctttggcagcaaaagggccagttctcaggaattgcattagtactgtgggtaagtttgcaatttattgtatttatgagtaatgatggataattaacacattatttgatataggtaaagagaatctggttaccaaattcttttgtatctttgacacaacttttgaactcctaaattttggtagaccaaaatcttttcctttttttcatcctattacctctgaattttaatagttctattaatagaactattaattttaatagttttttttcattttttttggtgacaagagtctcgctctgtcccccaggctggagtgcagtggcatgatcttggctcactgcaaccactgcctcctgggttcaagcgattctcttgcctcagcttccagagtagctgggactacaggcgcccgccaccatgcccggctaatttttgtagttttagtagagacagggtttcaccatattggctaggctggtctcgaactcctgaccttttgatccacctgcctcagcctcccaaagtgctgggattacaggcatgagccaccgcgcctggccaatagttttaagttttaaaattaaagccgtgaatgaacttagaaaataaattgagaggtaaagttgggttccaaaatataatgactgtttgtttttttttgtgagttttgattctgtttttcagtgtttccttcatttttgttttctttttcttttttcagtgcatcagggtttaatcagaatatgttctaaaccagtggtccttccaaaggtaaattctgaatttaatgtttagaaaattaatctgttatcactgaaagctaggaatgttgctgaggttttcgaatataattttgcaaaagtggccgttcttttcttagttattagcaatgccttacattttgaaaagtgtaggacataatacctctatattttgttaggtgaatacacttctaaggtatgaaacatctttaagcataactttaggttttatacatttttgtaaatcagaaatgttttctctcttgaaactctaggacaaattgctaagggaggcatatcttagttcccagaaattataggacatatgatgagatgaaagattgaactatgtacgaaagcaagataaatgatgatagcacattcagtggatattgtattgaagtacttgttggtgtatcacagttttagtcacagaagaatcacatatttttccgttatctatttatttatttatttattttttgagacagagtctcgctctgtcacccaggctggagtgcagtggcacgatcttggctcactgcaaccttcccctccaaggttcaagcgattctcctgtcttagcctcccaagtagctggtattacaggcgaccgccaccttgcccagccaatttttgtgtttagagtagagacattttgccatgttggccaggctggtttcaaactcttgacctcaggtgatccgcccaccttggcctcccagagtgctgggattacaggtgtgagccaccgcacctggccttagctttttaaattatgcttttttaatacgatgtcttccttaatcatatggtctcctatgggtggcagtttaatttagaaaattctgaaaaccagcatgttctggcagcagtgctgcttctgagaatccatcactacatattgtcatgctgtctttctggccagggccctgagtctgaatctgaagaccaccgtgcttcaggggaagtcagaactggcaaatggaaggtgcccacatacaaagactacgtggatctcttcagacatctcctgagctctgaccagatgatggtaacgtttaccattgaaagccataaatgtaccttacttcctttattagtctccatagtttagacataagacttatttcagaattatattttactaactttcaaaagtttaaaacagtgtacttcaaaaataaaaaattaaaaccgtatgaatcaggaagttagaatgagagtggaaataaatgaattgaaagaaacacagacatagaactcctttaacattagttactgtagctgagtcctcattttagctttaaatagcaggatggtatagctcatgctaagctgttcttcctaacaggtccagcctgaggatggatatatatgtatttgtacgtatgtatgtatgtgtacgtttatatttgtgtgcatatttagttatgtatgcacataagtatatgtgcatgtacttacatgtacacagacataaaagatatagtgtctatatatgcatattacacatatttgtgtttatacatacacatccacagattaattggggtaaatgctttgacaaggattggcctaaatcttctcacttactgctgtatacagagtaagtatttgttacatgactggataaatgacatctgactgaaatgatgctgttataataatttaggaaggtatcttgcaacttgaaaacttccaggtaaatctgctgcagtttatcatcactgtttccataatacccaaaccggcacatacatctgtgtatgtgtcttaatgcttataaaatactaatacatttttgcacaagattttgaagtttattgtttttctttatttaaaggattctattttagcagatgaagcatttttctctgtgaattcctccagtgaaagtctgaatcatttactttatgatgaatttgtaaaatccgttttgaagattgttgagaaattggatcttacacttgaaatacagactgttggggaacaagaggttagaaatttttatcagtagtaatttttcatcatttttgtatcagctgtctttgcatataaatatttaggggacaatagcacatttgtagaggagaactggagaaaatttggttcttcaggattattatgtgccactgatgcatttctgttggatgtaacctattgtatagaaaatgttgttactagatggttcaaaaagtaatttatatatgttaattttttttttgaaaaaattatttactaggttcatttgtttcttattccttagcaatagtaaagagtgacagaaatcttattttatgtagaaatgactttgtatgggatagggaaacctggggttgctcttgtttatagttaaggaaactccaaattgtggtacaaggtgttaaatgtgttcctgatataggaaaatatagataataggaagagaaataagaaaatgccctccctttttttcacacccaattttcctagcctgagttaaagataagtcatggcttaggcctggcgcggtagctgaaacctgtaatcccaggactttgggaggccgaggcaggcagatcacgaggtcaggagattgagaccatcctggctaacacgatgaaaccccgtctctactaaaaaatacaaaaaaaggccaggcgcggtggctcatgcctgtaatcccagcactttgggaggccgaggcaggcggatcacaaggtcaggagatcgagaccatcctggctaacacggtgaaacctcgtctctactaaaaatacaaaaaattagccaggcatggtggcgggcgcctgtagtcccagctgctcgggaggctgaggcaggagaatggcatgaacctgggaggtggaggttgcagtgagccgagattgcaccactgcactccagcctgggcgacagagcgagactctgtctcaaaacaaacaaacaaacaaacaaacaaacaaaatacaaaaaaaatgagccgggcgtggtggcgggcacctgtaatcccaggtactcaggaggcagaggcaggagaatggcgtgaacccgggaggcggagcttgcagtgagctgagattgcgccactgcactccagcctgggtgacagagtgagactccatctcaaaaaaacaaaaggataagtcatggcttaagtctggagctgccctgctctggtccgaggcattggtggtaactggactccatggtaatttggctggtgagaaagaactaagatcctgggaaggtgtcttgcttgctttcgactgcagtgattgtttcagaccagatggtgctgattcgagttcatgcgtcagtacctccactgcagtcctgagaagttagacaagaggcaatggggaggatgtgcagaggaaacatgaagggacacagtacaagccggtggtcacatcagctttattgcacttggagtattctgtttttcatgcgggatgataggtagcaacactgatgtgtggtttattgctctctgtgctttgcaaatgtctaaaataattttattaaaaaaaaaaaaaacttgcccaaagggacttcctggaactgtgtcagctgacagacctgcattttagaacatgtgtgttcattgctgtcttcagtggcttccctttctcctctgttccctgcccttccagcttcattccaacagatcaatgaccacctgttagcacttcccagatatatttggtctccagcctcctcctcccttgttggttcctgctctgtatttctaactacttgtgcaacattttaatttgaatacacagttgtgtttggtaacacaaatttggtgacacaaacttagcgtgtttaaaactgatcttcatgcacttccaaaataccacatttttcatttatctttcttactactgttaataatttctctatttctctttttcttcacttgaaatctctaggtcacctattaaaattctatctctgtcaaggcattattgctagctccctcaagaagtgctgcccacctctggcattttcctatttgtcccattctctcatcacttcctgtgagtccttttggttaacgctttctgcaagtcctgcccttcttatcagaccataggtcttgagcacccatcttggtctttctcgctgttgcaatctttcttcgtagcatcaggccttgaccatgaagtcagttggaaagttatttgttgagtgattcgtgattgaatggtacaatgtttctttgctacaattactctttaagaatggagatgaggcgcctggtgtttggatgatcccaacttcagatccagcggctaacttgcatccagctaaacctaaagatttttcggctttcattaacctggtggaattttgcaggtatttggtaaaattctaattatttaagaatgaaaatgattgttagttattggctgtaatataggaaattccttatatagatgtaagaaatgaaataataggccgggttcggtggctcacgcctgtaatcccagcactttgggaggccgaggcaggtggatcacgaggtcaggagatcaagactatcctggctaacatggtgaaaccccatctctactaaagatacaaaaaattcgccgggcatagtgtcaggcgcctgtagtcccagctactcgggaggctgaggcaggagaatggcatgaacccgggaggtggagcttgcagtgagccgagactgcgccactgcactccagcctgagcaacggagcgagactccgtctcaaaaaataaataaataacaaataataaaagacaaaatctgtaatcgattatatagatctttaaaatatatctaagtgtactaggttacagttttcattttttatatttaaaagatcctcaggtagagaaaaatggattatagatataactaaacattttaggatacctcaaaatgttacgtgatgggtttgtagcttagttgttcgattatgtcccttacaattttaagatcagaatgatacaaatttctaccttcaatttctaatttgtttttacagagagattctccctgagaaacaagcagaattttttgaaccatgggtgtactcattttcatatgaattaattttgcaatctacaaggttgcccctcatcagtggtttctacaaattgctttctattacagtaagaaatgccaagaaaataaaatatttcgaggtgagtctttcttgcaggatgttgaatcttgcgtttttttaggtcatgagtatatataaatgtatcataaaatatgtgattgtggcctatgcagttttaaagtctactaattttattctatgtgtttaaaaaaattgatatgtgaatggcagttggatagcactctaaaaagctagcagcattttttgccctgatgctcaaacacctggctaattatgtaagattaacaaggcctctcaaagtatggtcccaggaccggcagccttgagcattgctttctgcatcacaaaccttgggggcaggtctctgctgccctgctaagcaccaccaggtgattctggcacccagtgaagtttgagaacaactggattagcattctcgacgctccagtcagtcacatgaggagcccacctgggtaattacagggtgagatgaggaagagggaatggacttagctgtgtgcttggcttctcactagctgccaccttccctcctcttgttctgactagcctgtgccttgaaatgtctgcagagctgattctgcctcctgtcttcattagatgttggtaacttgaaatggattcacccctctgaagacaggctaggaactactggattgggatacagtctcccgattcttgttcagtgtactaacttgctgttttatttgacagggagttagtccaaagagtctgaaacactctcctgaagacccagaaaagtattcttgctttgctttatttgtgaaatttggcaaagaggtaatttttaaatgatttatcttagtgttatcatgaactgtttttaaatgaatatctattgaaaaaatcctagtgatcataaataattattttaagaattggggctgggtgcggtggctcatgcccttaatcccagcactttgggaggccgaggtgggaggatcacaaggtcagtagttcgagaccagcctgaccaatgtagtgaaaccgtgtctctactaaaaatacaaaaattagccaggcgtggtggtgcacgcctgtaatcccagctcctcagtaggctgtgaggctgaggcaggagaactgattgaaccctggaggcagaagttgcagtgagctgagattgcactactgtactccaggctgggtgacacagcgagactctgtctcaaaaaaaaacaattgtgtcaggttaggaggctgggggaggagaatcgcttgaacccgggagatggaggttgcagtgagccgagatagtgccactgcactccagcctggggaacagagcaagactgtgtctcaaaaaaaaaaataaataaataaataaataaaaataaaaatgtgtttgctaaatctggagcgggactaaggtcctaaaaaaactaattagaggaagttattgtgcttcaaaagtccctcagccaggcactttggttcgtgcctgtaatcctagcactttgggaggccaaggtgggtggatcacttgagggcaggagttcaagaccagcctggccaacatggcgaaatcccatctgtactaaaaatacaaaaaattagccaggtgtggttgtacatgcctgtaatcccacctacttgggatgccgaggcaggagaatcgcttgaaggatggcagaggttgcagtgagccgagattgcaccatgcactccagcctggctgacagcacgactctatcttacaaaaaaaaaaaaaaaaaaagtccctcaagctctcttaacataattcagttgagtgatgacaactcaagatgaaatagattcttgtttttccatgtagtaggtattaagcatttcgacaaattaactttcctggaggttagtgtgtaatttgtaagtgaatgtggtcatgtcaataaaggctacgtgccaatttttgtatttgagaatagggcaaatactttttagttgattttcaaatgtaggctctattcagatatacattactgtcttctttcttgttaaggtggcagttaaaatgaagcagtacaaagatgaacttttggcctcttgtttgacctttcttctgtccttgccacacaacatcattgaactcgatgttagagcctacgttcctgcactgcaggtaggcgttgtcttgaacagagccatctcttcatcgctgttgtgagtcccagagcacatagaaacaccatcctcttgccctggcagtcccagcaggcgtttcctcacaggcgtgcccgggtcagggtctgcttctgccacttactggctttgggacttagacccttggtgactctgaactgcacttggaggtcgatgtgagagttaaacctgtgtgccttgaaaggctgcggtataccacagccacagagacagctgcttgctttcctcctaattacctggactgaactctccagcggtgtcgggcatccagtaataaaaaggagtattaattagaaatcacaattacttggtgtttttttcctctaaatcttatatttcctgcgtttcagtttaacttgtttgtattaacatacagatggctttcaaactgggcctgagctatacccccttggcagaagtaggcctgaatgctctagaagaatggtcaatttatattgacagacatgtaatgcagccttattacaaagacattctcccctgcctggatggatacctgaagacttcagccttgtcaggtaatgtttagaagaattgtgatgtgtattgtaattaaaatggaaatggagtaactataataggtaggactgtatttttgtaacttctgaaatttaagcccagtgtgttcaaaatatgtttgattgctatttttgtaatttccctaatttatctgactctaattgtgataaagaaatatagttgaggtattaaaaaatttttcatttactcacttatagcttactaagatttataaaatcttcaaagacaagtactgtcttcaataccttgaaatttttatgactcctaatacactgctttgcaaaaaaaacttgttgaataaatcagtcaggaattaaacacttcagaaaattcaacagtaattttgtatttttactttcactagatttttattgctttttaaaacataactggtgaagcacactaatggtagctaagaattgcgaaaaaaatgtcatcatagaaaaaacaggtttgggaaaagagtcaaagaaaaaaattatctgcccaggtcaaaatattactagtcaagaaaagaaaaagtaggacttcagagttggggtggggcacagacttaaactggaatgaaaagagacattgtcatccgatgcaagcaaaaagattctgttgggagaaagactgaagtatttgtaagaatttaagctttactatcttcacagtagaagtcaagtattaatttataaggtttttttcttcatgaggccaaaaaaagaaatacagaaaaaaaattgtgaggttttacctgtgtaaatcattattttattgttaaatcttattggcttggaaacattaagtgaaagttgtgtgacagatttcatgcactgtgtctcctttttctgacatcctcagtgcatatgcagagttcatgaagaaagagtcacgatttttttacagattgtaataacaagcatattttagagaccaaaattacaaactagttaacctttatagcttttaaaattcacatttatataaggagtgccattatttgagtattcatgacaaatacatcacttagtaaaatgaatatatctgatagcatatatctttatagtatttaattttcttttttgagttctgttaactcattgaaaagttttagattagtaaaggaagttactgtgattgttttaaaggatttgcctgttaaacatgtaccctatctagatgattcgataattgagaaaagcagaaagtaagcaaaattaggtgacaaaacaaaatctatcatgttagagacagaagttagtgttttaataactttttttgatgtatcaaacttccagaacaattgcaggaacagtaaaaagaactccatgtgttctatctagattcaccagttattaagattttgtaccatttatgttgttgcatgtactttctctattgtgtgtttgtgcatgtttttatatttacatgggacattttttttggaaccgtttgtgaataagccgaaggtgtcatagatcttgaagacttcattgtatatttcttaagagtgaggacattcttttacgtaactacagtattattatcaaaatccagaaaaataacatggatacatattcttccaagtaacagtcaataggcacatttttcacttgccctattaatttctttttttagctgcatttttcctggtttagaattcagtgtaggatcatgtgttacttttagttgtaactctttagctttctttaatgtgggatagttcttcaacctttcttagttctcatgacttgacattttgaaggctgcaggccagttattttgtacagtgtccttctatgtgggtttgtctgatgtttcctcttgatgagttttgggctgtgcctttttgacagacgctgggttctcttcaggacacttggtgcctttgctggttgtttccactgtaaccatttggtcagtgtttgcatcatctttttgtggttgtcaggttactgtttttctctctgtgtgagttagtaatttgaggcattccatgctccactttctggagtgatcagtcctgaggcctttaggtggtacagaggaaggtagatgctgggcagggggaggtcccaggtgctcccaagggtgtgaggaggtcatcccccatggggtggcctggcatggggtttacccaagccagatgaggcacccacgtgttgggacagctgtctgggatgttggggtgcaggcagggtgagaagggcgatggaggtagtagtttggttacatacaggagattgaacaaatacataaattcattgagaataagggaaactaggtttctcatgttgaagtgagctacaaatacagaaagacaggaaactggaatggacactgtggagttgcattggaagtgggtatatcagtgtgaacccatggtcctccgtctccctctgcctctccccagttatatatgtgcattcacttatggatgcatctaaataaatgtgaaaatagaactgagagagagagagtgtgtgtttgtgtgttacatgtactctggccactgaagggacctctaggagtgtggtatctgaatagtaacaagcaaacctggcacccaggtcatggcctccaaatctcattttccttttttttattattattattattattttgagacagagtctcactctgtttcccaggcgggagagcagtggtgcaatcttggctcactgaaacctctgcctgctgggctcaagtggtccttccacctcagcctcccaagtagttgagactacaggcatgcaccaccacgcccagctaatttttgtatttttagtagagatgggggtctcactatgttgaccagactggtctcgaactcctgacctcaagtcatctgcccacctcggcctcccaaagtgctggggttacaggcatgagctaccatgcccagacccacacctcattttccattaatggaaccaggactccttggttccaacctggggccgggaaaatatattatgaacttagaatactgtattttatagaacatccggaaagtaaggacctattcaaagcatgatgggggaaatgtcacaggcaaaagtagtgatgacttgagcatcaaaataaataactttagaaacgttataacccaggtaatcaaataggaagcagtgagcatgtgcagatataaataagtaaaatgagtaagttaaagtttcctagtggttttttttgtttgattgtttggtgtgtaataagttcttataaacttagcttaaattagcacccattgattatttcgtagatttgtaggacacaagtccaaatgggctcagctgggttctctgttaagtcatgtgactgaattcaaggtgttggctagtccaggcttgttcactccccatctaggttgttggcaggattcagttccatgtgattggaggaccaaggttcctgtctccttgctgactgacggctggagcatgattctcaattcctggaggcctctgagtgtcctcctaggtggcccctacaccttcacagccagcatggcactttttgaagtaccatggttttaaagtacctcagccaaacacgtactaatgattgagagtgaaaatggtgattttacagcatagacacctggtagagcccttctttgcccactgactagcagtaggacttgtgggccacacgtgcatcctgatgtgacttgctgaggggaactcagtgccactctgggcctcttctgtcaaagacacatggcctgaatctcctttttcagacagtgaagtcagtgtaaagctcagaaaatttttctggtaagacagtgaatctttgctgtcttggcagattacatagaatgatttcttggctgcacacagtggctcacgcctgtaatcccataacttgggtggatcacctgaggtcaggagtttgagaccagcctggcaaacatggtgaaaccgtgtctctactaaaaagaaaaaaaattagcctggcatgatggcgcacacctgtaatcccagctacttgggaggctgagaccagagaaccacttgaacccgggaggcagaggttgcagtgagccgagatcacgccgttgcactccagcctgggcgacagagtgagacttcatctcaaaaaaaaaaaaaaagaatgacttctcatggtacaggcaaagtccttgatcagtaaaccaaagaagcaaacttttcaagattaagtgacctttgctaaaaatttaactcatctcatactatctttttaggctcagatagtcgctttccgagatttgtcctgtgttaatgtcctttcatattctgaaaccaattgacacaactttcaaacaccagttcccagggtgtctgggagatcagaactcttctcattgaaatacagagatgttatgcatgttaacatgacctccaaatcaatcaataagtctttaaaacattatttctgtttccaatatagtaactgctactagttctaacccacaaaacaaagatttatggggtcagtcctaattctggaaagagatccagacatgaaaatgtctgagattcactgttttatgaggaactaccctccttacttaaaaatgaaaagcaggctgggtgcagtggctcacacctgtaatcccacgtaccattttgattgaccgagggatgaggatcacttaaggccaggagttcgagaccagtctgggcaacataaggagaccttatctttacaatttttttttttttgagacgaaatatcgctctgttacccaggctggagtgcagttgcgtgatcttggctcactgcaacctccgcctcccgggttcaagcagttctcctgcctcagcttcccaagtggctgggattacaggtgcgcaccactgcacctggctaatttcgttacaaaaattttaaaaattagctggatgtggtggtatacgcctgtggtttcagctacttgggaggctgaggtgggaggattgctcaagcctgggaggtcaaggctgcaataagtcatgattgcaccactgcaccatagcctgggtgacagagtgagacccttctgaagaaagaaaaaagaaaaatcaggctgggtgctgtggctcacacctgtaatccaagaaaaatgaaaaatcaggctgggtgcagtggctcacgcctgtaatcccagcacttagggaggccgaggtaggcagatcacgtgaagtcatgagttcgagaccaacctggccaacatggcaaaaccctggctctactaaaaatacaaaaattatctgggtgtggtggcacacacctgtaatcccggctactcgggaggctgaggcagaattgtttgaacccaggaggtggaggttgcagtgagtggagattgtgccactgcactccagcctgggtgacagagcaagactctgtctcaaaaagaaaatcaaaagcatgcatgcaattgtatttctgtactattcttctaatatagccacacaaccacttgttaattatataattactaaactcatgtttcacgtagaaaactggagtgggaaattgagaattgccttacacaccagcagtatgtcagactcatggagctcacagataccactgtctgcagccccccaagagacagcatgcacgtgcctgttagcatgacccaaggctcctaccttcaacggcctataaaagcaaaaaggaaaagcacataaacacaaaaattgtgccttttcatcagtatttcagtattctattaatattttccttagaaattatcaaagtacccaaccatccaaagtatccattaactcagtcagtccaaggttgcaaattgcctaaagataatagagattatcttccagttggcatgctgcacaacgtaattacttgggaaataaaaagtttacccagataatgattcaatttagttggacataaacttattacatttttcatttttttttcttttttttttgagatggagtctcgctctgtcgcccaggctggagcgcagtggcgtgatcttggctcactgcaagctccacctcctgggttcacgccattctcctgccgcagcctcccgagtagctgggaatacaggtgcccgccaccacgcctggctaatttttttgtatttttagtagagatgggggtttcaccatgttatccaggatagtctagatctcctgacctcgtgatccgcccccctcggcctcccaaagtgctgggattacaggcgtgagccacccgtgcccagccacatttttcataatcttaaaagttgtatgggactgtttcagatgttgaaaaatttctggagatggatgtggtgatggttggacaacattgtgaatgtaattaatgccactcaattatatacctaaaaatggttaaaagagtacatttcatgttatgtatattacaccacagttttaaaaaacgttatgagaagtaatgttagcttattagccggaataactatagggaaaacaaacacaagtagaataaagtgcatgttcgtgttatatttaatactgatagataaaatacatttatttaaaccaaaatattaaacttgtctctttaccacagatgtgccttaattatgtgaatattcctaaatgatcccaaattgttttctgtacgatttttaaaatctagcacatttaaaacactgttagttcaacttccttatttttggagaattttaggaatactcaatttacatatctgtataaatcaggacagagctcctttaagagactttataatctaatttatcaataccccccaaatacaggagaacattatacacaaaattagatataggcctttgttaattatagacacatacttgcaaagacacatagagagcttagtaaatagtttcagttctgcaatttgagccaaaaaccaggagatacagacatagccgacaccagctcggtcatggagtccctaacccaggagcgctagaggaattaaagacacacacacagaaatatagagtgtggagtggtgaatcagggggctgacagccttcagagctgagagccaggaacagagatttacccacatatttattgacagcaagccagtgataagcatcgtttctatagattatagattaactaaaatgggaaacaaagggatgggctgaaacaaagggatgggctctggctagttatctgtagcaggagcatgtccttaaggcacagatgcctcatgctattgtttgtggttcaggaacgccttaagttattttctgccctgggtgggtcaggtgttccttgccctcattctaataaacccacaactttcagtgtggacatcatggccatcacgaacatgtcgcagtgctgcagagattttgtttatggccagatttgggggcctgttccccaacagacatagaaaatgctgaatagtccagatatcaaagatctgttttttccagtgaactaaaaattcttaacttattggagctcaaaaaaaaaaaaaaaaaaccactaaaaactggattctcttatcatctctggcccatcagagagtagaactctttaacatcttatagaaaggaaaagaactagctagagagagcagagctaagatcccactgccagggattcattctggaaccaagagaagacttgctggagttaaaccaccggcaggtgccctcccgcggcgcagctcacctggctgtgtcagtgaatgcactggacatctcagaacttttggaaatgactttatagttgtagaactatgactctgcagagaaaaaatgaacatgtgtcaaagtttaattcagcagttaataaaggaaatagtaaaatgttacaactggttcccataacctgagtctaatcatgagaaaacattagacaaatgcatatggagagaccacgtatgaaattactggcatatgattttttaaatgtccaaattatgaaatgcaaggtaatactgaagaacagcttcagtctaaaagagactaaagagataggtcaactaagtgcaatatgctgtcctgaattaaaaacattcttaggtgaatgctgaactcggagtggtgctgaggagtgaatgttgataatctggtttggatggttgtgtggcagttgtgtgggagactgtccttgtggaaaacacacattgaagcattcggggcagtggggtgttgagtcggtcacttaccctcagtgcttcaggaaagaagttatatactctccatcctctgtaagtttatgattgcttaaaaaaaaaaaggaatttattcggggtacttcaacactgtaaatagtcttgttcctcatcaagctcaccataatagttttagtatccactgactattcttctgaatcaggtattactttgatggttgcaaaatggtgattttctacccccatcatttctttcatcctagttgatgttctactgcaagaaacaattttccccgttatttatttatctgtattagtaagatttgtggattcttattttttcagtgggtctaatcttttgccatcatgattggttttgaagcccacattgtcccagatttggcccgagtgtgatgcgtgggagccactcctgctccatgagatgattcatgctcttctcgaccctggagtcagacacttcccaaggagccatgttccttttggcagacagtgatgtttaaaagcaaccaccatttatattttttgttttagaaacttaatttttttaaatcataatttaggattttaatgtttctatttgacaatatagtttgttgcctctaatgtacattaaatgaatgaatgagtgctattttaaatttattttcgtttactattgatagatgagaccaagaataactgggaagtgtcagctctttctcgggctgcccagaaaggatttaataaagtggtgttaaagcatctgaagaagacaaagaacctttcatcagtaagaagtcctttgtattttctgtaccttacataatgcagagatcagattctaacacttgtgaaaagtaaaaatcttcatttaaaatgttagttgtttttgtatacaaagtagagtacaatataaaaataattttaatatattgaccaggcatggtggcgcacacctgtaatcccagcactttaggagggtgaggtgggtggatcgcttgagctcagcctgggcaacataggaagaccctgtctctattaaaaaatacaaaaaattagctgggtgtggtggcgcatgcctgtggccccagctacttgggaggctgaggtgggagaatcacctgtgcccaggaagttgaggctgtagtgagcaagatcacaccactgcactccagcctgggcaatgggagtggcctgacaaaaaaaattaatatatttttagctatgaaaatataaactatattaactgttttgtttatttttttggtcttgtttttctgttcattcctgccctcaaatgtatttagtggataataaaaggtaaactggttcatattaaataagcaagtcagaatactgataccagggatatgtaagactttcatttatgcttagatcttaaatatgtcatattatcaggttcagtttgttccagttttcttttttgttcttttatggctttttggtgataattccttggggcaagttttctcgagatgagccatacgatgtgatagtaaaatatgacgtaaatagagaaaattgagttagaatagggaaaatagctatttttggaatgaagtaagaattaaaatttgaaaaacttttaacatctaaaactgataatgcaaactctagggtcagttcttctcacctcattattttgggcatcttttgattgagagactagaatgaaactagaaatggcggcataaaagtttttataattttatggcacagcaggataaaataaatatatctctagttttacaaataaaatttctttttttcttatcgatttaatttttttttgaggcaggatctcatgttgtcacccagggtggagtgcattggtgtgatctcagctcactgcagcttcaacctcccaggctcaagtgatcctcccgcctcagccacccgagtagctgggaccacaggcatgtgccactatgcccagctaatttttgtatttttcgtagagatgggttttgcattgttgcccaggctggtcttgaactcctggggttaagcaatccgcccacctcagcctctcaaatgctgggattacagacgtgtgccactgtgctttgccaaaatttttgtacagatacacaatgcctgttccttagcactatggttctctaactgtgacccctgggggatccagggtgcaaggccaaagctatttttactccgttaatttgcaccacggtattatgatggagaacactgttgattctctagcgttgactctgagcacagatttttaaaaatactccgtgtgtgaggcaggaggtgcacctgaagcaggcctgcgtagaaaagtgtgacagctatctggagaaaaagcactgtgtggtgctttgaactgggagctgaagtagccactgctttgtggacacaatttttattgaaatgacaactgaaaggcacactgaggttattcataggtggatatatgcagacattttctctaaaatgaaccgagcctgccactttgaggaaaacttctgaaaatctgttgccaatgataaaatttaagcttttaagtgaactgtaaagttttggagaacttgtaactattgcagtaagtttgatagcttctcattacttaaagatttttttttttttattttgagatggagtctcgctacgttgcccaggctggagtgctcactgcaacctccacctcctgggttcaagcgattctcctgcctcagccttctgaggagctgggattacaggtgcgtgccaccacgcctggctaattgttttatttttagtagagacgggctttcaccatgttggtgaaaggctggtctcgaactcctgacctcgtgatctgcccaccttggcctcccaaaatgctgggatacaggtgtgagccactgcgcccagcctaagatttttttctaataagattggtggtgatatttgcttatgtgattttttgcatatataatgaaatgtgtcaacatttggaatatctgcacaatccagtgaaccagtattttcagatgaggaatacatgatgtttccaaattatacatggatgaaaaatccactcaaagtgcaagatcagccactggattttaacatagtagagtacgtagagttcatgataagaattcagattcgacattgtaactaacctttaagaaactacgctggttcagttttggtgtgatatcaaagaagaataactacagttagctaaaaagactatttaaaatttcttgcctggttttccaactgcaatatcggtgtgaggaccaaactgtctcccagtgagctacactgtaaacggatctgcactactgtggaatggccactttgcccagagtttcatttgtttgaaaaatatagttactttttataacatgtaatgggtttagtagtttaactatttacatagtttctgtgtttcaatttctaatgtcattaatactgataaacaggacctacataaaacagctctttgggggtccttgatatttcttaagagtggaaaggatcctgccaaaaagtttggaactgcggttctaggaaatggacatccaagtgggtggcaaagagttttttcctatgtcttctatttaatctttaacccatttgtaatcacatatatacaattgttcaaatttacagaacgaagcaatatccttagaagaaataagaattagagtagtacaaatgcttggatctctaggaggacaaataaacaaaaatcttctgacaggtaaacttcttttaaaataaataacctctgtagatatatttgtgcttttatttggatgtatccaggtcataatatattctgaatatttgctcctatatgtgatttatatatttctaaataagattataaagaataatatcttgcctaatggtttgactgtatccgtaaaattggaataattcagtatactggtagaacatatgttctagcttgacttgttaagcatgttatccagtttgaaacaatgtaatttgatactcttttccatattagtgtcgggaattccaagttaatctctttgagatccaatattgttaatattatgatatttttagaaatttttccaaatgagaattaccatttttgattagtaggctgcgtgtggtggctcacgcctgtaattccagcactttgggaggctgaggtgggaagattgcctgcgctcaggagtttgagactagcttgggcaacaacatggcaagaagctgtctctattattttaatttaaaagaatcagcttttttttttttttttcccctcgctctgttgcccaagctggaatgcagtggcacaatcttggctcactgcaacctccgcctcccaggttcaagcgattctcctgcctcaggctcctgaatagctgggattacagacagacgccaccatgcctggctaattttttgtatttttagtagagatggggtttcaccatgttggccaggctggtcttcaactcctgacctcaggtgatccaccagcctcggcctcccaaagtgctgggatcactggtgtgagctaccatgccccactgtgcctggccaaaagtctacatttttgattagtaaaaattcctctgtatttttacttttgaaatttggtgttaaatataccagtgacttttggttatttagggagttagagcctgtatttggaaagtgtttcaaagagattttttttttaagtaaaaattttgttcattgactttcttctacaaaatactttaagtaactcttactgaatttggatattaaacatttgagactattaggcttgtttaaaagtaattttactttaaattaaatcgagtgatttctgatgttgtaattacatatctgaggcaaaagaaaagggaaagatgaatgaagtgcttcactttaatagaatgtagaacagctggcattagaaatgttttgatttgtgaataattctgacactaataaaaagaaaaaaagtgtttcattcttcttaaatcttttctaacagtcacgtcctcagatgagatgatgaagagctatgtggcctgggacagagagaagcggctgagctttgcagtgccctttagagagatgaaacctgtcattttcctggatgtgttcctgcctcgagtcacagaattagcgctcacagccagtgacagacaaactaaagtacttctatttttcatttcacccattatttagatcctattgctttaaaaatacatattgcttaggatatagagaacatgtttcagccattccaatattagtaattttgtattttctgtaatatagtaattagaaaactacttacttattagaagtcagtgtcattgataaatgtaagttaagtataaatcatcttaataggtaattgggctgggcatggtggctcatgcctgtaatcccagcactttgggaggccgaggcaggcagatcacttgaggtcaggagtttgagaccagcctggccaacatggtaaaacctgatctttactaaaaatacaaaaattaggtgtgctggcatgcgagtgtagtctcagctactcggtaggctgaggcaggagaatcgtttgaacctgggaggcagtggttgcagcaagccgagattacgccactggattccagcctgggagacagagcgagactccgtctcaaaaaaaaaaaattgcctttcaaaacgttaatataccaaaagctcttcattatataaaatggaacataaagggcatttgagagtgatattcgggctatgcttggttatccccttaactctgggagattagaaacagataatctcaaattttcatacaggcatagcataccttggtgatactgcaggttcagctccagaccaaagcaataaagttaatatctcagtgtagcaaatcacactagttttttggtttttcagtacatgtaaaagttatgtttacactatactctggtctatttagtgtgcaatagcattagaactttatatacatactttaaaatgctttattgcttaaaaatgctaacaaagtgagcacatgctgttggaagaattgagccaatagaatttctcaatgcagggttgccacagaccttcaatttgttaaaaaacacattgtgtccaaagctccataaaatgaggtatgcgtgtattaatttgtaaattttctatagtgcttcaaaaaatatttttacttaaagtgatagttgaaaatgtgctaacagatgaagcaaagttatatagttctttaatatggcaacagtgaaatatacttcccagtttctaaagcttttacattttaattctttgttcttggataaaaaaacaaagtgaacagaatcattagttttatagaacaagaaatgttaattccagttaatttatatttgggttacatgatagttatgtgcaatgaaatttttcttcttaaaggctaaattgagtgacatttcaaatattctcttgtcatcaacgtgataacttaaacattgctgacctcctggtctgttttaggttgcagcctgtgaacttttacatagcatggttatgtttatgttgggcaaagccacgcagatgccagaagggggacagggagccccacccatgtaccagctctataagcggacgtttcctgtgctgcttcgacttgcgtgtgatgttgatcaggtaagggctttgaatctgaaatagttgtaaaatttctaaaagtttggtttgtctaattcagtggtcagcagagcagtggaattacctggagatggttaggaacgatactgctccctgactgctaccccaggtgctctggtttaattggtcatgggcatgacctgggcaccaggacttctaaaagctctcccctccactttcagtgtgtctcggagtttgggaatcgctgttgtagttaaaagttactgagagtccaggcatctaaaggtgaattagctgtcacccctctcatggacaaacgtagtctttcacaaagggaagaagagagaaataaccatgggccgcgcgcggtggctcacatctgtaatcccagcactttgggaggctgaggtaggcggatcacctgaggtcaggagttgaagaccagcctggccaacatgataaaacccccgtctctactaaaaatacaaaatttatctaggcgtggtggtgcgcatctgtaatcccagctacttgagaggctgaggcatgagaatcacttgaacccaggaggtggagattgcagtgctctgagatcacgccactgcactctagtttgggagacagagtgagactcattctcaaaaaaaaaaataaataaataaataaaaaatagctatggctggcaagtggcctatactatgactttatggacaaatccttcactgctgccatgaagcagaaaaaggtaagaaatcttctcagttcattttatgaatctagcatgacctggatatcagggtacacacttaaaaaagaaaatgaaatgcaaaactcattcaaaatgcagctggaaaattctgcagtatacatgagtggatatagtccagcagtatgttcagatgcactgtgattaaatagagctcatagtgaaaactggaaacttaccacagaaatagatttaacgtagcaatgaacctctccatggaagcctggaaggcatttggcagctcctgataaactaggagtagtttcacatgatgtttaatgtgatagaatgtctgcctgaatcttgcagccaggtcatcctctgtgtgaagcactgacactcccttgtgcttccacccagcatgggagcatggcctgtttctgggagtggtcagtgctttacttggagttagttaaactctgcatggacagagcctggtgttccttgcttcctctccagcatctaccccagcacttggcacttggcaatcaaaagacacttgtcagcgggccagtaaggctaggatatcagccccactaactatttgggagattctattcaatactgtaagataagaaaatcatagaaggactattaagaaggagaaaagattattataattgttttcaaaatctggaaggcccaagagtaagcatatcagctgataaactctaagaattaataaaggaaaaagctgatgaattataaacacataattctcatatatcttttttcatatattattctcatatatttcatatattagtattgaccacttggaaaatatgtctataaacatcttattcataacagcatcaaaaaaaaaatgtctaggaataaacttcaatgtgccaggcaaacatattttatgactatagaagatgaatagcttatgtacctgaggtagaagtcattattgaaaaaaacgtcgtttccccaaatcaattgataactctggtgtaattccagtaaaaaatccagaattaattttatttttgaacttaaaagaataatctgaaggagtaattgcttgagcctaataagcaagacacattttgaaagggttgcacgctggagggagtcttgtgtagtagatgttgaaaagtggccttatggagtataagaggctgaaccagcgcacagatggctcagtgggagagctaggtgctgggaaatggccccttgtgtgtatatgaaaattgtgtctatggtagggggttatttaagtgggaaatgggtcatttaataaatggtattaggtcaaatgactaacatgttaaagaaaaagttattcatgacattcgttaagatgttaaggaaaactattaaaggggaggctactccagtgggcctttacactgctgtagagggattgggctctactccaaatacttattgaccagggggattgatagccaaggagcagggtcagggtcagtggatggaaaataactaagaggaatattgggggaaccagcccccagtatttcaacgtaggttcttttctattttccctaagtgtcggccggtctgagaaataaagagaaagagtacaaagagagaaatgttacacccgggaccgtgatgacaaccccgagccgcaaaaccagcagatttttattagggattttaaaagaggagcgggtatatgaactgggagtaggtcacaaagatcacgtgcttcagagggcaataaaggtcacaaggcaaggcaaaattagaattactgatgagggcctatgtcccactgtggattgtcttgataaacatcttaacaggaaacagggttcgagggcagacaaccaatctgactagaatttaccaggctggaatttcccaatcctggtaagcctgagggtactgcaggagacaaggccatatttcagtccttatctcaactgcataagacagacactcccagagcagctgtctatagacctacccctaggaatgcattccttccccagggtcattccttgctgggaaaagaattcagcgatatttctcctacttgcacatccgtctataggctttctatgagaagaaaactgtggctgtgttctgcctgaccctgtaggcagtcagaccttatggttatcttcccttgcttgttacctgaaaatcgctgttattctgttctttttcagtgtgcactgatttcatattgttcaagcacacatattttacaatcaatttgtacggtagtggtcctgaggtgatgtacattctcagcttacgaagataacaggattaagagattaaagacaggcataagaaattataagagtattgattggggaagtgatgaatgtccatgaaatcttcacaatttatgttcagagactgcagtaaagagaggtgtaagaaattataaaagtattaattttgggaactgataaatgtccatgaaatcttcacaatttacgttcttctgcctcggctccaaccggtccctccgtgtggggtccctgacttcccacaacagaagaaacatcaggcataaagaggattgtggctaaaccaatcctaagagtgttatggctgaagatgggccagggtgaccagacactgcctgggggctggggggagatgaggaattagattatatatcaaggggaggagttttcactgaactgactcagcggagttcttggtgaaactggactaatagagatgaacatggaagcccagaaatcaaggcctagttgagaagagttcagaggagcctgactagagttagggtaaggaagaggggctttgtcacaagtgaagaaactaactgtaaatcaataagatttagaaggaaaaacgaactataaataaattacagaaaaatgtaatgaccacatagcatatctgtctgtgtatatctttaggtcttttttgttgataacacatcagtttataatattaaaatgttcaaagataaaaatgaacgttcacgtcacccctttcacctgcttgttccctgggaaaagatgttagatcctctgtaaagtctggagaatgtctttataataacacatcttgacatgtgcatagatgttttgttaacaaaaagtagactcgtagcatttcaaaacgttttcttctgtgtgcagtgtgatttctgctccttggatggatttcattacttttctataatcagcatccttctgtgtctttctataaagtttgtacagatagggagacacataaaagtgttaatgtattgatagttttgaccttataaatgtttaagactactgaatggcacaaaaccaacattgtaacatgtataatgtgcaacatactactgaagagatcagattttaaaatggacaaatgtataaagaaaaaaataggcagctcataaaagaagaaatgtaaatggccgatggaatgtatcttaaaatagtcaaccgttttgtaaacaaggaacttcaaattaaaatgatattggctactgtcaaatatttaaaagatgaacaatgtttggtgttgccaagggcacaaggaaaggaccctgcgtgtcatggttggtggggcgacacaggcacagtgctctgcagctgggctcggattgagtgaccacagtcctggcctagcagcttccttacaagagagctgcttaaacagtgtgctcaggactctccactctgtatggtagtcataatttagaaatacttgcatttctagctgtagggttctggtagcttggttgtggtccatagttgaggtactgggtggctactgaaaacattggtagagtgcatatgtttacgtggaaagtactctaagaagaaaccagttactggtttcttccaggaagacaggagctctgcctccttggcagatttatttttatttttacacgtgtatatacacatatttaaatgtatataaattggccgggggtcaggagtttgagaccagcccggccaacatggtgaaaccctgttgctactaaaaatacaaaaattagccgggcgtggtggtggacgcctgtaatcccagctacttgggaggctgagacaggagaatcacttgaacccgggagtcagaggtcgcagtgagcccagatttcaccactgcgctctagcctgggtgacagagtaagactctgtctcaaaaaaaaaaaaaaaaaaaggtatataaataaaatattttgaaagtcgacagtggttacctttgggatgtaggattgtagagggatgattttctataaaggggtatgtctgtattgtgtgtgtgtgtgtgtgtgtgtgtatatatatatatatatagctatgtatacatgtattaaaaaacttatgtactaagaataaaacagtatgattcttggccaggcgcggtggctcacgcctgtaatcccagcactttgggaggccgaggtgggtggatcacaaggtcaggagatcaagaccatcctggctaacacggtgaaaccctgtctctactaaaggtacagaaaattagccgggcgtggtggcgggtgcctgtagtcccagctactcgggaggctgaggcaggagaatggcgtggacccgggaggcggagcttgcagtgagcagagactgcgcgccactgcactccagcctgggcgacagagcgagactccgtctcaaaaaaaaaacaccagtatgattcttttgtggaaaaaaaagtgatgctttaagaccaggttaaactttcaaactgaaagttaagacccttttatattgattaattttaaaaattgcttcatagaggccagtgaaggtattaggggaaaaaaatagcttcaaagactagaaagactgtttggaagagtctctgtgttgtttagtctgagccctgggacattttgcatcatttttgaggtgatattaactacagtatggacctctaatatcaaagtacttaattgttgagctcaataaccgtggggaataaaggtctcctggatggctcagtactcctataaaagccctggcctctgaggcagaaatgtacaggatatcagtgtagggagtgttcaccttaacttccaccacaagcattttactttttttttttttgacggaatctcactgtgtctggagtgcagtgggacgatctcggctcactgcaacctccacctcccagttcaagcgattttcctgctttagcctcccaagtagctggggttacaggtgaccaccaccacacccggctaatttttggatttttattagtgaagaggtttcactgttttggccagagtggtcacaaactcctgacctcaagtgatccgccctcctcagcctcccaaagtgctgggattacatcgtgcctggccattttaattttttttttagacacggtgtccctctgtcactcatgctggagtgcagtagtgcagtcatagttccctaaagcctccacctcctgggcccaagccatccacccatctcagcctcctgagtagctgggactacaggcacgcaccaccgtgcctagctagttaaaaaataattttttgagagacaaggtcttcctatgttgcccaggatggtcttgaagtggcttcaaaagaccctcccgacttggcctctcaaaatgctgggattatgggcatgaaccactgcgcctggccagcattttactctcatgtataatgagggttagatctgtagcagtttatctagctaattgctctgatccacttctctttttgctccaagatggccacatggtcacacctccaccaggccactaggttacacttccaagcctccaggaagacaggagctctgccttcttgggtatggatttacttgtcataagggaggagcccagacctggagacatcttggattttacaaagccagggagcacggggctacctggcccctggagaggctttatttatgttccagaagattagacctaggatccttttcatcctatctccatagaggttttcctccctccttttggcagcagtgggagaggcagcttcctctttgtcctgtatataaacagattaaatctgtttttctatgttcctcccctgtggtactggctttgaatttgtgtatataggacattgattgggtttcattttgtcaccacaaggggagacagttaggctgtggggaaccacagggttgttatttgctttgtacaatagttgaatagcgactagattgtctgtaatccaggatatcttgtgtgcacgttcaagatcaaatgaataaagatgagtattacaaagccaacaatatgtatcctaaattgccctcccaatcagaggaacaatgagcttttgttgcatatttttctttgctggactcttcatcatggaatttaactggaaaaggaaactaatggggctggggatggtggctcatacctgtaatccctgcacgttgggaggctgaggcaggaggatcacttgaggccaggagttcaaggccaacctaggcaacatagtggaaccctgtctctacaaaaaaaaaattttaagttaactgggtgtggtggtacatgcctgtagtccagctattctggaggttgaggtgggaggggaccacttgagcctgaactaaaaaaggaaactaatacaaccatggtagtagtattacttaattttatactgcaaatggcatttaaatggaaccctttacagcgtaacatttctttaacatgaagggaattaactttaatggtattgtttcttcaggtgacaaggcaactgtatgagccactagttatgcagctgattcactggttcactaacaacaagaaatttgaaagtcaggatactgttgccttactagaagctatattggtaagtaatagttgattcttttcctcttactcccatcgattagttgtatttgatgtttgtttatttatttatgtttttgagacagtcttgctccgtcgcccaggctggaatgcagtggcacgatcttggctcactgcaacctgcgcctcccaggatcaagcaattctcctgtctcagcctcctgaatagctgggactacaggtgcacaccaccatgcctgcctaattttttgtatttcaatcagagacagcgtttcactttgttggccaggctggtcttagtcctgacctcaagtgatccgcccaccttggcagtgagccaggcacagtggctcaggcctgtaatccaacactttgggaggccgaggcatgcagattgcatgagcccaggagttggaaaccaaccaggccaacatggagaaaccctgtctctactaaaaatagaaaaattagctggcatggtgttacacacctgtagtgccagctcgccaggtggcttaggcatgagaattgcttcaacctgggagacaaaggttgcagtgagctgagattgcgctactgcactccagtctgggcgacagagtgagactctgtctcaaaaacaaagaataagaagaatttctgagtatatccaattttctcctatactcagattcaataactaaagggccctggaaacagcagttcaccttttacacagaactctcctgacacggagaagcattgtcttagaatttggtcgccagctcactgagggcagaggcagtgaggccagctaaattgtagtttttttttgatgcttattttactataaattttgaacctgtgcaaataagtttatgtctcctgcacagccctggttatgctgctggcagtgtactctgagtgtgatctttcttagtcatgttacgggtaggggagagtgactgaacattcgttagggtggtgacataattaaacctgtagtttaattccctgcagtgtctaccagtgaatcctacctataataaatacagttagctaaagttaatttatggcttatttacattcagatgttttcattataatgtttctgttaaaaagtttttattttagttgttttctgtttcttttctcccttttgatccttgaaggtagattaagtaagagattaagaaagaaatctgataagtaaaacgagatagttgaggaaagaaaaggtaaagaagcagcatgaactcggtagcacggcactcaagtgaaggagggccgtgggtttcctggtgagagctgctcttccctgcatcaccacttggcgctggtgacctctgctctgaaaagcaggaagcaccctctcctcccattaccatggcttgtgttacctttttggattctaattacctctgcaagaaaggattttatatgtagcagataactggaagtgttaggcagaactctcttaattcattgttgagtgtacgttttcaagttaaacttttcctttgtagatctgagacagcgtcatgactagaaggcaacaaagcataaagtagaatacatctctgtgtggtcgttggtcaaatgtccatagctgttttcggcagggcctttatggggtctgctcttcatgcctccataggattttcctttatggagcagtacagtttctttggaacttcaaagggtcttattctctttgacttcaatatgcaaagtgtctcaaaagctgttatggggtaaaatcaacaatcaaaattcctctggaattcttaggatatagccattttcttttttttcagggaagggaaagattgttttgttataattaaagttttctctcccctcttcatggcttttcagtttattaatttgtttaaaagaaaatgttttcattatatcagaaggaaatagttattcaagcctagattctggatacactatggagattggttttactaatgtttatttttttcttgactagtgctataaattaatttttaacatactttagttatgctcagagatagaccaagggtattcagttgtcagtggttataaaaattagtacaatcaaggtctctttgttttgtttcaggatggaattgtggaccctgttgacagtactttaagagatttttgtggtcggtgtattcgagaattccttaaatggtccattaagcaaataacaccacagcagcaggagaagagtccagtaaacaccaaatcgcttttcaagcgactttatagccttgcgcttcaccccaatgctttcaagaggctgggagcatcacttgcctttaataatatctacagggaattcaggtttgtaagctacacaacagagaagagaaacttgtggttttgaaaggtgacttggagtttcactctgtgtatccgtgtgtcatatttcctgcatttagtaagtaattatgtgctggatgctgtgctgtcttctggaaattaaaaagtgaattaaaattcagtttgcactccagaagcttggaaactgctgagaaatgcatgtaaacactgtctcagccattttggaaatgcaacaaaagacacatatacaggggctttgggtgcacagaggaggagtagctgatccagggtgagcaagtttgctgtggcctcttgctagggtttatattggagatgagacttgaaggataaatggaagtcagccaaggcattttagatcaaagttagtgggtggtgggggggtagagataagaaataggaaggtgtctgaggcgataaagtcctttgaggtttggaggcaggtgtcgtgaggctggcgaggagggctctgcttgctgtagtaaggagcgtaggtcaccgctagtgacagaggatctgtggagtagtgggtgcagggagagatgcatttagatttcctcctaaaatccacttgctggtagctgtgtagagagtgggtctgagtagactgaagactggaacaccagtgaacaggccatttcagaggtccaaggtaaaagacaagtggtcactgacctaaggtagtggtgttcattcattcatccagcattccttattaggaatattgtgtaccacatttacctgtgtaacctcacatcctgcacatgtacccctgaacttaaaagatgaagaaaaaaaaatgatgtgccagacctgtgtctatgttggaggtataacgatacagcccttcgtgagggttacatttcagaaggacacatagataataattagccacataggcaaatgagcagttctgcagatgcaagggacagaggcacttgtgtggaaacagagcgtgtgctgcctctttggctcatgtagctttcctctagtctgctcttgaggaagtatctttgagaagtgttttaggttgtttcatggtttttcttttctatttttttttgtttttgtttttggagacagagtcttgctctgtcacccaggctggagtgcagtggtgcgatctcggctcactgcaacctctgcttcccaggttcaagcgatttgcctgcctcagtcttccaagtaggtgggattacaggcgcccgccactacgcatggctaatttttgtgtttttagtagagactgggtttcaccatgttagtcaagctggtcttgaactcctgacctcaggtgatccctgcctcagcctcccaaagttctaggattacaggtgtgagccactgcacctgtttcatgttttaagacagagcccccccaccccgccctttttttcgtctgagacagggtcttgctctgttgctcaggctggagtgcagtggggggatcatgactcaacctcaacctcctgagctcaagtggtcctcctgcctcagcctcccaggtagctgggaccacaggtgtgcaccactgcacccaactaattttttttttttaattttttgtagagacagggtgtcactttgttgcccaggctggtctcgaactccagggctcaagtgatctttataggcatgcaccaccacacccagctgagcctttaaaaaaacaacaacaaaaaaacaattttttttttttttgagctggagtcttgctctgttgcccaggctggagtgcagtggcaggatctcggctcactgcaagctccacctcccgggttcatgccattttcttgcctcagcctcccgagtagctggggctacaggcgcctgccaccgcgcccagctaattttttgtatttttagtagagacggggtttcactgtggtctcgatctcctgacctcgtgatccacctgcctcggcctcccaaagtgctgggattacaggcgtgagccaccgcacccggccacaaaaaacaaatttaattaatgtgtgccttctttaattccattccttcttttctttgtcctttctgctttattgttttcttaggtgaggtttcctattctttattttacagggaagaagagtctctggtggaacagtttgtgtttgaagccttggtgatatacatggagagtctggccttagcacatgcagatgagaagtccttaggtacgttttgcttcagtgttctgtgtgcgttacaggtctgaagagtttccccaatgaggagttaaggctcgtgtgattctcttataaggttttttttttcccaagagttctataaattaataaatgtgaagagaatccccttcagtgcctcaaacccagcttgttaataattttttcatgcccttattttctttgactcaccatgtactcctggtggccattgaggttgaccctggttggttgcagattctgcccagggcaggggagacaacgaagccagtcagacactatgatgctgtgatgacagaacatgaaactgtgcagatatggtgctgaagaaactggatgtggtaaccactgagatgtggtcagtgcctctgcactcactcgtgatcatttagaaagtagaaagtggatctcattacaggactgtgatagagttgtttcatccatgatgaaggaatattataaagatattaagtcagaagtaggctaaaatagctaagagagtaataaatgattacaattaaattctatgcaagaagctattaggaactacatagagttgttgagctagaagacttcttaactccccgttggtcccagcacatgatgtagttggggcacagaggctcaggcgtgtcattgactgagacggccacacagctgtggcaggagtttatcactgatacgggtcttgacttattttattttatttgtttattttttgtgatggggttttgctcttgtcacccaggctggagtgcagtggtgcgatctcagctcactgcaacctccgcctcctgggttcaagcgattctcctgcctcagcctcccgagtagctgagactacagggacctgccaccacgcctggctaatttttgtatttttagtagagatgtttctccatgttagcctggctggtctataactcctgaccttacgtgatccacctgcctcagcctcccaaaatgctgggattacaggcatgagccactgcgcctggcaactttgtttattttttaaaaagacagactgagctctgttatccttcatgttgatagtctactgtgggcaaaaatgtgtaaaatttagtcctcattgtcaaattgcttaaatttgctttgtttatcttgatttcccatatgggtgaattttttcaacgagtgaaactttttttgtgatcacggacatatttaaaaaacatagaaaactttttcttggtgacacaggtcaaaataagatgtataaggctcctttcctaaataattccagacttctgtgagtgacttcaccatcttacctctgttgtacttctccagaggctgtattaccaaacgataccgtagtttatcctgcataggaagggaggtcaagggatttacacccctttaaaatagccacattgaagtccacaggctctggcctggtatgtgggttttgtaatacctgcaaagtctcttccatctcaggtccattaggagaggctgtgctttgggtggccgtggtgttggtggtacagtttctagttaggtatggcattgctctgagtgtgtgcatgtgtttgtgcgtgcacgcaccatgctatcctgcagtcttaaataggggttttgtgttcatttttgaatatgcagtgtgaatcatttatctaattttattattcttagggatgaaaacatattaaatctatagtaaaattaccttttcagttaaaaattaggccaacacatttataatacaaatttaataataatcagctatatatgccttctttggaaatatgtctctgtacttgagaacaggtacaattcaacagtgttgtgatgccattgatcacctatgccgcatcattgaaaagaagcatgtttctttaaataaagcaaagaaacgacgtttgccgcggtaggtgatcttgcttccttttccgtcttttcccacaacataaaactaattcacagctaatgaaggacaacctgggatggatctgtggaagtataaggaattacttcctaaacaaggaatgtgtggaagtctgaagagttcgttttccaaaaacgttaaaaagctttgtgtttgaaaatacttggtttaagggataaggtataaggtatttgatctgggttgagatagtacatacaaattgaaaattagttttgtaacagacgttttatttaatatgcactaattttgaacatgttttgatgtggatgatttgactagaatatgcatgaaccattattccgtaaattttgaagtgtatgaactgaatgttcaaatagtaacattttgacagacatggaattataaaattaggaaatgaaactgcttagagccaaccaaggctgggatgttggccagtggtttccagtttttgcccttattccatcctagtggtgttgccttctccagtagggtgagtgccctccataagcccctccagatctctgcagggtatctggggacatctgttatccatgctagtgaccgccactctggagaagcacagtcccatgtggactggattattaatattttctcagttgttttaaaagttgattcttccagattctactattaacttacgatatcagtttagttcattggttctaactttagcatacattagaattgcctggagatctagttaaaacacagattgctgggctggccccaccctcaatttctgtgtacccctggggtagggccagataatttggatttataacaagtgcacaggtaatgttggaacagctgtccagggaccacactttgagaagcactgctttacaaggtatattgcaaaggaaacatgaaaatacttagtgctgttcttttaaggagaactttttaatttttccccacatgaaaaaatgaacatgagcagcatttaggacccatttcacctatgttattttgattgcatctaattataatacattaaaaataagtcgaatgccttttagtgagatttctacatatatctgtgtgataaagatgagtttatgatttctagagccttggtagctgaatgttgcatgttggagagggactaatgacagtatgctgtctctgtgcagaggatttccaccttccgcatcattgtgtttattggatctggtcaagtggcttttagctcattgtgggaggccccagacagaatgtcgacacaaatccattgaactcttttataaattcgttcctttattgccaggtatggtaatctgtatatctttaatttcaccacggtgctttattatcccatttaaaagaagtaaagaagaattgagtaattgggtatcattgcagttaacatggtattcagttaagattcagaatattaacagttgatgaggtaatgcagttctgtttcagcatgtgattaataagaaattgccagcatcctaagtctgaatgatctcaaatcatattaaaggaaagcagtgaacctgtgcttttcagtaattactaaaccattaaactgcttatggactgaaataatgacaagtttctcaggaataaatgtattgctcagttttgtccattaagtccaaacctaggtttgatagcttgggagtggggaagctgtgctcaggacagatcaagccctgccttcccccattgtgggctgtcacagccctgtgccatgtgtggagagtgcctcaggttagatgggtgtgctggttccttggcaaaagttggggtggagtttttttttttttttttttgagacggagtctcgctcttttgcccaggctggactgcagtggcgctatctcagctcactgcaagctccacctcctgggttcacgccgttctcttgcctcatcctcccaagtagctgggactacaggcacccgccaccgcgtccggctaattttttgtatttttagtagagacggggtttcaccgtgttagccaggatggtctctatctgctgacctcgtgatccacccgccttggcctcccaaagtgctgggattacaggcgtcagccactgcacctggcctggggtggagttctgtctgggctttttcttcatggaacaagaggaaaaaagttactttatatatttccaggcttctaaaactaaaaaggactttacattttgtcatactataggatatattataatgttatatactacatattatatactatagagtatgtataaatacatactataactgaattagattattttatatatgctatataaataatgaagtataaatttactatatcattttacatgtataatagaaatgtatatctgtgttttaatttagataattgtttaaaaaacattagcatttaaaaaaattttttttcccccgagacagagtcttgctctgtcgcctgggctagagtgcaatggcacgatcttggctcactgcagcctctgcgccctgggttcaagcaattctcctgcctcatcctccagagtagctgggattacaggcgtgtgctaccacgcccggctaatttttgtgtttttagtagagacggggtttcaccatgttggccagtctggtctcaaactcctgacctcgtaatctgccagcctctgcctcccaaagtgctgggattgcaggtgtgagctaccacgcctggcctagcattttcagtttgcttaatgtgtttagctaacaacttttttttttatatgttaagtcattctcacagcaaccttgtgaaattagtcattgaagagtggaccagtggctggggaagggctggagggcagtgggcagcatttttcctatatttagtagaaaccgagaccctgatagcatgttggtagagctgcttatgggcagaccactatctcacattgagtctgtgactctggtagcacataggatttcttgtgacctcagctgtactgatctcaggcatttctagtgctgttctcttctcagttgcctgtgatacggacctcatgtattctgaactaaatagagttccacctctcagcattgtgttttgttggacaaaggctgctaggtagtaggtgagccttgcccttcttccaacaggtaatttgtataacattaaggagccttccttgatttatctcttctgtggccttgcagggtgtagccacctttctcctttggtatctttatcctccagtggctatttttgttttcttttatttttttccttttcagttttagagacaaagtctcactatgttgtccgggctggacacgaactcctaggctcatgtgatcctcttgcctcaacctccttagtagctgggactgcaggtgtgcagcacctgtttgtttttaagagacagggtctcactctgttgcccaggctaggtaggttgcagtgacatgattatagttcactgcagccataaactgagcttaagtgatcctcctgccccagcctcatgagtagctgggaacacaggcatgtgctaccaggcctggctcatttttaagtttttttgtagagatagggtcttggtattaatatgttgcccaggctagtcttgagtcctgaccccaagcagtcctcctgccttggcttcccaaagtgctggaattacaggtacaagccattgcatctagcttccttcagtggtttttaagcgtctgtgtcaggtgtctctttagctcactgtgtagcagcagtcctgggtacaggaacacccagatcagtagggcttgacgacaggtgcagggttgtccctctgacatgtgtccaagagagacagctcctggcggcttctgaatactgagactcagcgtggtccaggcccagaaacagacagcaggtcctcggtggagaccaaggaagaagtagggctgggcaggctccccaaccccaagcgtgcttgtctgcgtcttcagcttctctgtcttcttgtgatgtacccttgtctgctctctctcgatctgcctttttgtgtcctttctttctatcatttttcttctgtcactcttgatgtagaatttaaatatcttactatttattttttgctcattattatacatttctttgtctcttagtgaaagtaacagaacattacagaatattcctcctcttaatatacaaaatgttctctctttctttcttttttttataccgagtctcactctgtagctgaggatgtaatgcagtggcgtgatcttggctcactgcaacctccccctcgtttaagcgattctcctgcctcagcctcctgagtagctgagaccacaggcgcgcaccaccacgcctggctgatttttgtatttttagtagagatggggtttcaccatgttggccaggctggtcatgaactcttgacctcaagtgatccgcccatctcagccccccaaagtgctgggattacagacctgagccaccacccccggctgaatgttctgtttttaatacatcagagatacatgttttgaattcttcattagagtcagaatgatttgacattttcagtgctactgatttcagagcatacaaaatgcagttttatgtatttatctttttaatttagaagaagtttaatatttaaaagaaaatttcctggaaaaaacggctcattcgattctcttatttaacaaacactgcacttactgtgtggtagacgttattctaagcacatgttcaaatattaactactttaattcagctaatttttgtaacagccccagaggtagatattattgttctcatttgcaaatgctgttttgtgacttaaaggaataataatttttaaataaaaaggcaggggaaagagtattagtatgcagctactccaaatggtgtccaactatttttataatgtttgaggaacctgaagagaatggctgtggtggaaataccttcttggaagtaattacagtgaaacaagttgaatgcgtagtaaaatgaaaaaagattgtcccataacattttgaaattttaggtacaaagattagattaaagaaatgtaggtatatgtgtgcattttaattttgtttctttttaaaggcaacagatcccctaatttgtggctgaaagatgttctcaaggaagaaggtgtctcttttctcatcaacacctttgaggggggtggctgtggccagccctcgggcatcctggcccagcccaccctcttgtaccttcgggggccattcagcctgcaggccacgctatgctggctggacctgctcctggccgcgttggagtgctacaacacgttcattggcgagagaactgtaggagcgctccaggtcctaggtaggtcacccttgccttattctggtgtgtgtcgtgctgccagagtcaccctgggcagtggctctgccaggtcagaatcccagcgacatgatggtaggtgctgtgcaccaccttgcccgtgctttcatgtcacttctctgcaagggttccattcttcacacttcaaagttgacaaatacagtgttctcatagctttatataattgaaaaagttacactttctggtgtattgtaaatgttgacattttaaatacacaaaactgttaatattacttaaaaaaaacgtattccatgaacaatgaatactgtagcagttttatgtacagcatcattggctttaaaatatagctgctttattggaaattttgcagagtcccttaattcatattctcatttcctacccttcaaatgattttatcctaaagtattaagttttttttgcttaagattttactatatccctatctacgtctttttaatgaaaagatgtacatatttaaagattccttggctgggtgcagaggctctctcctgtaatcccagcactttgggaagccgaggcaggaggaccacttgagcccaggaggttgagaccagcctgggcaacacggcgagacactatctgtacaaaaaatactaaagttagtcaggcgtggtgatgcacatctgtgatcccagctactggggagtctgaggtgggaggatcgcttgagcctggaaggttgaggctacagtgagccgtgattgtgccactgtactctagcctgggcgatagagtgagaccgtgtctcaaaaaaaattttcttctgtgttactattatatttgttattagtgcacattacattttttactgccacaacaacaaatataataaaaattttggtaattattacacataaaatgtaaaattatgcggttggaattttatttttgtacgtatagattttagtattaaaaaaacttgttcatggccggacgcggtggctcacacctgtaatcccagcaatttgggaggccgagatgggcacatcacctgaggtgaggagttcgaaaccagtctggccaacatggcgaaatcccgtatctaccaaaaatacaaaaattagtcaggcatggtggcaggtccctgttaatcccagctactcgggaggctgaggcacaagaattgtttgaaccccggaggcggaggttgcagtgagctgagatcgcaccagagcactccagcctgggtgacaccgtctcagaaaataaaaccaaaacaaaaaaaacttgttcacataaataagtgccatatttggtttattctaaaatgtacattttcccatatttaacagatccatggttgcagtgtgtcttacaatccaatattctattggattcaaggatatttggtttttgagaataattagtttttttcttttttgaaatggagtctccgtcgcccaggctggagtgcagtggcgcgatcttggctcactgcaagctcatcctcccgggatcatgccattctcctgcctcagcctccctagtagctgggactacaggtgcccgccaccacgcccagctaattttttgtatttttagtagagacggggtttcactgtgttagccaggatggtctcgatctcctgacctcgtgatccgcctgcctcggcctcccaaagtgctgggattacaggtgtgagccaccgcgcccggctgagaataattcttaatataagttatctcagttcttggaatacatcaaaatacatgttatcaaaattatttttaacgaggtcagttgacagtttggattgactttccttaaattatgttggaaacaaagaattagaaaccatgagacttacaaaaaggctttcctactcaattgttgcctttactctttcaacagtgtacaagtattttaaattgtcccttggcactctaaagggctgtgcaccttggagtaataaactacagttagactggagagaggtgagggtgggtctgtctttcattaagcaggagagtcctgatgaacaacctgagatgggaaaggagaacaagctccagggtgttttcagacaaacgagttttatgacaaagcccgtttgaggattgatctgaaagttgattccataagatgactggtgcctgtccacacctgcttgaagactgctccataatttgtctctgtcctttgaaggacaggattttttattttttcattattaataacattcattattgataacagtgctaaaaagaagattcttacaaccacatctcttcaattctgcagtcatttcattaggttaaaatttcagtgctggatcaaagcataatgagtttttaaacatttgatagaaattggcatgcatatttttaaaaacttggtacgaattgccaaattgccctttaaaatgagcatattaatttatcttctcacatgtaatgtttgggaataaagacctgactttccatcaatgtgtcctttgatatgagaaaaaataaatgccactttattcagctattattaagctgtttgtttcttttgaaaaattttgaatttttgctgaacgtataccatgcctatacttacagaagcaattttatgttaatcttagtggagttgaaaggaagcatatattaatactttaatataattgcttctaggtactgaagcccagtcttcacttttgaaagcagtggctttcttcttagaaagcattgccatgcatgacattatagcagcagaaaagtgctttggcactggggcagcaggtaacagaacaagcccacaagagggagaaaggtacaactacagcaaatgcaccgttgtggtccggattatggagtttaccacgactctgctaaacacctccccggaaggatggaaggtaggctgctctgttaatttgaggtcagtttttggtactggaaaactacttcaaaggtttctgttagaaggggttttggcttttaataaaaatttatcattattattattattattattattattatatttcatcctctcaacccagcttttcctgacttcaggaagaaccaggaagagaaggctaggttttggcttttctaaaactttgcattgtcagaagttatatgtcaaaatcaatttgtcaatttgttttagttgacaaaaactgtatttatggtatacagcatgatgttttgatatgctctgccttgtggtatggctaaatcaagctaattaacgtatctgttacctcatatatgtaacattttttctgatgggaacttttcaatctattttcttagcaatttgcaaaattacaatgcatcgttattaactacagtcatcatgatgaatgatctattgaaaatcatgaaactttgcatgtccttcagagtttcactgtgtgaataaaatataaaatagttttttctaattgttttattggatgctgtattttatgctatgatcaaacatctaccttaggaaacacacactcgcaaatatttatagatgtatccatgaggcttattgtataaacaaactccagtcagttcattcagggaatctctgccaggtgcctgtggcacgccaggccctgggatgcagcagtgtcctgagtcaggggcggggaaaccctgtccatggacacaacctcacctgctgcctgctccgtagataaagctaaataggagcatggctgtgcgcctctgtccacctgttgtctgtgctgctttcttatcagacgcgtaaggagttgaagcagagactgtctagcccacaaacctcaagtgtttactgtgcccccgttttacagagaaactctgcccacctctcccttagtcaggcagaagttcccaaccttgtgggccctgcactttggtgaaaatagaagtgctggctgacgaagtgtttttatcaaacaatctgttacagctcctgaagaaggacttgtgtaatacacacctgatgagagtcctggtgcagacgctgtgtgagcccgcaagcataggtttcaacatcggagacgtccaggttatggctcatcttcctgatgtttgtgtgaatctgatgaaagctctaaagatgtccccatacaaagatatcctagagacccatctgagagagaaaataacagcacagaggtgggtacttgggtcacaatcggggacatgttgtcctggaatttcaggccctagtatgttgccgtgctcctgcagctgctcctgcttcctcagggaaggcttatatcagtgggatgtttgctgccagtgacctcaatagttgtttagaaaacacatttaactagtgccttccctgtaccaaacttaagcaaacttcagacatggttagcgccatgtttgatctccatgctagcttagtgcgtgtggatcctgttagatgttgcctctgtttgcttcataacagtgcaaacatttttttcagtgtatcttgataatttaacgagatcagagctcacctaatttactgttttgtcacatggccagcattgaggagctttgtgccgtcaacttgtatggccctgacgcgcaagtggacaggagcaggctggctgctgttgtgtctgcctgtaaacagcttcacagagctgggcttctgcataatatattaccgtctcaggtaactataacttattgtttttacatttattttagctttagtatgataattagtgtatttatttatattatttcttaaaagtcctttatgtattgagcatgctgaaatgggaattatagaaatacttgctcaagacatgtagatattatgtatctgtatatctatgatatatcaatataaatatgaaagcaaatgtaaaaatttataaatataaaatgaaagtaaaataaaggacatttaggtatttacagagcagctttctgaaaaactttaggaactgctgttgtgcctttgtggcaagacaacacaaatgaagaatctagcatagaaagcaaggttgagccagatacagtggctcatacttgtaatcccagcactttgggaggctcagataggaggattgcttgaggccagaagtttgagaccgacccaggcaacatggcaggaattcatctctacaaacaattaaaaaacaacaacaacaaaaaaaaacattgtccaggagtgggtgccgcggacccgtagtcccagctactcaggaggctgaggtgggaggattgcttgagcttggaagcctgagaatgcagtgagccacgattgtgtcactgcactccagcctgggcgacagagcaagaccctgtctcacaatagcaagaacaacaaaagcaaagttgaattaaaatttttctgaatattggaaggtagttgtcagtgctatctgaagtgggttttttatttaatgagaggagtgaagttgtttttttctaagaaatatctttttgctaggcatttcagtgttggcttccttttagtccacagatttgcatcattctgttggcacagaacttctttccctggtttataaaggcattgcccctggagatgagagacagtgtctgccttctctagacctcagttgtaagcagctggccagcggacttctggagttagcctttgcttttggaggactggtaggaaaaacgcctctgcatgctgcactcccctaataatagaaatacatatgtcacttgcaggtgtctctagaaactgtggaatttgggtagtaaggttttagctggacaagtattgtatgatttgcatgagccaactttctaaaagattattttctcaatagttaaaaaaaaaaagaacggaatagaacaacattctttttaaatagaggttttgtctatcccactttgtttccaaaaggaattagctagagaacgttttgtgactatgaagctgagtcatgttgacatgtggcctcttctcctctccttggtggtccttcacatggatgattgggagggcctctgaaggataatcccagaggaaccagagtctccaaaaaaatattctcatggctctttgaaccatgcagggctggccttaaatagtccctgctgtagctgaaatctgcagccagccctctgtgttcactccatcccaactttctttcttctgtagcagaaacccctttttcacccctttgtccgattaatgtaaacaattacatatttaaattgtctaaaaatactcacccttaatagactatcctcaaagcaacaacactggggtaggcagatggcttgagcccaggagtttgagaccatcctggacaacatagcgagaccctgtttctacaaaaaaatttaaaaaattagccaggtatggtggcacatgcttgtagtcccagctacacaagaggctgaggtgggaagatcgcttgagcccaggaagtcaaggctgtagtgagtcatgatcatgccactgcactccagcctgggcaacagagtgacaccctgtctttaaaaaacaacaaggctgggcagggtgacttattgcctgtaatcctagcactttgagaggccaaggcgggtgaattgcttgaggtcaggagttcgagaccagcctgaactacatggtgaaatgctgtctctactaaaaatacaaaaattagccaggtgtggtagaacgcacttgtaattccagatactcgggggtgctgaggccggagaattgcttgaacctaggaggtggaggtttgcagtgagccgagatcgtgccactgtactccagcctgggcaacagagcgagaccctgtctcaaaaaataaaacacaacaacaagacttttggacatttggaagaaatatgggtcaaggaagatttctttcccaaaatgaaacctagaaaatggaggctagttgaaatatatacaatttcagcttgaatccaggcttcacatatcaggctctttttagacctgtgtcattttccaatttcaaagttatcagttgcccaagggtctttctgtgccatgcaaagatgtgccccagttatggtacttctcctttctttttcccagtgtgagcgccttgtgagtcttctcctgaacccagcggtgctgtccacggcgtccttgggcagctcacagggcagcgtcatccacttctcccatggggagtatttctatagcttgttctcagaaacgatcaacacggaattattgaaaaatctggatcttgctgtattggagctcatgcagtcttcagtggataataccaaaatggtaacaaagtttccctttaaataaactgttttttttgtttgtttgtttgtttgagacagagtcttgcactttcgcccaggctggagtgcagtggcacgatctctgctgactgcaacctctgcatcccagattgaagcgattctcctgcctcagcctcccgagtagctgggattacaggcacccgccaccacacctagctaattttttgtatttttagtagagacggagtttcactatgttggccaggctggtcttgaactcctgacctcgtgatccgcccagtttggcctcccgaagtgctgggattacaggcgtgagccactgcacccggtcaatattttcttatataatccttataaaagggttgccatattcctgaaatatttcattaaagtatgacaagactttttcctataaggttgaaagctcttgcttttaacaaactcagaaaaacccaaaacataccccttatcaatagttaatgaatattaggccaggcatggtggctcatgcctgtaatcccagcactttgggaggtggaggtgagcggatcatcagaggtcaggaattcaagcccagcctggcgaacatggcaaaaccttgtttctactaaaaatacaaaaaattagccaggcatggtggtgtgtgcctgtaatcccagctactcaggaggctgaggcaggagaatttcttgaacctgagaggcggaggttgcagtgagctgagatcatgcccactgcactccagcctgagtaatgaagcgagactctgtcttaaaaaagtaagaaatagctaatgagtgttattggatgttaaaacattgattgttttttctattcccttatgctttgcaaatttctaagcctaaatattataaggcacagctatgcagggtattgacatttgccaagatgtggctttggagcttacaaacccgtcctggggcccagagctggctttgcattcataccagctgcaggcaggtctctgcaccccggtagacctctctgttctcagagttctcttgtggcctcgatgctgagttatcatttctggcatgttcctgctgtgtccccctttctccctggagatcagtatttaatatatagttgactttcgtttgctaaacctctgggattttgaaatttaacttgttctgtggacagaaactgttaactgttgatatgaccattttaagggagagtacatgatttcctaagttgagcttttattgcaaacagtgcttttctgttgtaggggaatcttttgtggtagattgcagtaggaatttgtattctttaaaattagaaataaaatcgtagtagatgacactcagatttaacattctgatttcttaaactatgacctctgatggaaatgatagaaaaaacatacgcctttgacctctattccttccctaaattcctctaaagtaacagaatgagatttttaaaacacctctacaatctcaaaggacacagagaaaaggacttccaagagtgacaagagttgtaaatcaaaaggacaggtgtggcagactgcatgcagagtttgagatagcagcgaggtgatgcagccttcggaagttggggtccacacgtgctgagccccagcagggcagacatgcgagcaggggtgagcagaggctgagaagagaggattgggcaaaggccagctctcccctgcagggcagcctcctgtctctgctgctgggggtctgatcctccccacttgaggagaaggcaggaggcagtgactccctggagaggatagagacctccagactgggggctctggcatggctgaatatgtggataccatcaggaaaagaggaaagttaagtactaacctacctaaattctagactttcaggctgtctgccctttccctctgaatactttcagttcagcatctgcccttggcagggcaccagaatatcctgacaagccctaagagaaaataaagatgcaggcatcatagccagctgggtcagtgacagtgatcctccccaccagcgagccctgcacgctgcacagcgcttccaggcaggtgatacctgtgagccggcagcccaggggctcaggcacctgaggaaagggacgccagagggcgtagcgggacacaggcaactgtggcaaggcctgttcagtgagatggaaatgtaagctggagaaaaaaaactgaaagatgagagacaaaactgtgaaataagaattgctatggagaatgaacatcagagaacaaaaaaggctcttgggaattaagcataggcatcagaaattaaaaatgaaatgagtttggaaggtaaacttgagtaactctcacagagagtagagtgaaagacaaaacagaaaacacgagagaaaagaggaggagactagggattcatgcatgaggttgagcagcagggccttggctccggagggcaggggtcaggagtggcatttgctgaggacacagctccagaggagcccagaagcaaaggctttgagtttccaggtagaagagggccatggagtgtccagcatggtgcacagaaacagctccacgtggagcacatttcttgagaattcagaaccgtggggtttcactacaataaaagattctcaggtttccactggagaaaaagcagttatgtgtgaaaggatctagaaattgaatgacatatgtcttctcagcggcagtgtggacattgcaagacttgaaccagatttcttccatagttcataagagaaatcttcagcctagagttctgaatccagctggattatccattatgtgagagtggaatacagatgttttagacatgccagatccccaagaggtccctgtgcactctcatcacgatgctgctgggtagagagtgatcaggcagtgagccaagacaggggaaggtgctggatacagtatgtcggccccgcacagaggcgtggatggcccagcaccaggtccagcaccagcattgcagatcaagagctgagttgccacagaaatggggcagatagacctgataggcttagagggcttgcagcaatttcataacttgggagagtttgatgacgaattaatgacagacacattgaaaagagcaatgaaagcaaacaaggttagcttcagagagtacaaaatgtgcaaaaagggaaaagcattgtttctacttggaacatctgtgaaaaatgtttgcatagtcagaatgacaggaatagtgcatgttaatctgaccaaaattagcctgtcactctgttgcaggagtggtggtgagacagaaaatgtgggtgtgcatgtatgatggtagttgaacaagaagtgtgcgtttgcgtgtgtgcatgtttgcttgtgtgtgtacacctgtgtgtgctagtgtgtgcctgtatggtggtggtgggaccggaagtatgtgcttgggtgcatgtttgcttatgtgtgtacatctgtgtgcttgtgcatgcatgtacagtggtggtgggataggaagtgtgcatttgtgcatatgtgcatatttgtgtgcttgtgcgtgtacacctgtgtgtgcttgtgcatgcatgtacagtggtggtggtggtgacagaagagagctgactcctttttcctagactgcgcagactaggaaagccaggagaagctggatgagcctgatgacatagctaaggccaccctgtactttgtggaaaaactatggttaaagtgtacctcaaatcaaactcgaggagttttgaagtagataaacatctattatagaaatagcttatttattttccaagaatagctttgaaataaaggtaaattttgttttctgtcattctcaaaattaagaatttttcttcactcacaacgaaattgtctcaggtgagtgccgttttgaacggcatgttagaccagagcttcagggagcgagcaaaccagaaacaccaaggactgaaacttgcgactacaattctgcaacactggaagaagtgtgattcatggtgggccaaagattcccctctcgaaactaaaatggcagtgctggccttactggcaaaaattttacaggtattcaattcctttaaaaagcagtcatgtttattcttctgaactctgtaacttgtgtctttaaaatttgatggaggttgctccaaaagctcattggtttgacaaataagaaaatattttgacaggatggttgcttatatttacctttttaaactttttccattatttattagacttactatttcttatgctatatctttttaaagtacctttgcatgtattgtcctaacagatagtattacaatgttttacaataagattgtgaaaatattattgaagcccaaaattaaattaacaattcatttctggaatttaaacatttgagcaatgggctaaaggaaatagagatgtaatatacaaatgtgtcctgtttttcttttccttcctttagattgattcatctgtatcttttaatacaagtcatggttcattccctgaagtctttacaacatatattagtctacttgctgacacaaagctggatctacatttaaaggtaaacagtgaaatatttatttttttggattacattctcttctgttttcgtattttttatttgtgatgttttttattttttattatggaaaatttcaaacgtgttcaaatgtagggagactagcacagtaatcccccgtacttattagccagtctcgataaccatcctgtgtgggtgtgtttgtttcacctgtgcggtcaacccacccgtcagcaggcaaggaaggccaagcaggccgggtgtgttatctgacctgtatctgcttcagttcagtgtgcctctccaagacatgagaacatttctttctttcttgcttgcttgcttgctttcttgctttcttgctttcttgctttcttttttttttttttttttagacagtctcgctctgtcacccaggctgaagtacagtggcacaatcatggctcactgcaacctccgcctcttgggttcaagtgattcttgtgcctcagcctcccaagtagctgggatcacaggtgtgcgccaccaggcctggctaatgtttttatttttagtatatttcaccatagtggccaggctggtctcaaactcctgacttcaagtgatctgcctgcctcggcctcccaaagtgctggggttacaggtgtgagccaccacacccggcctagaacatttcttttaaagtataagattatcatatttggatgaattaacatttgtgtttgcatacatattatttaaattggctttttgtgctataatgactttattactcagtcatttttctattaaaataatataaaaatttttggtgatttttagggtcaagaattaataaatactgtcattttaagggttactaattttaaagtcctagaacaattagattttaaaccctactgaaaagtggccttaattcaagggacctttttactggataaaggggataattctttggaattttctgctgtgtgattaatcaagtttcccatttctccatagacagtcttggaattttctgccatgcgagggagaacaggagtcaactcctagttcttgttaagctcagtatgaagttcttctgtagttctgcaatgtgtagttgtaaactcctccttaggttattcaaaatgttctttctacacaaagctt

SEQ ID NO: 1951 - DNA, 1071 bp, Homo Sapiens
agcggcggcgaaggaggggaagaagagccgcgaccgagagaggccgccgagcgtccccgccctcagagagcagcctcccgagacagagcctcagcctgcctggaagatgccgagatcgtgctgcagccgctcgggggccctgttgctggccttgctgcttcaggcctccatggaagtgcgtggctggtgcctggagagcagccagtgtcaggacctcaccacggaaagcaacctgctggagtgcatccgggcctgcaagcccgacctctcggccgagactcccatgttcccgggaaatggcgacgagcagcctctgaccgagaacccccggaagtacgtcatgggccacttccgctgggaccgattcggccgccgcaacagcagcagcagcggcagcagcggcgcagggcagaagcgcgaggacgtctcagcgggcgaagactgcggcccgctgcctgagggcggccccgagccccgcagcgatggtgccaagccgggcccgcgcgagggcaagcgctcctactccatggagcacttccgctggggcaagccggtgggcaagaagcggcgcccagtgaaggtgtaccctaacggcgccgaggacgagtcggccgaggccttccccctggagttcaagagggagctgactggccagcgactccgggagggagatggccccgacggccctgccgatgacggcgcaggggcccaggccgacctggagcacagcctgctggtggcggccgagaagaaggacgagggcccctacaggatggagcacttccgctggggcagcccgcccaaggacaagcgctacggcggtttcatgacctccgagaagagccagacgcccctggtgacgctgttcaaaaacgccatcatcaagaacgcctacaagaagggcgagtgagggcacagcgggccccagggctaccctcccccaggaggtcgaccccaaagccccttgctctcccctgccctgctgccgcctcccagcctggggggtcgtggcagataatcagcctcttaaagctgcctgtagttaggaaataaaacctttcaaatttcaca

SEQ ID NO: 1952 - DNA, 2040 bp, Homo Sapiens
cacgaggagaacagaagaagagaaagctcagcaaattttcttgccatacttcatgacttcactgtggctaagtgtggggaccagacaggactcgtggagacatccaggtgctgaagccttcagctactgtctcagttttttgaagtttagcaatggcgtctttctctgctgagaccaattcaactgacctactctcacagccatggaatgagcccccagtaattctctccatggtcattctcagccttacttttttactgggattgccaggcaatgggctggtgctgtgggtggctggcctgaagatgcagcggacagtgaacacaatttggttcctccacctcaccttggcggacctcctctgctgcctctccttgcccttctcgctggctcacttggctctccagggacagtggccctacggcaggttcctatgcaagctcatcccctccatcattgtcctcaacatgtttgccagtgtcttcctgcttactgccattagcctggatcgctgtcttgtggtattcaagccaatctggtgtcagaatcatcgcaatgtagggatggcctgctctatctgtggatgtatctgggtggtggcttgtgtgatgtgcattcctgtgttcgtgtaccgggaaatcttcactacagacaaccataatagatgtggctacaaatttggtctctccagctcattagattatccagacttttatggagatccactagaaaacaggtctcttgaaaacattgttcagccgcctggagaaatgaatgataggttagatccttcctctttccaaacaaatgatcatccttggacagtccccactgtcttccaacctcaaacatttcaaagaccttctgcagattcactccctaggggttctgctaggttaacaagtcaaaatctgtattctaatgtatttaaacctgctgatgtggtctcacctaaaatccccagtgggtttcctattgaagatcacgaaaccagcccactggataactctgatgcttttctctctactcatttaaagctgttccctagcgcttctagcaattccttctacgagtctgagctaccacaaggtttccaggattattacaatttaggccaattcacagatgacgatcaagtgccaacacccctcgtggcaataacgatcactaggctagtggtgggtttcctgctgccctctgttatcatgatagcctgttacagcttcattgtcttccgaatgcaaaggggccgcttcgccaagtctcagagcaaaacctttcgagtggccgtggtggtggtggctgtctttcttgtctgctggactccataccacatttttggagtcctgtcattgcttactgacccagaaactcccttggggaaaactctgatgtcctgggatcatgtatgcattgctctagcatctgccaatagttgctttaatcccttcctttatgccctcttggggaaagattttaggaagaaagcaaggcagtccattcagggaattctggaggcagccttcagtgaggagctcacacgttccacccactgtccctcaaacaatgtcatttcagaaagaaatagtacaactgtgtgaaaatgtggagcagccaacaagcaggggctcttaggcaatcacatagtgaaagtttataagaggatgaagtgatatggtgagcagcggacttcaaaaactgtcaaagaatcaatccagcggttctcaaacggtacacagactattgacatcagcatcacctagaaacttgttagaaatgcaaattctcaagccgcatcccagacttgctgaatcggaatctctgggggttgggacccagcaagggcacttaacaaacccccgtttctgattaatgctaaatgtaagaatcattgtaaacattagttctatttctatcccaaactaagctatgtgaaataagagaagctactttgtttttaaatgatgttgaatatttgtcgatatttccatcattaaatttttccttagcattgtctaagtcaaaaaaaaaaaaaaaaaa

SEQ ID NO: 1953 - DNA, 1115 bp, Homo Sapiens
tttttgtatttttagtagatgacggggtttcacacgtgttagccaggatggtctcgatctcctgacctcctgatcctgcccgcctcgtgcctcccaaatgtgctgggattacaggctgtgagccacctgtgcccggcctggtactcctgaagccctcagatctggtgacctggtgcgctgtaggcaccgatgaaaatacaggcacctgagccatgaagcatgtgcctgcaaccaatgagacctcggctcggcgaaattggctggtgtctggagcctgcgatgtgactgccatgctgtgtgtgggctgtcaaggagaacattcgttacggcgcaaccaacggtactgtcaccaagaaaccgtcgtctctgagaaaaaaagagacgttcggccgccgagaaactcctgtacaatgtgctgtgacagaaaaaccgccggctccgcgcagcggcaaaagagccaacgggaacgccgggtgctgcgaccatgaacccggcactggcaggacgtgggatggagaatgggacacacggagcgagcacagggcacaccgttcgtgcagaccaactagcgccgcgacacggaaaactgacctcgccagtgctgccaatgaagtgcgtgtgccaaaccgatgactggtgcgcaggagcagacgctgggcgctggaccagcgcagtgtgagaatctggcggcgccaaggaccacttcagacgcggcccacgacggcgcaaaccaagacgaggaggccaagcacactgcgcgtacaatgggcgccaacagcggggcagcagggaccaaaccccagggacctgacaacacacaggaaggcaagacaaaagacaccggaccagagacagacggagaaccgagcaccgggaccctcagtggcacgtgcgtacacaattggctattggtacataacaactccaacttaccaacaactacaacgctaccagctgtctgctcactactcctgaataccacgaaagtctggcccacgtcgccacacacctcacgctctgaagccgccaaaaacatcgccaacaactcacacccggtaacaacgacacacgaaccgaactcacgacaacacagacgagccatacacaccccccat

SEQ ID NO: 1954 - DNA, 583 bp, Homo Sapiens
actaggatcaactggaagtcaagaatcaacagaacattaaagaagagagagagaggatgagagcaaacctagaagagctccgaagccaacacaacgaaaaggtggaggagaactccacatgcagcaacgactggaagaaagtgaaggggagctccggaaggaatctggaggagctataccaggtgaagatggaacgggagcagcatcagactgagatcagggatctccaggaccagctctcagaaatgcacgatgaactggacagtgcaaagcgatcggaggacagggagaagggagctctgattgaggagctcttacaggcaaaacaggatcttcaagatctgctgattgccaaagaggagcaaagaagacctcttgagaaagcgagagcgtgaactcaccgccctgaagtgagccctgaaagaagaggttcccagccatgatcaggagatggacaagctgaaggagcaatatgatgctgagttgcaggcccctgaggaagagtgtggaagaagcaaccaagaatgtcgaggtcttgcgagagcaggagcaacacttcagagcacgaccaggcgggactgaa

SEQ ID NO: 1955 - DNA, 737 bp, Homo Sapiens
tcgctaggtagagcatgggtttacacagccagagctggaggttggtccctgtgcctggagtgtgcctgcggaccaatggctctgccctgcaccttagggctcgggatgctgctggccctgccaggtgccttgtggctcgggtgggcagcgcggaggacagcgtgggctccagctctgtcacctgttgtcctgctgctgctgctgctcctactgctggccactggcctagcactggcctggcgccgcctcagccgtgactcatgggtgtgctactaccacccggcccgcctaggtgccgctgctgtgtgtggcctgcacgcggcgcctgctctgggccagccccccaggtcgctggctgcaggcccgagctgagctggggtccacagacaatgaccttgagcgacaggaggatgagcaggacacagactatgaccacgtcgcggatggtggcctgcaggctgaccctggggaaggcgagcagcaatgtggagaggcgtccagcccagagcaggtccccgtgcgggctgaggaagccagagacagtgacacggagggcgactggtcctcggctccccaggaccagcgagcgcagggggcagtgctgaggccctgctgagtgacctgcacgcctttgctggcagcgcagcctgggatgacagcgccagggcagctgggggccagggcctccatgtcaccgcactgtagaggccggtcttggtgtcccatccctgtcacag

SEQ ID NO: 1956 - DNA, 4490 bp, Homo Sapiens
aagatggctgaggaatcctcctcctcctcctcctcatcttcaccaactgctgcaacatctcagcagcagcaacttaaaaataagagtatattaatctcttctgtggcttcggtgcatcatgcaaacggcctagccaaatcttctaccaccgtctctagctttgctaacagcaaacctggctctgctaagaagttagtgatcaagaactttaaagataagcctaaattaccagaaaactacacagatgaaacctggcaaaaactgaaagaagcagtggaagctattcagaatagtacttcaattaagtacaatttagaagaactctaccaggctgtagaaaatctctgttcttacaagatttctgcaaacttgtacaaacagctgagacagatctgcgaagatcacatcaaagcacagattcatcaattcagagaggattcattggatagcgttctttttttaaagaagattgatagatgctggcaaaaccattgcagacaaatgatcatgatcaggagcatttttttgtttctggatagaacttacgttcttcagaattcaatgctaccctccatttgggacatgggactggagttatttagggctcatattataagtgatcagaaagtgcagaataagacaattgatggcattcttctcttgattgagagggaaaggaatggtgaagcaattgatagaagtttacttcgaagccttttaagcatgctgtctgatttgcaaatttatcaagattcttttgaacaacgatttttggaagaaactaaccggctctatgcagctgaaggccaaaaattaatgcaagaaagagaggttcctgaatatctacatcatgttaacaaacgtctagaagaagaagcagacagacttattacttacttagatcagaccacccagaagtcattaattgctactgtagaaaaacaacttctaggtgaacacttaacagcaattcttcagaaaggtttaaataacctccttgatgaaaaccgaattcaagatttgtctcttctgtatcagctcttcagtagagttcgaggtggagttcaggttcttttgcagcagtggatcgaatatatcaaggcatttggcagcactattgtaattaatcctgaaaaagataaaaccatggttcaagaattgctggattttaaagataaggttgaccatataattgatatctgctttctgaagaatgagaaatttatcaatgccatgaaagaagcatttgaaacgttcattaacaaaagaccaaataaaccagctgaacttatagctaagtatgtagattcaaaacttcgtgcaggcaacaaagaagctacagatgaagaacttgagaaaatgttggataaaattatgatcatatttagatttatctatggcaaggatgtttttgaggccttctataagaaagatttagccaagcgcctgttagtcggaaagagtgcatctgtagatgctgaaaaatcaatgctgtccaaacttaaacatgaatgcggagctgctttcaccagcaaacttgaaggaatgtttaaagacatggaactttctaaagacatcatgattcagttcaaacagtatatgcagaatcagaatgttccgggaaatattgagttaactgtgaatatcctgacaatgggctattggccgacatatgtgcctatggaagttcatttaccaccagagatggtaaaacttcaggagattttcaagacattttacctaggcaaacatagtggcaggaaacttcagtggcagtcaaccctaggacactgtgtgttaaaagcagaatttaaagagggtaaaaaggaactccaggtctctctttttcaaacactggtgctgctaatgtttaatgagggagaggagttcagtttagaagagatcaagcaggcaactggaatagaggatggagagttaaggagaacactgcagtcattagcctgtggcaaagctagagttctggcgaaaaatccaaagggcaaagacattgaagatggtgacaagttcatttgtaatgatgatttcaaacataaacttttcaggataaagatcaatcaaatccagatgaaagaaacggttgaagaacaagcaagcactacagaaagagtatttcaagacagacagtatcaaattgatgctgcaattgttcgaattatgaagatgagaaagacacttagccacaatctccttgtttcagaagtgtacaaccagttgaaatttccagtaaagcctgctgatcttaagaagagaatagaatctttaattgaccgggactacatggaaagagataaagaaaatccaaaccagtacaactatattgcatagaatgttggccttgcagcatttggtgtcatatgcagtagccagtggataaactaacctgttgattcaatattatttgactccttttttactaccgatgaccaaatgaagcagtgtaattaatggaaatagttgagtggactttttctcagtggttaacatgcccattttaaagagtaatacttacctttaagaagaatgttgttgaactctttgcatgttatttagtatgatgtgcagaaaacacttaagaacgtacctggtcttcatgaattcctctttggaactgggaaagagatccctgtggctattaaaaaggggggagggttcttacacaccattaattatgaagcaaaaggtttatttgcttaaaatgtcatttaaagatacttaaactgcatgcaaactttatttactgtacagagttctggatgtatttatcaaatagaaaaaccacccttgacttggttgttcacccgttttgtgatttcccttgaaaagagaaatgaattgtcatagctattgatattttactaggtgatgttctgttacactgaaagggatgttttttaaaaaaaaaattatttggaaacaagttttcaagtagggggacagttgcttacataatatcttgtatattcacatcctaaaaattttcatttatgagtatgggatgtgtgtatatggcttagccccaagttaactgtgctgattaacaagtacttataaaaatagctaaagtagaaaattaatgatcagttgtactagaggaacatcatagaagagaaaaatccaactctttatattaaaaatgaatacaataagaaaattgcaaaagagaccaaaatgaacgtgttttgtaaattgttacaggagcaaaaactttgcaactagttttcaacatactttagactttaaatgttgtttggacagttttgtcttcaacttggaccaattgtagattgttacaggcttcctaggatttagcattcctattttctctaccaaagttttttttagaagcatcccaactcttctctttgttgataaataagcctttcctgtcatcttcattttaacttgctaaaaccctagatacaaaggtcctccctcatttttcccacagagcccctgtttgggaatttgagattctgtgtcatgctggttttcctttcagaattgcttgaaatcgagttctcttagccactggacacctagttttcaggagaatgtcccaagattgtttatatatacaaaatggcaaaagtactgtttttcgaattgataattcaagcaaaggcttctctttactgtcactgatttttttttgtttttattttgtttccttgtttctatttccttgaagctttgaagggaggagaagcagaaaattttgtttatgtttgttaaaaatcagaactacttaatgctttttgccacagcatatttccttgcctgttggagccgttaggaagattacctatgtcctaatcttcaacctgagaagatttttgactcttgtgtctactgttgattgtttgcttgagttctcaaagacctgtggccaggtattttaaaaagtcgtctatttctttctagttgcatcaacttgcacactggtgtctaactatatgtggtattcggaacttgtaattcttattgagcagccattgcctatattttctcagctcctcactgatttctttatatgagctcagctgacaagcaaatgcagctattttgtttaccctctcttcataccggaccatcaacaacagtgttctaactcatccctgatggtctgtgagatgtagactattacacaagattcaagttactcgtaagcaacttttagatagagttggtcctgttaggaggagactcttgatgtcaccttcagtatcttgaaagcgggtcccctccccgaggctcttaattctttgaaaacttgatgctgtttcagctgaaaaattagcaagactgttaaaaaaaaaaagttgaggggagctgtttaagaaactgaaaagtaattgcaaactacattggataattgtgactttcagttgttgttctgtatcagttgaatttttgtgctcttttccctgtgtacgtggtggttctatttttctccaataaaacttttattt

SEQ ID NO: 1957 - DNA, 2093 bp, Homo Sapiens
ccactacgtggccactcccgtctgctgtgacgcgcggacagagagctaccggtggacccacggtgcctccctccctgggatctacacagaccatggccttgccaacggctcgacccctgttggggtcctgtgggacccccgccctcggcagcctcctgttcctgctcttcagcctcggatgggtgcagccctcgaggaccctggctggagagacagggcaggaggctgcacccctggacggagtcctggccaacccacctaacatttccagcctctcccctcgccaactccttggcttcccgtgtgcggaggtgtccggcctgagcacggagcgtgtccgggagctggctgtggccttggcacagaagaatgtcaagctctcaacagagcagctgcgctgtctggctcaccggctctctgagccccccgaggacctggacgccctcccattggacctgctgctattcctcaacccagatgcgttctcggggccccaggcctgcacccgtttcttctcccgcatcacgaaggccaatgtggacctgctcccgaggggggctcccgagcgacagcggctgctgcctgcggctctggcctgctggggtgtgcgggggtctctgctgagcgaggctgatgtgcgggctctgggaggcctggcttgcgacctgcctgggcgctttgtggccgagtcggccgaagtgctgctaccccggctggtgagctgcccgggacccctggaccaggaccagcaggaggcagccagggcggctctgcagggcgggggacccccctacggccccccgtcgacatggtctgtctccacgatggacgctctgcggggcctgctgcccgtgctgggccagcccatcatccgcagcatcccgcagggcatcgtggccgcgtggcggcaacgctcctctcgggacccatcctggcggcagcctgaacggaccatcctccggccgcggttccggcgggaagtggagaagacagcctgtccttcaggcaagaaggcccgcgagatagacgagagcctcatcttctacaagaagtgggagctggaagcctgcgtggatgcggccctgctggccacccagatggaccgcgtgaacgccatccccttcacctacgagcagctggacgtcctaaagcataaactggatgagctctacccacaaggttaccccgagtctgtgatccagcacctgggctacctcttcctcaagatgagccctgaggacattcgcaagtggaatgtgacgtccctggagaccctgaaggctttgcttgaagtcaacaaagggcacgaaatgagtcctcaggtggccaccctgatcgaccgctttgtgaagggaaggggccagctagacaaagacaccctagacaccctgaccgccttctaccctgggtacctgtgctccctcagccccgaggagctgagctccgtgccccccagcagcatctgggcggtcaggccccaggacctggacacgtgtgacccaaggcagctggacgtcctctatcccaaggcccgccttgctttccagaacatgaacgggtccgaatacttcgtgaagatccagtccttcctgggtggggcccccacggaggatttgaaggcgctcagtcagcagaatgtgagcatggacttggccacgttcatgaagctgcggacggatgcggtgctgccgttgactgtggctgaggtgcagaaacttctgggaccccacgtggagggcctgaaggcggaggagcggcaccgcccggtgcgggactggatcctacggcagcggcaggacgacctggacacgctggggctggggctacagggcggcatccccaacggctacctggtcctagacctcagcgtgcaagaggccctctcggggacgccctgcctcctaggacctggacctgttctcaccgtcctggcactgctcctagcctccaccctggcctgagggccccactcccttgctggccccagccctgctggggatccccgcctggccaggagcaggcacgggtgatccccgttccaccccaagagaactcgcgctcagtaaacgggaacatgccccctgcagacacgt

SEQ ID NO: 1958 - DNA, 3239 bp, Homo Sapiens
gggcggccgcaccgggcagcaaccccactcccactcggaggccccctgccctctcccccacttccccccggcccatggtgcgaggctgggagccgccgcccgggctggactgcgctatctctgaagggcacaaatcagaaggcaccatgcctcctaataaagaggccagcggtctcagtagttcaccagcggggctcatctgcctccctccaatctctgaggagctacagcttgtgtggacgcaagcagcccagaccagtgagctagacagcaatgaacacctgctcaaaaccttcagctactttccctatcccagcctagcagacattgcccttctctgcctacgttatgggttgcagatggagaaagtcaagacttggtttatggcccagcgcctccgctgtggtattagctggtcatctgaagaaatagaagagactcgagcccgagtagtctaccgtcgggaccaactccatttcaaatcccttctctcttttactcatcatgcgggacggcccccagaggaggtgcctcctcctccagtgccagctccagagcaagttggtattggaataggtcctccaactcttagcaagcctacccagacgaaaggattgaaggtagagcctgaggagccctctcagatgccaccactgccacagagtcaccagaaattaaaggagtccctgatgacacctggcagtggagcattcccctaccaatcagatttttggcaacatcttcaaagcagtggcctctcaaaggagcaggcaggcaggggtcccaaccagtcacatggcataggtactgcttcctggaaccactccacaaccgtcccccagccacaagctcgggataaacccccaccaattgcattaattgccagtagttgtaaggaggagtcagcatctagtgttactccctcttcttcctctacctcttcttctttccaggtactggctaatggagctactgccgcctctaaacccctccagccactaggctgtgtcccacagtcagtgtcacccagtgaacaggcattacccccacatctggaaccagcctggccccaagggctacggcataactcagtaccaggtagagttggccccacagagtacctttccccagatatgcaacgccagcgaaagaccaagcgcaaaaccaaagagcagctggctatccttaaatccttttttttacagtgccagtgggcacggcgtgaggattaccaaaagttagaacagatcactggtttacctcggcctgagatcattcagtggtttggtgacacacgctatgccttgaagcatgggcaactaaagtggtttcgggacaacgcagtacctggtgcccctagtttccaagacccagcaattcctacaccaccaccatcaacccgctccttgaacgaaagggctgagacaccacctctgccgatccctccacccccaccggatatacaacccttggagaggtactgggcagcccaccaacagctacgggaaactgatatccctcaattgagtcaggcatcaaggcttagcacccagcaggtgctggattggtttgactctcgattacctcagccagctgaggtggtagtttgtctagatgaagaagaggaagaggaggaggaagaactgccagaagatgatgaggaagaggaggaggaggaggaagatgatgatgatgatgatgatgatgtgatcatacaagactgagtggggagctgggggaggggaggtctgttactgaaagatgaaccaacttagtaactgtttaaacaaagaaaccacatttttaaaattaccttgtggcagagaactaaaaagctttgtgttcttcagggtgggtggcagggggatatagtgagggtggaccagggagaatgaccatagggcactaagtaaggctgggattggatcagcagaaatccaaccctctaaccttagggtagggagtgctaaggatctggggaaaccatgggctgggaagctgctcttgctctcctcgtgtctgctgtttttttcccttggtgtactatacagaggccagatgttggcaccacctctccaggaggattggaaaggaggagtaaaggattctgatttgattgatgattccagtgcatccccaatcccaccatcttacctggaatataaggctgccttgtaccccttttctgagcacaagtctgtgcgtaatgcaactgactctcttacttttttcttagtaactgatcatttcctagacaaccaagattctcaataagtcccagtctcatcacaaatattaatatttccttttcctcataccaacttgactatgtttcacccgcttcatgactaaatcacaggtggcagaatttttcagttcttttttttttttttgaggtggagtcttgctctgtcgcccaggctgtagtgcaatggcgcaatctcagctcactgcaagctccgcctcccaggttcatgccattctcctgcctcagcctcccgagtagctgggactacaggcacctgccaccacacccggctacttttttatatttttagtagagacgggtttcatcatgttagccaggatggtcttgatctcctgacctcatgatccgcccaccttggcctcccaaagtgctgggattataggcatgagccaccgtgcccggctattttcagttcttatgctgtgaccactttgccttgtagctttttctatctttccaaaatcctcactctgttcattgtttgtctcagggaaaatcttcccccaccgagcttgtaaaaaactttaataattgggtggagaataatttagaatggatatttattggaggtggtaattagggaagatgtccttttaaacagtagaattgtgttacaaaggggtgaaagagagggaatagtttctccttgttgaagggcagtgaaggtaggtttcaggtttggttttacaaacctgttaactacctcctgtccagcttgacagagactaatttttcatctttttgctgtcaatttgtttccagaaaagagacttttccctctcttgataggatctgtcttagggacagagggaccatcgtctttaagtgaattaattattgatgttttagaatggttttcatcagttgggatcagctatatggcaaataggtatcatcaatgagttaaccatctaaaaataaaagagtggaagccctaaaatgctagaataataataaaaaggccaaaaat

SEQ ID NO: 1959 - DNA, 4792 bp, Homo Sapiens
ggaccacccagtaccgatcccttcacgaccgtcaccatggaagtgtcaccattgcagcctgtaaatgaaaatatgcaagtcaacaaaataaagaaaaatgaagatgctaagaaaagactgtctgttgaaagaatctatcaaaagaaaacacaattggaacatattttgctccgcccagacacctacattggttctgtggaattagtgacccagcaaatgtgggtttacgatgaagatgttggcattaactatagggaagtcacttttgttcctggtttgtacaaaatctttgatgagattctagttaatgctgcggacaacaaacaaagggacccaaaaatgtcttgtattagagtcacaattgatccggaaaacaatttaattagtatatggaataatggaaaaggtattcctgttgttgaacacaaagttgaaaagatgtatgtcccagctctcatatttggacagctcctaacttctagtaactatgatgatgatgaaaagaaagtgacaggtggtcgaaatggctatggagccaaattgtgtaacatattcagtaccaaatttactgtggaaacagccagtagagaatacaagaaaatgttcaaacagacatggatggataatatgggaagagctggtgagatggaactcaagcccttcaatggagaagattatacatgtatcacctttcagcctgatttgtctaagtttaaaatgcaaagcctggacaaagatattgttgcactaatggtcagaagagcatatgatattgctggatccaccaaagatgtcaaagtctttcttaatggaaataaactgccagtaaaaggatttcgtagttatgtggacatgtatttgaaggacaagttggatgaaactggtaactccttgaaagtaatacatgaacaagtaaaccacaggtgggaagtgtgtttaactatgagtgaaaaaggctttcagcaaattagctttgtcaacagcattgctacatccaagggtggcagacatgttgattatgtagctgatcagattgtgactaaacttgttgatgttgtgaagaagaagaacaagggtggtgttgcagtaaaagcacatcaggtgaaaaatcacatgtggatttttgtaaatgccttaattgaaaacccaacctttgactctcagacaaaagaaaacatgactttacaacccaagagctttggatcaacatgccaattgagtgaaaaatttatcaaagctgccattggctgtggtattgtagaaagcatactaaactgggtgaagtttaaggcccaagtccagttaaacaagaagtgttcagctgtaaaacataatagaatcaagggaattcccaaactcgatgatgccaatgatgcagggggccgaaactccactgagtgtacgcttatcctgactgagggagattcagccaaaactttggctgtttcaggccttggtgtggttgggagagacaaatatggggttttccctcttagaggaaaaatactcaatgttcgagaagcttctcataagcagatcatggaaaatgctgagattaacaatatcatcaagattgtgggtcttcagtacaagaaaaactatgaagatgaagattcattgaagacgcttcgttatgggaagataatgattatgacagatcaggaccaagatggttcccacatcaaaggcttgctgattaattttatccatcacaactggccctctcttctgcgacatcgttttctggaggaatttatcactcccattgtaaaggtatctaaaaacaagcaagaaatggcattttacagccttcctgaatttgaagagtggaagagttctactccaaatcataaaaaatggaaagtcaaatattacaaaggtttgggcaccagcacatcaaaggaagctaaagaatactttgcagatatgaaaagacatcgtatccagttcaaatattctggtcctgaagatgatgctgctatcagcctggcctttagcaaaaaacagatagatgatcgaaaggaatggttaactaatttcatggaggatagaagacaacgaaagttacttgggcttcctgaggattacttgtatggacaaactaccacatatctgacatataatgacttcatcaacaaggaacttatcttgttctcaaattctgataacgagagatctatcccttctatggtggatggtttgaaaccaggtcagagaaaggttttgtttacttgcttcaaacggaatgacaagcgagaagtaaaggttgcccaattagctggatcagtggctgaaatgtcttcttatcatcatggtgagatgtcactaatgatgaccattatcaatttggctcagaattttgtgggtagcaataatctaaacctcttgcagcccattggtcagtttggtaccaggctacatggtggcaaggattctgctagtccacgatacatctttacaatgctcagctctttggctcgattgttatttccaccaaaagatgatcacacgttgaagtttttatatgatgacaaccagcgtgttgagcctgaatggtacattcctattattcccatggtgctgataaatggtgctgaaggaatcggtactgggtggtcctgcaaaatccccaactttgatgtgcgtgaaattgtaaataacatcaggcgtttgatggatggagaagaacctttgccaatgcttccaagttacaagaacttcaagggtactattgaagaactggctccaaatcaatatgtgattagtggtgaagtagctattcttaattctacaaccattgaaatctcagagcttcccgtcagaacatggacccagacatacaaagaacaagttctagaacccatgttgaatggcaccgagaagacacctcctctcataacagactatagggaataccatacagataccactgtgaaatttgttgtgaagatgactgaagaaaaactggcagaggcagagagagttggactacacaaagtcttcaaactccaaactagtctcacatgcaactctatggtgctttttgaccacgtaggctgtttaaagaaatatgacacggtgttggatattctaagagacttttttgaactcagacttaaatattatggattaagaaaagaatggctcctaggaatgcttggtgctgaatctgctaaactgaataatcaggctcgctttatcttagagaaaatagatggcaaaataatcattgaaaataagcctaagaaagaattaattaaagttctgattcagaggggatatgattcggatcctgtgaaggcctggaaagaagcccagcaaaaggttccagatgaagaagaaaatgaagagagtgacaacgaaaaggaaactgaaaagagtgactccgtaacagattctggaccaaccttcaactatcttcttgatatgcccctttggtatttaaccaaggaaaagaaagatgaactctgcaggctaagaaatgaaaaagaacaagagctggacacattaaaaagaaagagtccatcagatttgtggaaagaagacttggctacatttattgaagaattggaggctgttgaagccaaggaaaaacaagatgaacaagtcggacttcctgggaaaggggggaaggccaaggggaaaaaaacacaaatggctgaagttttgccttctccgcgtggtcaaagagtcattccacgaataaccatagaaatgaaagcagaggcagaaaagaaaaataaaaagaaaattaagaatgaaaatactgaaggaagccctcaagaagatggtgtggaactagaaggcctaaaacaaagattagaaaagaaacagaaaagagaaccaggtacaaagacaaagaaacaaactacattggcatttaagccaatcaaaaaaggaaagaagagaaatccctggcctgattcagaatcagataggagcagtgacgaaagtaattttgatgtccctccacgagaaacagagccacggagagcagcaacaaaaacaaaattcacaatggatttggattcagatgaagatttctcagattttgatgaaaaaactgatgatgaagattttgtcccatcagatgctagtccacctaagaccaaaacttccccaaaacttagtaacaaagaactgaaaccacagaaaagtgtcgtgtcagaccttgaagctgatgatgttaagggcagtgtaccactgtcttcaagccctcctgctacacatttcccagatgaaactgaaattacaaacccagttcctaaaaagaatgtgacagtgaagaagacagcagcaaaaagtcagtcttccacctccactaccggtgccaaaaaaagggctgccccaaaaggaactaaaagggatccagctttgaattctggtgtctctcaaaagcctgatcctgccaaaaccaagaatcgccgcaaaaggaagccatccacttctgatgattctgactctaattttgagaaaattgtttcgaaagcagtcacaagcaagaaatccaagggggagagtgatgacttccatatggactttgactcagctgtggctcctcgggcaaaatctgtacgggcaaagaaacctataaagtacctggaagagtcagatgaagatgatctgttttaaaatgtgaggcgattattttaagtaattatcttaccaagcccaagactggttttaaagttacctgaagctcttaacttcctcccctctgaatttagtttggggaaggtgtttttagtacaagacatcaaagtgaagtaaagcccaagtgttctttagcttt

SEQ ID NO: 1960 - DNA, 2132 bp, Homo Sapiens
ataggccagtgccggggtttaagggccaggaaaggaagcattcagggaatttaggtgtagccagaagaaaatcaggtcctggctccccagaagcaagagagttcaagtgaaggaaggaggaggttcctggatgtggatgtcatcatttctgggaacactcttaaatggagactcagatttcttagccaaaatttagggaggatccagaagaaaccaaagacgaagcatcccagttcttgggtatttcctgaaacagaagaaaatgacaaaggcccaggaatcactgaccctggaggatgtggctgtggacttcacctgggaggagtggcagttcctgagccctgctcagaaggacctgtaccgggatgtgatgttggagaactacagcaaccttgtgtcagtggggtatcaagccggcaaacctgatgccctcaccaagttggaacaaggagaaccactatggacactagaagatgaaatccacagtccagcccacccagaaattgagaaagctgatgatcatctgcagcagcccttgcaaaaccaaaaaatactgaagaggacgggacaacgctatgaacacggaagaactttgaaatcatatttaggtttaaccaaccagagcagaagatacaacagaaaggagcctgctgagtttaatggagatggagcttttctccatgataatcatgaacaaatgcctacggaaattgaattccctgaaagtagaaaacccatcagcaccaagtcacaattccttaaacatcagcaaacacacaacatagagaaagcccatgaatgcactgactgtgggaaagctttcctcaagaagtctcagctcactgagcataagagaattcatacaggaaagaaaccccacgtgtgtagcttgtgtgggaaagccttctacaagaagtacaggctcactgaacacgagagagctcacagaggagagaaaccccacgggtgtagcttgtgtgggaaagccttctacaagaggtacaggctcactgaacacgagagagctcacaaaggagaaaaccatacgggtgcagtgaatgtgggaaagccttccccaggaaatctgagcttactgaacatcaaaggattcacacgggaattaagccccatcaatgcagcgaatgtgggagagctttctccagaaaatcactactcgttgtacatcagcgaactcatacaggagagaagcctcatacatgcagtgaatgtggaaaaggcttcattcagaagggcaatctcaacatacatcaacgaactcacactggagagaaaccttatggatgcattgactgtggcaaggccttcagccagaagtcttgccttgtagcacatcagagatatcatacaggaaagactccctttgtatgtcctgaatgtgggcaaccctgttcacagaagtcaggactcattagacatcagaaaattcactcaggagagaaaccctataaatgcagtgactgtgggaaagccttccttacaaagacaatgctcattgtacatcacagaactcacacgggagagagaccctatggctgtgatgagtgtgagaaagcttacttctatatgtcttgccttgttaaacataagagaatacactcaagggagaaacggggggattcagtgaaggtggaaaatccttccacagcaagtcacagcttaagtcctagtgaacatgtgcaggggaaaagccctgttaatatggtaactgtggcaatggtggcagggcagtgtgagtttgcccacatcctgcattcatgataaacagtttgctgtttgatcatatagcctccagcggaatgctgagtttgtcatgtcccatgggcctttggctccctgcactaatatgtatagtagggtttacaagatatgaaatatattttacttttttatatcttataaacctcactacccctcccacaatattgtttttcatttactatcttgatcatagagtttggctggggaggggggcagttttagaggcttccacttggtgttcctcagaatgatatctcttactccgggggccaaggtaggggttagcttttgttctctttgtagtttagattgtatctcttgccttgttcaagttcacaaatctttttgtgtat

SEQ ID NO: 1961 - DNA, 768 bp, Homo Sapiens
atgtccatggaggaccccttctttgtggtgaaaggagaggtacagaaagcagtcaacactgcccagggattgtttcagagatggacagagctcctccaggacccctccacagcaacaagggaagaaatcgactggaccaccaacgagctgagaaataacctccggagcatagagtgggatctagaggaccttgatgaaaccatcagcatagttgaagcaaatcctagaaaatttaaccttgatgcaactgaattgagtataagaaaagccttcattacaagtactcggcaagttgtcagggacatgaaagatcagatgtcaacttcatctgtgcaggcattagctgaaagaaaaaatagacaggcactgctgggagacagtggcagccagaactggagcactggaacaacagataaatatgggcgtctggaccgagagctccagagagccaattctcatttcattgaggagcagcaggcacagcagcagttgatcgtggaacagcaggatgagcagttggagctggtctctggcagcatcggggtgctgaagaacatgtcccagcgcatcggaggggagctggaggaacaggcagttatgttggaagatttctctcacgaattggagagcactcagtcccggctggacaatgtgatgaagaaacttgcaaaagtatctcatatgaccagtgatcggcgccaatggtgtgccatagccatcctctttgcagtcctgttggttgtgctcatcctcttcctagtgctgtga

SEQ ID NO: 1962 - DNA, 2784 bp, Homo Sapiens
tcctggaattgcacgcgcttcctgaccaccaggctctggcccttgagaagccagcggggctttgtccctgttgctctccttgccaaacccagtctctctgctagtggtggtttcggttgcgacaccgtccaggttcccaggcaggaaccgctcggcctggctgcttagctacttttcactgaggaggtggtggaaggtgtcgcctgctctggctgagtaagggtggctggctgagccggcagcccccgccctaggcctggctcttcccggcctctgtactttgccctcgctgcctgacaggttctgctgtgggctctgctgaatggaagtcgctggtagtccttttccctttctccagtcggcccaccttgggacaccttgactccaagcccagcagtaagtccaacatgattcggggccgcaactcagccacctctgctgatgagcagccccacattggaaactaccggctcctcaagaccattggcaagggtaattttgccaaggtgaagttggcccgacacatcctgactgggaaagaggtagctgtgaagatcattgacaagactcaactgaactcctccagcctccagaaactattccgcgaagtaagaataatgaaggttttgaatcatcccaacatagttaaattatttgaagtgattgagactgagaaaacgctctaccttgtcatggagtacgctagtggcggagaggtatttgattacctagtggctcatggcaggatgaaagaaaaagaggctcgagccaaattccgccagatagtgtctgctgtgcagtactgtcaccagaagtttattgtccatagagacttaaaggcagaaaacctgctcttggatgctgatatgaacatcaagattgcagactttggcttcagcaatgaattcacctttgggaacaagctggacaccttctgtggcagtcccccttatgctgccccagaactcttccagggcaaaaaatatgatggacccgaggtggatgtgtggagcctaggagttatcctctatacactggtcagcggatccctgccttttgatggacagaacctcaaggagctgcgggaacgggtactgagggggaaataccgtattccattctacatgtccacggactgtgaaaacctgcttaagaaatttctcatccttaatcccagcaagagaggcactttagagcaaatcatgaaagatcgatggatgaatgtgggtcacgaagatgatgaactaaagccttacgtggagccactccctgactacaaggacccccggcggacagagctgatggtgtccatgggttatacacgggaagagatccaggactcgctggtgggccagagatacaacgaggtgatggccacctatctgctcctgggctacaagagctccgagctggaaggcgacaccatcaccctgaaaccccggccttcagctgatctaaccaatagcagcgcccaattcccatcccacaaggtacagcgaagcgtgtcggccaatcccaagcagcggcgcttcagcgaccaggctggtcctgccattcccacctctaattcttactctaagaagactcagagtaacaacgcagaaaataagcggcctgaggaggaccgggagtcagggcggaaagccagcagcacagccaaggtgcctgccagccccctgcccggtctggagaggaagaagaccaccccaaccccctccacgaacagcgtcctctccaccagcacaaatcgaagcaggaattccccacttttggagcgggccagcctcggccaggcctccatccagaatggcaaagacagcacagccccccagcgtgtccctgttgcctccccatccgcccacaacatcagcagcagtggtggagccccagaccgaactaacttcccccggggtgtgtccagccgaagcaccttccatgctgggcagctccgacaggtgcgggaccagcagaatttgccctacggtgtgaccccagcctctccctctggccacagccagggccggcggggggcctctgggagcatcttcagcaagttcacctccaagtttgtacgcaggaacctgaatgaacctgaaagcaaagaccgagtggagacgctcagacctcacgtggtgggcagtggcggcaacgacaaagaaaaggaagaatttcgggaggccaagccccgctccctccgcttcacgtggagtatgaagaccacgagctccatggagcccaacgagatgatgcgggagatccgcaaggtgctggacgcgaacagctgccagagcgagctgcatgagaagtacatgctgctgtgcatgcacggcacgccgggccacgaggacttcgtgcagtgggagatggaggtgtgcaaactgccgcggctctctctcaacggggttcgatttaagcggatatcgggcacctccatggccttcaaaaacattgcctccaaaatagccaacgagctgaagctttaacaggctgccaggagcgggggcggcgggggcgggccagctggacgggctgccggccgtgcgccgccccacctgggcgagactgcagcgatggattggtgtgtctccctgctggcacttctcccctccctggcccttctcagttttctcccacattcacccctgcccagagattcccccttctcctctcccctactggaggcaaaggaaggggagggtggatgggggggcagggctccccctcggtactgcggttgcacagagtatttcgcctaaaccaagaaattttttattaccaaaaaga

SEQ ID NO: 1963 - DNA, 447 bp, Homo Sapiens
  misc_feature (319)..(319): n is a, c, g, or t
  misc_feature (356)..(356): n is a, c, g, or t
gccagtctcaaacttctggcctcacgcaatcctcctgccattggctcccaaagcactgggatgacaggtgtgagccactgcacccagccagttcacagtccttgatggccaacatcacacagtttgcaagtggcagcatgaaaatctgaacccgggtctgctcaacttcaaactcattttctctccattcttcatgctgccttctctaatctctctccccgcatttatagcaccacagtctgaccccagcctaccattccagcatgaatcaccctcattcctgccaaaggaaagttactccttgttttctcccctgggngcctggaccacaattttccttctttctggtccccgtntttcaaaacctactttatcctttaatatcctactcatgtgctggcttcatcgggggtcccaacatgtatcaaaatcaccctttacaaagtt

SEQ ID NO: 1964 - DNA, 186 bp, Homo Sapiens
ttttttttgagttagacaaaacagctttatttgaaagacgtgggacagccaagttcccccaaccccgcggtcctggcgacgtcggtgtcaggcgtgggaggaccagtgtcctaagtgaagaggagagcgcaatggaggcgcggacgtttatagccactcttcgggtcagggggggggggggggggg

SEQ ID NO: 1965 - DNA, 1713 bp, Homo Sapiens
gaattcccggcgctttcctcgcaacccgagctcggcgagtcgtcgtcttcttcttctccgtttttatttatttatttccgttcccgccgccgttctcgctgaccttcactcctccgcgggctctgagcagaagggtcgcattctctcccgcctgagacttcttttcctcgccccgggagctcaggcggcgcgctccagcccggggccccggactccccggctgcacacttcactgagacgcccccaggcccgatcagcctcgttctccaccctactttgatttcctggtgcgagttttggcttgcacggccgagtgtgtgtcctctttttggagagactggggagctcgtgccgattgtcttcaggagtcatcccctgggctctactttgcccctctctctctctgggcctcatcagaccaaaccaaagaccatggttcactgtgccggctgcaaaaggcccatcctggaccgctttctcttgaacgtgctggacagggcctggcacgtcaagtgcgtccagtgctgtgaatgtaaatgcaacctgaccgagaagtgcttctccagggaaggcaaactctactgcaagaacgacttcttccggtgtttcggtaccaaatgcgcaggctgccgtcagggcatctcccctagcgacctggtgcggagagcgcggagcaaagtgtttcacctgaactgcttcacctgcatgatgtgtaacaagcagctctccactggcgaggaactctacatcatcgacgagaataagttcgtctgcaaagaggattacctaagtaacagcagtgttgccaaagagaacagccttcactcggccaccacgggcagtgaccccagtttgtctccggattcccaagacccgtcgcaggacgacgccaaggactcggagagcgccaacgtgtcggacaaggaagcgggtagcaacgagaatgacgaccagaacctgggcgccaagcggcggggacccggcaccaccatcaaagccaagcagctggagacgctgaaggccgccttcgctgctacacccaagcccacccgccacatccgcgagcagctggcgcaggagaccggcctcaacatgcgcgtcattcaggtctggttccagaaccggcgctccaaggagcggaggatgaagcagctgagcgccctggccggccacgccttcttccgcagtccgcgccggatgcggccgctggtggaccgcctggagccgggcgagctcatccccaatggtcccttctccttctacggagattaccagagcgagtactacgggcccgggggcaactacgacttcttcccgcaaggccccccgtcctcgcaggcccagacaccagtggacctacccttcgtgccgtcatctgggccgtccgggacgcccctgggtggcctggagcacccgctgccgggccaccacccgtcgagcgaggcgcagcggtttaccgacatcctggcgcacccacccggggactcgcccagccccgagcccagcctgcccgggcctctgcactccatgtcggccgaggtcttcggacccagcccgcccttctcgtcgctgtcggtcaacggtggggcgagctacggaaaccacctgtcccacccccccgaaatgaacgaggcggccgtgtggtagcggggtctcgcacggtctgcggagttcgtggttgtacagaaatgaacctttatttaagaaaaatag

SEQ ID NO: 1966 - DNA, 611 bp, Homo Sapiens
gaggttcagagggctcaagacgctgcgaatcctgtatgaggaagtcgatgagtccgaggtggaggtcattcacgtcccctctcctgcgctagaagaaaggaagacggactcgtatcggtaccccaggacaggcagcaagaatcccaagattgccttgaaactggctgagttccagactgacagccagggcaagatcgtctcgacccaggagaaggagctggtgcagcccttcagctcgctgttcccgaaggtggagtacatcgccagggccgggtggacccgggatggcaaatacgcctgggccatgttcctggaccggccccagcagtggctccagctcgtcctcctccccccggccctgttcatcccgagcacagagaatgaggagcagcggctagcctctgccagagctgtccccaggaatgtccagccgtatgtggtgtacgaggaggtcaccaacgtctggatcaatgttcatgacatcttctatcccttcccccaatcagagggagaggacgagctctgctttctccgcgccaatgaatgcaagaccggcttctgccatttgtacaaagtcaccgccgttttaaaatccagggctacgattggag

SEQ ID NO: 1967 - DNA, 365 bp, Homo Sapiens
  misc_feature (333)..(333): n is a, c, g, or t
  misc_feature (342)..(342): n is a, c, g, or t
  misc_feature (352)..(352): n is a, c, g, or t
  misc_feature (358)..(358): n is a, c, g, or t
cgagaatgaagactattctcagcaatcagacttgtcgacattccagaaaatgtcgacattactctgaagggacgcacagttatcgtgaagggccccagaggaaccctgcggagggacttcaatcacatcaatgtagaactcagccttcttggaaagaaaaaaaagaggctccgggttgacaaatggtggggtaacagaaaggaactggctaccgttcggactatttgtagtcatgtacagaacatgatccaagggtgttacactggggctttccgtttaccaaggttgaggtctgtgttattgcttcactttccccattcaacgttgtttatnccggggggnattggggtcntctttntttgaaa

SEQ ID NO: 1968 - DNA, 2729 bp, Homo Sapiens
ctggatggactagccggggccatggccggcgcggcggcggagtcagggcgggagctgtggaccttcgcgggttcccgggacccgagcgcaccgcggctagcctacggctacggcccgggcagcctgcgcgagctgcgggcgcgcgagttcagccgcctggcaggaactgtctatcttgaccatgcaggtgccaccttgttctcccagagccagctcgaaagcttcactagtgatctcatggaaaacacttatggtaatcctcacagccagaacatcagcagcaagctcacccatgacactgtggagcaggtgcgctacagaatcctggcgcacttccacaccaccgcagaagactacactgtgatcttcactgccgggagcacggctgctctcaaactggtggcagaggcctttccatgggtgtcccagggcccagagagcagtgggagtcgcttctgttacctcaccgacagccacacctccgtagtgggtatgaggaacgtgaccatggctataaatgtcatatccatcccggtcaggccagaggacctgtggtctgcagaggaacgtggtgcttcagccagcaacccagactgccagctgccgcatctcttctgctacccagctcagagtaacttttctggagtcagataccccctgtcctggatagaagaggtcaagtctgggcggttgcgccctgtgagcacgcctgggaagtggtttgtgctgctggatgcagcctcctacgtgagcacctcgcctttggacctgtcagctcaccaggccgactttgtccccatctccttctataagatcttcgggtttcctacaggcctgggcgctctgctggtccataatcgtgcggctcctctactgaggaagacctactttggaggagggacagcctctgcgtacctagcaggagaagacttctacatcccgaggcagtcggtagctcagaggtttgaagatggcaccatctcattccttgatgttatcgcgctaaaacatggatttgacaccctagagcgcctcacaggtggaatggagaatataaagcagcacaccttcaccttggctcagtatacctacatggccctgtcctctctccagtaccccaatggagcccctgtggtgcggatttacagcgattctgagttcagcagccctgaggttcagggcccgatcatcaattttaatgtgctggatgacaaagggaacatcattggttactcccaggtggacaaaatggccagtctttacaacatccacctgcgaactggctgcttctgtaacactggggcctgccagaggcacctgggcataagcaacgagatggtcaggaagcattttcaggctggtcatgtctgtggggacaatatggacctcatagatgggcagcccacaggatctgtgaggatttcatttggatacatgtcgacgctggatgatgtccaggcctttcttaggttcatcatagacactcgcctgcactcatcaggggactggcctgtccctcaggcccatgctgacaccggggagactggagccccatcagcagacagccaggctgatgttatacctgctgtcatgggcagacgtagcctctcgcctcaggaagatgccctcacaggctccagggtttggaacaactcgtctactgtgaatgctgtgcctgtggccccacctgtgtgtgatgtcgccagaacccagccgactccttcagagaaagctgcaggagtcctggagggggcccttgggccacatgttgtcactaacctttatctctatccaatcaaatcctgtgctgcatttgaggtgaccaggtggcctgtaggaaaccaagggctgctatatgaccggagctggatggttgtgaatcacaatggtgtttgcctgagtcagaagcaggaaccccggctctgcctgatccagcccttcatcgacttgcggcaaaggatcatggtcatcaaagccaaagggatggagcctatagaggtgcctcttgaggaaaatagtgaacggactcagattcgccaaagcagggtctgtgctgacagagtaagtacttatgattgtggagaaaaaatttcaagctggttgtcaacattttttggccgtccttgtaatttgatcaaacaaagttcaaactctcaaaggaatgcaaagaagaaacatggaaaagatcaacttcctggtacaatggccaccctttctctggtgaatgaggcacagtatctgctgatcaacacatccagtattttggaacttcaccggcaactaaacaccagtgatgagaatggaaaggaggaattattctcactgaaggatctcagcttgcgttttcgtgccaatattattatcaatggaaaaagggcttttgaagaagagaaatgggatgagatttcaattggctctttgcgtttccaggttttggggccttgtcacagatgccagatgatttgcatcgaccagcaaactgggcaacgaaaccagcatgttttccaaaaactttctgagagtcgtgaaacaaaggtgaactttggcatgtacctgatgcatgcatcattggatttatcctccccatgtttcctgtctgtaggatctcaggtgctccctgtgttgaaagagaatgtggaaggtcatgatttacctgcatctgagaaacaccaggatgttacctcctaaaaaaaatttttagcatacattaaagtttctcttttacagtg

SEQ ID NO: 1969 - DNA, 2196 bp, Homo Sapiens
cggggtgtcttgggcccgggcggctgtagaggcggcggcgcctacgggcagtgggaggagccgcgcggttccggctgctccggcgaggcgacccttgggtcggcgctgcgggcaggtggcaggtaggtggcggacggccgcggttctccggcaagcgcaggcggcggagtcccccacggcgcccgaagcgcccccccgcacccccggcctccagcgttgaggcgggggagtgaggagatgccgacccagagggacagcagcaccatgtcccacacggtcgcaggcggcggcagcggggaccattcccaccaggtccgggtgaaagcctactaccgcggggatatcatgataacacattttgaaccttccatctcctttgagggcctttgcaatgaggttcgagacatgtgttcttttgacaacgaacagctcttcaccatgaaatggatagatgaggaaggagacccgtgtacagtatcatctcagttggagttagaagaagcctttagactttatgagctaaacaaggattctgaactcttgattcatgtgttcccttgtgtaccagaacgtcctgggatgccttgtccaggagaagataaatccatctaccgtagaggtgcacgccgctggagaaagctttattgtgccaatggccacactttccaagccaagcgtttcaacaggcgtgctcactgtgccatctgcacagaccgaatatggggacttggacgccaaggatataagtgcatcaactgcaaactcttggttcataagaagtgccataaactcgtcacaattgaatgtgggcggcattctttgccacaggaaccagtgatgcccatggatcagtcatccatgcattctgaccatgcacagacagtaattccatataatccttcaagtcatgagagtttggatcaagttggtgaagaaaaagaggcaatgaacaccagggaaagtggcaaagcttcatccagtctaggtcttcaggattttgatttgctccgggtaataggaagaggaagttatgccaaagtactgttggttcgattaaaaaaaacagatcgtatttatgcaatgaaagttgtgaaaaaagagcttgttaatgatgatgaggatattgattgggtacagacagagaagcatgtgtttgagcaggcatccaatcatcctttccttgttgggctgcattcttgctttcagacagaaagcagattgttctttgttatagagtatgtaaatggaggagacctaatgtttcatatgcagcgacaaagaaaacttcctgaagaacatgccagattttactctgcagaaatcagtctagcattaaattatcttcatgagcgagggataatttatagagatttgaaactggacaatgtattactggactctgaaggccacattaaactcactgactacggcatgtgtaaggaaggattacggccaggagatacaaccagcactttctgtggtactcctaattacattgctcctgaaattttaagaggagaagattatggtttcagtgttgactggtgggctcttggagtgctcatgtttgagatgatggcaggaaggtctccatttgatattgttgggagctccgataaccctgaccagaacacagaggattatctcttccaagttattttggaaaaacaaattcgcataccacgttctctgtctgtaaaagctgcaagtgttctgaagagttttcttaataaggaccctaaggaacgattgggttgtcatcctcaaacaggatttgctgatattcagggacacccgttcttccgaaatgttgattgggatatgatggagcaaaaacaggtggtacctccctttaaaccaaatatttctggggaatttggtttggacaactttgattctcagtttactaatgaacctgtccagctcactccagatgacgatgacattgtgaggaagattgatcagtctgaatttgaaggttttgagtatatcaatcctcttttgatgtctgcagaagaatgtgtctgatcctcatttttcaaccatgtattctactcatgttgccatttaatgcatggataaacttgctgcaagcctggatacaattaaccattttatatttgccacctacaaaaaaacacccaatatcttctcttgtagactatatgaatcaattattacatctcgacccggaat

SEQ ID NO: 1970 - DNA, 3161 bp, Homo Sapiens
gccccctcttctcccctcccccaagccagcacctggtcgcccggcgggtcgtgcggcgcggcgctccgcgagagctggcggtcaccatggcaatgcgggagctggtggaggccgaatgcgggggtgccaacccgctcatgaagctcgccgggcacttcacccaggacaaggcccttcggcaggagggattgaggcctggcccctggccccccggagccccggcctctgaggcagcctccaagcctttgggagtagcttctgaagatgagttggtggctgaattcctgcaggaccagaatgcaccccttgtgtcccgtgcccctcagaccttcaagatggatgacctcctggctgagatgcagcagattgagcagtcaaacttccgccaggctccccagagagcccctggtgtggcagacttggccttgtctgagaactgggcccaggagtttcttgcagctggagatgctgtggatgtaactcaggattataatgagactgactggtcccaagaattcatctctgaagttacagaccccttgtctgtgtcccctgcccgctgggctgaggaatatttggagcaatcagaggagaagctgtggctgggagaacctgagggaacagccaccgatcgctggtatgatgaatatcatcctgaggaggatctgcagcacacggccagtgactttgtggccaaagtggatgaccccaaattggctaattctgagggtacatcagatgcctgggttgaccagttcacaagaccagtaaacacatctgcccttgatatggagtttgaacgagccaagtcagctatagagtctgatgtcgatttctgggacaagttgcaggcagagttggaggagatggcaaaacgggatgctgaggcccacccctggctttctgactatgatgaccttacgtcagctacctatgataaggggtaccagtttgaggaggagaaccccttgcgtgatcaccctcagccttttgaagaagggctgcggcgccttcaggagggggacctgccaaatgctgtgctgctttttgaggcagctgtgcagcaggatcctaagcacatggaagcttggcagtatctgggtaccacccaggcagagaatgaacaagaactattagccatcagtgcattgcggaggtgtctggagctaaagccagataaccagacagcactgatggcgctggctgtgagcttcaccaacgagtccctgcagcgacaggcctgtgaaaccctacgagactggctgcggtacacaccagcctatgcccatctggtgacacctgctgaagaaggggctggtggggcaggactgggccccagcaagcgtatcctgggatctctcttgtctgactccctgtttcttgaagtgaaagagctcttcctggcagctgtgcggctggaccctacctccattgaccctgatgtgcagtgtggcttgggagtccttttcaacctgagtggggagtatgacaaggccgtggactgcttcacagctgccctcagcgttcgtcccaatgactatttgctgtggaataagctaggcgccaccctggccaatggaaaccagagtgaagaagcagtagctgcgtaccgccgggccctcgagctccagcctggctatatccggtcccgctataacctgggcatcagctgcatcaacctcggggctcaccgggaggctgtggagcactttctggaggccctgaacatgcagaggaaaagccggggcccccggggtgaaggaggtgccatgtcggagaacatctggagcaccctgcgtttggcattgtctatgttaggccagagcgatgcctatggggcagccgacgcgcgggatctgtccaccctcctaactatgtttggcctgccccagtgacagtgggacgggctgccctgtgagtgtccacctggagggatccccgctttggatgtgattccctctccccaaatgggcctaccaagggggcgggctgatgaccataagcggtacggcctttcaggagctgcctcaacgtaggggtgggtagtctgtgttctagttcctacataattgtaggaaaatgagctgtgtcatctctgagtcccttggtaattcaagggctgtacatccagctacagatctctctgctcatcatgccctttcttggtgctgctttttgggtaggaccccacgatttagggtaactgttatcatcagctgccatttctgatagggtctaccacatctgtaatgtctgtcctttcccccacttttactgggaattgatagtccagcttccttgggcagtgtaagtaggaggttcatctgctgtgcgcctctaatgtctgtctggatgggatgtgttaggagttggcctgttgggttgaattgttgatttggctgagcagagctgagttttggtaggagtgctcatggttctgtcattcttggacctctcctggctgagctctgattccctgtgagcacgatgctgatgcaatagtcctgtgtcatcactgcagcggtcctcaggagctgccagggccaattgctacagagtgtctgggtgtgtggcataggaggaaggtttgcttgtgaaatgaggctgggtgggagcggggagggactagatcagaagagatcaagggctgtattcaggaacgttggtgggaggacagagcaagtgggaagggggtatggtgagtgcggcaatccctcatcctcttagaagcacctgtgaatgggaattgagccaactgttatagaaaattggttcagaaagtgcaatcttgccagatttctagcaaataggttcagtgttaccataagcctttgctgtacttcttgaaatgtttctaggggagagcattggaaaatccccttcccccatctagatcgaaggaagatgagggagcagcttggattcttctcagttgtcccctgcatggggagatacactaacccccagaaatgactgctaagcctcttgccttgtctttagtagctaatgatcagagagatttttttttttaaactaccatggtcccaggattccatcctgaaatttatttttctttgtatgaatatgtgtaaatgatttaaaaataaaactgtaaaatatttgtacgaagaataaatggaactgatgtgggaaaaaaaaaa

SEQ ID NO: 1971 - DNA, 2553 bp, Homo Sapiens
gcctgcctcttccagagagactcccccattgctgtctcttgtgtgtgtcatgcacaaggaaggcttggttgtgtgccaggataaggggcacaagggcctcgggtgtggccagagaccccatgcttaagcttttatggtataggtcaggctgcaggggtttgagggcctcagttgtatatcagaatcttcagagcactgcgatgttcaggggtgagtcaggtctgtagatgtgcacggggtcttctgaagggtcagtttctgtaatcactttcaggtgtgtcagggccttgtgcagtaacagtgcacacagaagttagtgtttctgtgggctaagggttgtagctctgtatcaggattctgggagtgggtctggatttctggtgtgtggacttaagaagctgtgtcagacttgggggaggggcgttcatgtataactgggttcacataggccaagactcccaggtgcattttaggcagagcctcaggtgtgttagaggtcccaggggcagagaggctataggtgctgtcagaggccttggggacatttagggcagagcctcgagtgacaggtcctgggacagtgggagccaagggcaagtgctagagttgcagtgaatttagagcaaagcctcagctaagtgacacatcccagggcagtaggggatctatctaggttcgtgctgggcctcaggtaagtgacaggccttaggacaatgggggctgtggcatgcgtcaggttacctgccttgatatgggatcgtgacaggcccctccctatgtgcaggagacaagcagcccaagaaacaggagaaaaacccagtgttggtgtccccagagtttgtggatgaagctctgtgtgcgtgcgaggagtaccttagcaacttggcccacatggacatcgacaaggacctggaggccccgctgtacctcacccccgagggctggtccctcttcctccagcgctactaccaagtggtccacgaaggggcagaactcaggcacctcgacactcaggtccagcgctgtgaggacatcctgcagcagctgcaggccgtggtaccccagatagacatggaaggggatcgcaacatctggatcgtgaagccaggagccaagtcccgcggacgaggcatcatgtgcatggaccacctggaggagatgctgaagctggtgaacggcaaccccgtggtgatgaaggacggcaagtgggtggtgcagaagtatattgagcggcccctcctcatctttggcaccaagtttgacctcagacagtggttcctggtaactgactggaacccacttaccgtgtggttctaccgcgacagctatatccgcttttccacgcagcccttctccctgaagaacctggacaactcagtgcacctgtgcaacaactccatccagaagcacctggagaactcatgccatcggcatccactgcttccgccagacaacatgtggtctagccagaggttccaggcccacctgcaggagatgggtgccccaaatgcttggtccaccatcatcgtgcctggcatgaaggatgctgtgatccacgcacttcagacctcccaggacaccgtgcagtgtcggaaggccagctttgagctctatggcgctgacttcgtgttcggggaggacttccagccctggctgattgagatcaacgccagccccacgatggcaccctccacagcagtcactgcccggctctgtgctggcgtgcaagctgacaccctgcgcgtggtcattgaccggatgctggaccgcaactgtgacacaggagcctttgagctcatctataagcagcccgtcaccacttccccagcctccacaccaaggcccagctgccttctccccatgtactccgacaccagggccaggtcctcagacgacagcacagcaagctggtgggcactaaggccctgtcgaccacaggcaaggccttgaggactctacccacggctaaggtcttcatttccctcccaccgaaccttgatttcaaggtggcacccagcatcctgaagccaagaaaggtgggcctcgacctgtgactcacacccagtggacagtgctgagcacggggtcagggctggagggcacaggcagagggcagctcccaggctggctggcaccccaagggaagagctggtctccctcagaagccccttcctccacagacttctgatcatctccctcttctcccctcctttcacaccgaggctcctgctctcctgtgcctccgaggcccccagctggaagtgccttgttgcctctgccctttgaagtcggaacaattcctagcacctgtcggaaggtcaaggccaaaggcaaattcaaggccagactgtgacaaacccagggctgaggcctgccccatgaagaggctgagccccctgaaacccctgccccttgttggtacattccagaggcgcaggggcctgggggatatgaagctagggaagcccctgcttcgattccccactgcccttgtcctggatccaacaccaaataaaaagaaacaagtgaagtaaaaaaaaaaaaaaaaaaaaa

SEQ ID NO: 1972 - DNA, 497 bp, Homo Sapiens
agtcggtcgtcaagagacacctacactaatagtttatgcacagcataaactattcagattataggcacttgtaattctaaccttgtatccatttgatcaaagaaaatttgtagaacatttttacctctcatgatcacaatcattagtgtctccctttataacgacctatgttttgtttactttgaaacaccaaatttgttgtcttggttttttttacatgacagaactcatgcagtttcttttttagttgaaagttcacatcttgccccttgaatagtttgaacatttctttcttaattcttttttgttttggttttgcactgtaaaactgatgaaaactttaagccaatcttaatgcactagcctctgtagtgtaaggaagtgtgagaaggagtttcttaatgagtttacacgtttaaatcaagcatattataagttatatgccatgtgttgaaggcttttctatttatatatataaagatttttagtatttgttt

SEQ ID NO: 1973 - DNA, 5431 bp, Homo Sapiens
tccaccgccggagcctcgccttcctttctccctctgcagacacaacgagacacaaaaagagaggcaacccctagaccaccgcgaaggacccatctgcaccatgaccgagaccaccaagacccacgttatcttgctcgcctgcggcagcttcaatcccatcaccaaagggcacattcagatgtttgaaagagccagggattatctgcacaaaactggaaggtttattgtgattggcgggattgtctcccctgtccacgactcctatggaaaacagggcctcgtgtcaagccggcaccgtctcatcatgtgtcagctggccgtccagaattctgattggatcagggtggacccttgggagtgctaccaggacacctggcagacgacctgcagcgtgttggaacaccaccgggacctcatgaagagggtgactggctgcatcctctccaatgtcaacacaccttccatgacacctgtgatcggacagccacaaaacgagaccccccagcccatttaccagaacagcaacgtggccaccaagcccactgcagccaagatcttggggaaggtgggagaaagcctcagccggatctgctgtgtccgcccgccggtggagcgtttcacctttgtagatgagaatgccaatctgggcacggtgatgcggtatgaagagattgagctacggatcctgctgctgtgtggtagtgacctgctggagtccttctgcatcccagggctctggaacgaggcagatatggaggtgattgttggtgactttgggattgtggtggtgccccgggatgcagccgacacagaccgaatcatgaatcactcctcaatactccgcaaatacaaaaacaacatcatggtggtgaaggatgacatcaaccatcccatgtctgttgtcagctcaaccaagagcaggctggccctgcagcatggggacggccatgttgtggattacctgtcccagccggtcatcgactacatcctcaaaagccagctgtacatcaatgcctccggctagcagcccctcgtcctccggcaacacaatggcccctccatctttgtcagccccctgtttctctcctgcctctctgtttctccatctcctcgtcttgactgttttccctacttgctgacttaaccccccatagtgtgggggacctgcagagaaccatggcattccctattccacagtcatctttggacagactttcctctagtctccgggttgggggtgggtgagggaatggggtgggagtcgggggaagtgcagtccttggagatgtactggtgtccgtctcccagcatgctctagagaggcggctctggtgcccatcctcccagcacgctctggggaggcggctctggtgcccatcctcccagcatgctctagagaggcggctctggtgcccctcctcccagcatgctctggggaggcggctctggctcttgccttcccagcatgccctttactacaaagggctatttttcttttctttcttttgtttatttatttttctttgttcactccctgtagaacttggatgaaatcagtgtccatggttctttatgtttgtagtcttgatgtgctcctgtggtattacttcccctctgataggacattgtagccagcctcagcactcagtgagttcatcagggccacacccagtagagaaggccaagcaacctccacttcttcagcaccacacacacgcacacacacacacacgcacacatgcgtgtgcacccgcgcacgcacatacacacacacatatagcagtagcagcagcagcagcagcagcagcaacctttgatcaggagtgagattttcgggttctgaaacctgggacacgagtctgtgaatagtcggttttctcagaataatttgaatctgttttcttagtttcaaatgaccatttccctgatgctctgagcttatgatcacacagagccagtccatcctcatttcctggtggcatctgttcatttacctttgtggactgtagctgatggcacagtgcgggttccctaccagccaggggtttccaagggacctttggaggccatgcttagacacattcctgtacctgagaacaaccacataggcaggaccagatccacatcgtgcagtcgtgtcataaaaaaacaaaacaaaacaaaaaaacactaggagtccactcaaccctggaggtctttgctaattggaattatgtattgtctgttgggctgggaaatgtctctttcatattgtaagtccaggatgaactaggagaaagcaatttgttgccctgatgataactgatgattttcaccctctctagctgaggtaactcagacagtgcatgaggtcagtttcttcttgagaagcagtgccttggtcttgtttctgtggttggttctagcccctgcagagcctgggagctgcaggaactgtctgagaaaatctccctaataggggagtgggttcccagaagggagatctgggaggggtcaggagccactaagttgcttcactccttttttctctaattttctaccttcctctctgttcctgcagacagttttgccagctttgcttctggttactagggtctcatgcgtgtcctgcttggagagccataaggaaattgctgtcttgtgctttgtgtctctcatccagtctctggctcttgggattctggtctttgagaaatagtccctgagtattaggatacttttatcaaaatctagtaccagctacggccagaaagggccaggtgggacctgaaagcaaagacaatgttctttaccacacgtttcacatctgcaacatccttcaattgcgggaaaaggaacttgatttaacagaagaacatggtagagcagcatccagaaagtctgttattcctcttggattttttgaaataatcttcagaggaaggaaggaaaatcctattttggggtatcagtgtttgactagggatcatgaaataataaactgaaaaaaactttagagttcagttgatccaacactttcctttaaaagttgagggagcagaggcccatgggattaaatggctggtccaggtcagccagcaggtgtagggcctgacaagaacatattgtttccctgacccctaggccgtcacaccacaccctccatttcctcatgttgctgaccaggtgcccatatgatttctacacttcccaagccttaccctggcatctttcttttaaattatatctgtcccaggtgctctccacacataggatggtaatgccagtcccaggggagggtgtgatagtaaggaaggccactgttaggtttcctttagaaataaagagatctcagcagcttggaagaaatcccagaagcggaactccatcaatccaagaaagagttgctttgtggaaggtgaaggaagacccacagagtgctcaggatgatgctattgctggagagcgaaagatggaacagccttgtccaggcagaacagtcataagccaggaaatgaaacaaaggaaaacaggtgcctgaatttcctggggaaacatggcttgtttaaggacttggagttatggatggaatttatgggacccacgtgagcagacctgaggaaggctcgatttcttttgtttcttggtccactctgtcactctgctctggtcaagccccatttggtctacagcccatgagaaggaatgaggctggttctgcactctcagcatgcagtccgaaagcatgtgggagtggggagggaaagtgagatgaattaagacaaagaacaggtgccatagaagtagatttctaggaatgaagtggggcagatcttatctttgtggattacaggcactgtactaaaaacaggtttcctatttaatataaaaagaaagtgaatcttcttttggatagaatcatccattcccatcgccgcaccccctaccccccaaacacacacacacacacacacacacacacacacacacacacacacacacacacgccctactcttcatttgctaggggaaggtcacagcacaactaaatccaggacaggacattgtgaccatgacccagccacagtcaataccagaaagatgattcagagtctgaagtggtgccccaggtgccaacaggataacctctaccccccgactttgtctctggggtcctgttccttcctgcaaagcccaatccaagactggcatggctcagaggttgtgagaaaggcatggactggaacaatcatgtccagaggggtctggagctttgtttcctgttcaccagcaaaaaatgtctctcccatttttctgaaagtggctgatgtaagaacaggcagaaggaaaaccctttttgtcaataactctgtccttaaggaatggtcctctgggagggctgtgctgctagtgggtacctcagtcacacacccccaaccccaggcagcctctagagccttcttgctttcattttccttgaatgtacataggaacaagggggaaagtctcttactgaagtgcctgaaacccaaagctagagcttctagagacgccgttcttcctgtctcagcttggccagcctttcaacaatgttctctagtttcaagctccagcttctcagaaagaattaaagaacttgctgttcaaattaagtagaaagtgagactcaataataactgaactacagcaaaaggcagagaattacagggagaaaaaacttgtacttaccagcccaattctactctcctcaaactgacacacacacacacacacacacacacacacacacacacacacacacactcttttaggggactaagagagagaagcatgttattacattttactcatccaaacagtaatgcaaaaataaaacggtagaatatgaaaagctcaggatctctcccaaggctacctactgcaggagggccaacaggtgagatgggaagaatggaaacagggaccgattttgtagctcatacaattaggacaccttaggaatagcattgtagtaatggtgatgaatatgctctgccaaattcatccagtctgcaccatcttatagctgcccagcacactcgactgttcatgtggtctctttgtagtgtgagtttggagtgtcctattagcctgttctggttaggaatgagttaacggctctttccctcaaccttagtctagtcccagggctgaggattcagctggatccacatggtcttgagggttggcatgaggagggggaagcttttttgaatcgctttttgatcacataatctgccattttaagagtaagatttgctttatggaaatcaattcattaataaaaaatgatattcaagttgcaataccatttcacagtgaaatattttgagtacaattttgttgctagaatagtcatgggcaagagttttatgcaaaatgtttcaattatgttaataaataagacaatgct

SEQ ID NO: 1974 - DNA, 3899 bp, Homo Sapiens
ggctggaagacgagacctgctcactctgtcaccgaggctagagtacagtggcacaatcacagctcattgcagcctcaacctcccaggctcaatcgatccttccaactgagcctccctagcagctgggactattagtgcacaccaccacacctagcctgcaggatgtttcctcaatgaggggaaggctgctgcacaatggcagtttttgatactcctgaggaggcctttggtgtcttacgtccagtctgtgttcagctcacaaagacccagacagtggagaatgtggagcatctgcagacacgactacaagctgtgagtgacagtgcccttcaggaacttcagcagtacatcctcttccctctgcgatttaccctgaagaccccaggtcccaaaagagagcgtttgatccaaagtgtggtggaatgcctcacatttgtcctttcttcaacatgtgtgaaagaacaggagcttctccaggaactcttttcagaactctctgcttgtctgtattcacccagctcccaaaaacctgcggctgtgtccgaggagttgaaattggctgtgatccagggacttagcacattaatgcactcagcttatggggacatcattctgactttttatgagccctccattctgccacgtttaggatttgctgtatctttactgttaggccttgcagaacaggagaaatcaaagcaaattaaaattgctgccttaaaatgtttacaggttctactcttgcagtgtgattgtcaggaccatccaaggtcattggatgaacttgaacaaaagcagctgggggatttgtttgcctcttttttacctggaatctcaactgcactgaccaggcttatcacaggagactttaaacaaggtcacagcattgtcgtatcttccctaaagatcttttacaagacagtgagcttcattatggctgatgaacagctcaaaagaatctcaaaggtccaagcaaaacctgcagttgagcacagagtagcagagctgatggtttacagggaagcagattgggtaaaaaagactggcgacaagttgactatccttattaaaaagataattgagtgtgtttctgttcacccacactggaaggtgagactggaactggtagaacttgtggaggaccttcttttgaagtgcagtcaatcattggtcgaatgtgctggtccccttctgaaggccttagtgggactagtaaatgatgagagtcctgaaatccaagcccagtgcaataaagttctgagacattttgcagatcaaaaagtagtggtgggcaacaaagccctcgctgacatcttgtcagaaagcctgcattcccttgccacatctcttcctcgcctaatgaactcccaagatgaccagggcaaattctctactctttccttgttacttggttatctgaaactcttgggcccaaaaataaactttgtcctcaactctgtggcccatctccagcggctttccaaagcactcatccaagttctagagctagacgtggctgacatcaagattgttgaggaacggcgttggaactctgatgatctgaatgcttctccaaagacctcagccacacagccttggaaccgcatccagaggagatatttccgcttcttcactgatgagagaatcttcatgctcttgaggcaggtttgtcagctacttggttattatgggaatctttatttgcttgtggatcactttatggaactttaccatcaatctgtggtttaccggaagcaagctgccatgatccttaatgaactggttacaggggctgctgggctggaggttgaggatcttcacgaaaaacatattaaaacaaacccagaagaactgagagagattgtgacatctatacttgaagaatacacaagtcaagaaaattggtatttggttacctgtcttgaaactgaggaaatgggagaggagctgatgatggagcacccaggcctccaagccatcacgtctggtgaacacacctgccaagttacatcttttctagccttctcaaagccaagtcccactatttgctccatgaacagtaacatctggcaaatatgcattcagttggaaggaattggccagtttgcatatgcactaggaaaagacttctgtttgctcttgatgtcagccctttatccagtactggagaaggctggagaccaaaccctactcattagtcaggtggctaccagcaccatgatggacgtttgccgtgcttgtggctacgactccctgcagcacctgatcaatcaaaattcagactatttagtgaatgggatctctttaaatctgcgtcatctggctctgcatcctcataccccaaaggtcctggaagtcatgctgcggaactcagatgctaacctgcttcctttggtggcagatgtggttcaagatgtcttggccaccctggaccaattttacgataagagagctgcttcctttgtcagcgttctgcatgctctgatggcagcattagcccagtggttcccagacacaggtaatcttgggcacctccaagagcaaagtttaggagaagagggaagtcatttgaaccaaagaccagcagctcttgagaagagcaccaccacagctgaagacatcgaacagtttttgctgaactacctcaaagagaaggatgtggcagatggaaatgtctcggattttgataatgaagaagaggaacagtcagtccctcccaaagtggatgagaatgacacccgtccagatgtggagccaccactgccattgcagatccaaatagccatggacgtgatggaacgctgcatccacttgttgtcagataaaaatctgcaaatccgcctgaaggtcttggatgtgctggatctgtgtgtggttgttcttcagtcccacaaaaaccagctgcttcccttggctcatcaggcctggccctcgctcgttcaccgactcacacgggacgcccccctggcagtgcttagagccttcaaggttttacgtaccctgggaagcaagtgtggtgactttcttcgcagccggttctgcaaagatgtcctgccaaagctggctggctccctagtcacccaggcccccatcagtgccagggctggaccagtttactcgcacacgctggccttcaagttgcagctggctgtcttacagggcctgggccccctctgtgagagactggacctaggtgagggtgacctgaataaagtggctgatgcctgcttgatttacctcagtgtcaaacagcccgtgaaattacaagaggctgccaggagcgtcttcctccacttgatgaaggtggacccagactccacctggttcctcctgaacgagctttactgccccgtgcagttcacacctccccaccccagcctccaccctgtgcagctgcacggggccagcgggcagcagaacccctacacgaccaacgtgctccagctgctcaaggagctgcagtgaccctgctcccccaccacagaggccaccgatccctcccctactgccagccagaagctgggctgaccccaccccggccataggcggtggcagcggcagcagagaaggtgaattagttagccaatcgatttataaattgatcgatcacacaactgcttagaaatggattgaaggaaagtagctgactattatttatatttcataccttgtgttttcaagtgacattgtctggtggctctaagggtttaaccccttagcctaccatctctatagccccagctccctcacaggccacacacacacacacacaagaggtcagttcccctccatctgcatacacctccctgtcttcaaataatgagatggaactaatttgttttacctaacctgatctttgggaaacaaacggaaataaagacacttcttggatgaaaagt

SEQ ID NO: 1975 - DNA, 4564 bp, Homo Sapiens
ccggggccctacacgccagacctggctcggggtgggagtgcagaggcaaccaaaaaggaacccacacctccctccagggcccggggcgctgtcagacggggcagcaaccaggagattccctgggcctgcaggaagcccttccgcggaccgaaagattgttccccattttggagatgaagaaactgagactcaaagcagctgagtgaccttcccaaggacacacactgaactgggcggtgatcaggatctgaatgcacagggcgggtgttcagcgattgtttactacgttgaacgtgacctccaggaaagcagttctggccgagatcccctgacaacgcaaagcaagaagtaacgtggaaggaggctccccaagctggctggccattttgctgctgtgtgtggaggtgctgccagtggcatgcccaaacccaaagctggaagaggaataaattacaagtggtcaaggttgcatccttttgagcccaggacctgcttgtaagccgagagggttctctggccctaatctagccaagcaccatggagagaatcagtgccttcttcagctctatctgggacaccatcttgaccaaacaccaagaaggcatctacaacaccatctgcctgggagtcctcctgggcctgccactcttggtgatcatcacactcctcttcatctgttgccattgctgctggagcccaccaggcaagaggggccagcagccagagaagaacaagaagaagaagaagaagaagaagaagaaggatgaagaagacctctggatctctgctcaacccaagcttctccagatggagaagagaccatcactgcctgtttagttaggcaggaagcagaggtgtttcctttctggggctaagcctccttctgaccacacacagacatttcaggaacccctgaaataatgcactatgtccatgtccacagagtaactactcaaccaaggaacaaacctcagactaagtgtcccagtggagggcagtcccagggaccacgtggacaattcttggatactgtcttggcagctatgtgtccaatagcaatgctccttactgcagacccaggcatgcctcccacctgtctctggcataccccacatgcaaagcacaaagaacatttatccatacatctcaatatggttcccaagtgtgtgcacatgcacgtaacacacacacacacaaattcaggtagcaggtacgtgggcaagtatattctgctcatcaaatggtcattggctatgtactttgtgcagggaagtacattatctacagtcacaaaaatgtctcatgggaaagccttgccagattcagacacatatatacaatttcctaaccagcaaggcccccatacaccatctattccataaaccactcaggttacagatgcatgctttcctatttctaactctacacataaacttttactggaagtactcataattggacattccagcaacctgctacagtccccacccttgtgtgtcttgatacagacacaccaagtttctgtgcctctgacccctcacctgtgccaagatgtttaaagtgtgatggttcaaaattcattgaaagctcttttcttgtaactcatgacaaagtccgtcctcattgccactgagaggtgtttaatgtgatccaagacctctctgtgaaacattacccccgcaaaccactcagcaaagtgcctttctccaagcaagaacaaagagctcttggtggtgactgctagaaaattatggaagcccactcatttatgtcagtggactgcaactgtgtacctgtgcaatgtttacagatggaaagggtgaggagatgctacacctgagctaggtatctcctatataaccaaagtttccagcagggaaggaactagacaatcatcagtgcagtctcacagaaggcaacactggaagtgatgtcataaggttgtgatgtgtgcacggtatggcacaggtgggatgcagaggtaacagagtttaaatgaaagtaggatgaagctataaagaggtttatttatatttatattgaagctcaggcaagtgccttgcacacagtaggtacttataactaactgtggttactgttggatatgtgatgttgttaagggtaagcttgtaatacctcaccagttctccccgagtgatcttctcttctaagtgagcccactaattgctgcaatggatgaaattgggtgtttaatgctggagagcacatgtaggtgacacatgtgccttgaggtatgtgaggacatgtaaattagatccacagtgagctgaggagggctttccccgccagagtgaggttgggaagcagagttaatccacttataggatgaactgcttggtatttttattgtattgtgactgtattacaaagatggacaattcactccttgggagcaagttatgctctagaagtttatttacaaatatgctgggcagctctcttgaaatattttcccaaggaagctattctacacagtggcaaaattgctatctaattaataatgtagctaaactatgatatttatagtagcaaaaaactaaattctataagattgcattaaaggaaagatatattctatttgctcacttgggctgcttggtactcacctgccctccaggtgtactttaggcctgtggagggtgggcatttagtggtgacccttgcaccagggttttctaacagatgaccctgtgaatcataatttaaacctgcatatattttatagccagtcacatttgccctctcaccctatatggccataaactgcctaagcactcaggcctcccactcatcaacccctttgaccagagaaagaagcactctggttctctatccccttgtcacatagagagtttgtcatggggcctctggctgtgcccttcacataacagaatgacttgccatctgcctgcaccaaacccagggatgtggaagacatctccccacaactgccactgctcaccaggacaagctgcccttcctgtctccacctctcagtccccctagaatggatggctggggagaggtggaggctgacagctgagacgtagtgtcagatatgatctaggagggcggatcaccgggatccgggaccatacaagtaacatggtttccatggcaactgcttgctcctttgaattaagacagcagtcagttgtcattgccatgacaaggcctctatctccaggcacaatgtccctgctgtctcctaatccaatggacttgctctcaccccagggatgaaacacccagaaactcacttctcagtcacttccacagccgatgactcagaagagccaaacccagaatggggcctctcttttccccatcacagactcccctgacaacctttcctggcgtaactagaggagtcccagtgcaggataggccctaaacgttttgttaaataaacaggtgcatgaaaggagcctaaggccattgttgatatccactctcttctttccacttccttctcatctttttctccatgttttatgcttctctgattccctcttctgcctgcaccagaccagccccagccctttattcctctccattttcactccttccagcctctgtccctgaactgccactggcaacccatgggacctcaggaccagagactgcttgactcatctggggagggtaagttcacgggggacaaaaaaatgattcctaaagaagaggcttcctagaccagcacaggctcgagaaagacatcccctaggcctggacttctgagcagctttagccaggctccggacggcagccagaggaggcctttccccattgctcctttccccattgctcaatggattccatgtttctttttcttggggggagcagggagggagaaaggtagaaaaatggcagccacctttccaagaaaaatataaagggtccaagctgtatagtatttgtcagtatttttttctgtaaaattcaaacacacacaaaagaaaaatttatttaaataaaatactttgaaaatgaaaagtcttgatgtagtcagatggttactctcttaacattaggtattacccccactcagacatcactcagaaatgatcaatgcagggactctttctgtgacacaaatgtcccagccctccctggtcaccgccttcgccatggtagagtcataggtctgaggatgaggaatgtggctgtctcacccttgcttgcaaaacagatggccttggagaccagactccctcaaaggtgccagctacaggaaaaatatactgatgttccttggcaacacttacagaactttccatcaatgaggtccatcaatggcttcttaaaggaaaaggggggaaatagcaaaaacctaaggaagaatggacctttgagttaaatccagtgtttgttgggaaaggagggatcaaaaacctctatagtagccactagggcaaaaactgtgtgtatgtgtgtgtgtaagtgtgtgtacactgttcaatatggttcaatatggtaccaatagccacatgtgactatttaaattcattgcaatgaaataaaattaaaggtatactagctc

SEQ ID NO: 1976 - DNA, 6949 bp, Homo Sapiens
aaacaagaagaatgggattgatatttccgcagaagtttggaagttatgtaacagagcaggttgagatcctaccttttaggagcagcctgccccttttgaaggggtaaagggagtgggtgcagtgccctctcttctgttgtagtggcttatccctctaaggcatgacccttggataggggttacctgcctcggaaagtccccacttccttgtgggagtttaaaatagattggcatatgtgagagatggagacaaggtgggaaatcggatcctgtcttaggatttctcatcaggagatgctgatacttggtgtttcagcttgataaattgagaaggtgccatgaaaccaggtcctggaacagaatccctggttgctctgtcttttagctgctctgaccctctgccctgcagagcatgcattttgcatgtgcctggcaggaggccctcctgcttgagccctgctgtatttgtctgtgttgacaacgtgactgccagccattaagcttggtcagtccacagacacactaggaaagcagaggcagctcttggtttctctggaacagagctgcaagaagtctctgggcatctgcatggccaggagcttatgcttaactgttgagtgacctgcagccataagggcattaattctgccttccagaggtgggaatgacttggctttaaacagtgatttgtgtgagaattcttcaaatcccataaggtagaaggcatggtggagtggaggagaaatcttggctcatatctgcctcttccattgaccagctgtgtgaccttgggcctgttacttttaacctacctgaccctccatttcctcatttatcagaagtgtctaactgtacacaagttaaactgtaaggattacatgaggtagtagtcaatcctggtgtttctctgtatcttctcacttctcactggtgttggaaatatgatcttgcgaccctagatggcagccactctggggcagaagagacagtgaccaccttttgaagagctcaaaggagaatattgccccacagggcttagtgggtcccccaggctgaggctggggaggagggccacctttgcctacagcaagtggcatatcattgttctaggggttctcttgacggcagaactttgcctctagctcattttccacagcctagattttccaatcttgccaatccagttgacttctgtcttctcatttccaagccattgttctctctctttcactatctacatggattatccttcattcaaactgctttgtcccggccgggtgcggtggctcatgcctgtagtcctagcactttgggaggccgaggcgggtggatcacgaggtcaggagatcgagaccatcctggctaacatggtgaaaccccgtctctactaaaattaaaaaaattagccgggcgtggtggcaggcgcctgtggtcccggctacttgggaggctgaggcgggagaatggcatgaacccgggaggtggagcttgcagtgggtggagatcgcgccactgcactccagcctgggcgacagagcgagactccgtctgaaaaaaaaaacaaaaaaactgctttgtcctgtaggaatcctgtgcgggttatgtgcacctccctcaatccttaccttgaagctgaggtttcccctcagctctcaagtactcagtttgcactgcaggtagtccctattttaacgaaagttatacggtccagctcagggaatcctgaaaagctgcccttgcttccatggtaatcaaaaggcagttctcatggaataaaagctacctgaagcctgagttgggacctttggctggggaaggtggttgaggacgttctctgattagatgcttggcatgaggtttgctactggaactgctagtgtagaatgtttcagccccctagagttgtccctgtgatgtggctacctcctttctctgggatttctcttaaagtctggggagcccctgcttctcatttcctggaatttatcttcccagtctccctttctggctgaaaatttctagtatcttacagaacagcggtgggatacactggagcacatcatattaccactaagtatgtctaataaatgatgtcctctgatttgacatttcctaaatgtgaagctcctgattttatacaattttgaaattagtaagcttgttagttttgtttgaaattctaggcattggatacacttaacatgagggctacatgtgcatcaacatactctggtttccttccctctgtatcttttttttttttgagatggagtctcactgtctcctaggctggagtgcagtggtgtgatcatggctcactgcagccccaaccttcagggctcaggtgatcctcccgcctcagccacccaagtggctgggaccgcaggtgcatgccaccatgcctggctaacttatttttatatattgtagagacggagtctccctatgttgcctaggctgaccttgagctcttgggctcaggtgatcctcccgccttggcctcccaaagtgttgggattataggcgtgagccactgtgtccagccttttcctctgtatcttgtatccattccccagagcgatactgtgtatccttgaacagacggtttcttgaagtcagagtctatctcctctgtcacttctcccccttcattatctaagactgaggttgtggtttatatgcttagagttgaaagcatggggtccaacgtgttctgtactctgtagttccccagactctccagggaaactacttagctctcaggtggttcttttctgtttttctcagagcaagttatctaataactgaagaggactctgccctttggcctgttcctgactttctaactccttttgctggaggaaggggaggttgaggggggtgccctgtggtgtgaaagccccacttgccctctcctctatactttcttccaatgcagacgggagaaagtatcataaatgtagtgactgtgggtcaggggagctctgagaggccagcacaggaaaccagaaacaaaatgagtcagttcgtaggtggcgatcagaggcaccctgctgagggtgcaaggccacaggtgatgcctcctcagtaggcccaggagcatcaaaacgggaacagtccctttcagccttcaggagcctcccaaatgtcacttagtgatgtcccattcacctgcttaaaggccctgcatcctgccaggtagttggtttgtccatagcatcctgagctctgcttgggtgagccagacaaaaagaatgattcctggccagagtagtgataccagggcccagacagaggcagagagtccggatagaagatcctgtaagctggggtagggagccgaggaggccatggagccaggggaatcattgaagtgagggacaatttctggaggagggaaactgagtaaggaaggcctggccaaggaccaagaaggggacagtatcctgatctatgaaagaagactcaagtggggattgacagagccagattgggtggagtccaagctttgggcaggtgagtgtccaggagatgagggctgagaatgggccttcagagcccagccagaaggggaaagcacaaagctccaccctccttcttcacatccctccatgctgctcaaatcccaggtcttcaggcaccatggaggacaaacgcaacatccagatcatcgagtgggaacacctggacaagaagaagttctacgtgtttggtgtggcaatgacaatgatgatccgtgtcagtgtctacccattcaccctcatccgcacccggttgcaagttcagaaggggaagagcctctaccatgggaccttcgatgccttcatcaagatcctgcgagcagatggtatcactggcctctaccgagggttcctggtcaataccttcaccctcatctctggccagtgttatgtcaccacttatgagctcacccggaagtttgtagctgactacagccagagtaacacagtcaaatcactggtggctggtggctcagcctcccttgtggcccagagcatcacagtgcccattgatgtagtctcccagcacctgatgatgcaacgcaagggtgagaaaatgggccgctttcaggtgcgggggaacccagagggacaaggggtagttgcctttggccaaaccaaggacatcatcaggcagatcctgcaggctgatggacttcgcggcttctatcgaggctatgtggcttcactgcttacctatatcccaaacagtgctgtctggtggcccttctatcacttctatgcagagcagctctcctacctgtgtcctaaggagtgccctcacattgtctttcaagctgtctcggggcccctggctgcagccactgcctccatcctcaccaatcccatggatgtcatacgaacccgtgtgcaggttgagggcaagaactccatcatcctgaccttcagacagctgatggcagaagaagggccttggggcctcatgaagggcctctcggccagaatcatctcagccacaccttccaccattgtcattgtggtgggctatgagagcctcaagaaactcagcctccgacctgagctggtggactcgagacactggtaaccagtggtggggagagaagcctgctgttttccacactaccgtgggtcaggggcagagtggagaggacagcaccctctccaggtgctcccaccacacacccagccctgccctgggccaagtggcctatctgggatagggatagagactttgaactgctcttgctgaagaggctccacgcctggatcccttgcccccactatttaaaattctcttctgagccgggctccctcactcagtccctgtatttgatactggcctaaagaccccaccccccaccctgccagcccttcttctggcttccccttccatctgtgtccctgagaccctgagaagagctgtacatagagcttgcttactaccactggttcttcctcttgggctttcagcccagactccaagcagctgctatcaaccctctctcccttcatctcttagccttgcttatttttattttgggaccgagctgcccactagatgactctgcttttccctgcatttggggctaaggtgccaggtacttatttgcacagggagcaggagcagcaaaaaatctctggttctccagagcactcgtcctctctttggaggggttattaggttgggagaaatgttgatacttttgttttgtgtgtgtgtgtgtgtgtgtgtgtgtgtgtgtgtgtgtgtgtgttttaacatctgtgaaccaggctattagtcctgctaaagcgccaatcctgctgtcagagctcacccccttcctaagacaggtagaaaaatgtaatgtagctttttccacaagccagttccctgtcccttcagtctcaggagccctaggagagtctaagctggggcatcccctggcccagaggactcccgtggtgggcacagttctaagtggatcaggctgtcttgggtgcactggacttggagcactaccttgagaagtcaggttgagaaagtagttgatctagaaggcaacaagtgggcatgtgttccccagcacattacccaggccagcagagccaaacctaggagagggcagtgggtagattctctgccccaggcagccatgacatacacataaataccccaatcactcagacttacggcaacaagtgttgtctcactatggtgatctctaagatccacatcactggatgcgtagtcatcccagtcatggtaccctgtggaggaatgctggaagaacataaagagcagttcagaaagtcacccaataccaggaccactgcatttaccagcctgatactgccaagattatctgatgctctcctcaggagctaggagaggagtgctccttcctccctaccgctactctccccaagcctgtgttgcaggtagagaggtgcagcaaatagagaaggcatgtcaaaccctgcatttctacctgagagtgtgacctggatgatcctccaaaccctattggtcccaccccctgggaaaggccatggtgccagtttgaaaggtgctagctacctgaagccttgatatttcttcatggctgccgcacattcttccaccttggccagaacaggttctgaaaaccgcttctctaccttcaccaccaccactgcccatcttgatctctttgagggttttcccatttcacttgatcttatttttgtttatcccttcctgcactttgtcaagagagtcctccagtttctatccaggaatgttcacatccaaagggttggacccacggatcattctgaatcttcctgcccctcctcactgcttaaccctgagaaccacaaatataatggaagcagttccccccaccctcaccccatctctttaagctcatcctagcaagacctctagagaccctagagactcgactttagccttccccgccatggcacagtggggaaggtgtcaatggggagtgtcacggacaggaggtaggatcctgccgctcgcgtcttagtgtttctccctcaagactttccttctgttttgttgtcttgtgcagtattttacagcccctcttgtgtttttctttatttctcgtacacacacgcagttttaagggtgatgtgtgtataattaaaaggacccttggcccatactttcctaattctttagggactgggattgggtttgactgaaatatgttttggtggggatgggacggtggacttccattctccctaaactggagttttggtcggtaatcaaaactaaaagaaacctctgggagactggaaacctgattggagcactgaggaacaagggaatgaaaaggcagactctctgaacgtttgatgaaatggactcttgtgaaaattaacagtgaatattcactgttgcactgtacgaagtctctgaaatgtaattaaaagtttttattgagcccccg

SEQ ID NO: 1977 - DNA, 271 bp, Homo Sapiens
  misc_feature (129)..(129): n is a, c, g, or t
  misc_feature (208)..(208): n is a, c, g, or t
tttgggtctcagctgccacctcccttccttggatgctgtcccaaccaccccattccaaaagaggttatcgcttgtaattctctatcactgggccaaatctgcctgttgcctagtgctcctagccctttntatattaattcatttcattatttcagccctgtctcctccactaggatataagctgcacgagagatgggctatgtctctnactcactgttgggcctcccaggacctcagcacagggcctgacacacagtaggtgggttaatag

SEQ ID NO: 1978 - DNA, 449 bp, Homo Sapiens
ccagggagcaaagtctgccacatcagtcgatgagtacttcctgcacgaggacatgaagctccattgtgtggaaagctgtttcgcgaacggtcggtaaaatccagaaagagggagaaggagtgagtaaggcagaaagcccagcccagaaaaccggcgtctggggatttcagcctccgctccccggtccccagcccggtggctctgtgagaagaagctcaactcggtgcacttgttcactctttcttcatgagaggaggagtcagtgttgcaacatttatgttccttgctggaggcaaaacagtgattttcttcagcatgcaaaacgtccagagcctgccagttttagaaggcgacggaggtagttgggggagctggaatcctgcgaagacctgaagaaacaactgattccccccagatcggttttgcatgattaggggcacatatctttc

SEQ ID NO: 1979 - DNA, 1800 bp, Homo Sapiens
aggcctgaaccttcgctccagccccagcacaagccggccagggcgcagggccaagtgttgcccgccattccccgggtaccccatgacctcccagctggggctggctcggactgaggagtcgtccctgcccgtcaccctctggggtctccagtgctgcggagctcagctggcttttgcagcggtaggggctgggaggagaagctgcagggagaccgcaggcgtgggacgttgtggggggtcaggcttgctctggggctgggaccccggggggagcagtggggttgacgccacagcgatgacttgggccacgggtctgggggctctcccgcggggcgattgggctctgtctttcgggattagggtctctcccacagggtttggggttctctctgcagatttgggggagtctctcccgcgggatgagggggggctctccgccgcacccgcctatgatggcccagaggacccgagctcgggtcactcccgtcgccctcggggctcggcgagggtgcaggaggcgggcgctgagcggtgacgcgactccgggcggctcccgggcgcgccgcatatatagcagcggcggcggtggcggcggccacaccgggcggcggacacgtggagggacccggcccgcgccttctgcccctgctgccggccgcgccatgcggtgagcgccccaggccgccagagcccacccgacccggcccgacgcctggacctgccgcccagacccgccaccgcacccggaccccgacgctccgaacccgggcgcagccgcagctcaaggtactactggcgccgggccgaccctgcgcccccgggaggcctccgttcggctttcctctgcccagggacggttctgccagggccctggccggccgccgcctctgctcctccccggagccccggcactccttgcctcggggcgcagcccactccgggttccgacccgcccgccctgtccttcccttccagatggcccgaggcagcgccctcctgctcgcctccctcctcctcgccgcggccctttctgcctctgcggggctctggtcgccggtaagtgcgggcgcgtctcctccgagcgaaggggacatcagaccggccgggcgtggagggcttcctggaggaggcagcctccgccctgcccgcggggatgggcgtggaaagtggaaaggcgggcgctgtcctggctgcgggcgtcgcgggaagggtccggggctccctgggattccccccgcgcgcttctccgagtgtatcaacagccccgggctataaccaggccgccgggagagctctgcgcttcgggtcagcgcctcgggaaagcgagaagctcgcccgttccgcagggcttagttagaatggagggctaggagccactggcgtggcctcagcgtcactaaagcaggtgcagtgcgctgagagtgcgcggctcaggccctcaagtgaagtatttcgtaaataaagtggttccattttcatgtcaaatatagccgacttaggggtaaacctggaatttcgcgagctatccaaaagcacatgcattgttctaagtcctctgccatgccgggaaagcctgggtgcacccattcagcataggctccagcacagccctggcatctgatccccttttctcccttcaaggccaaggaaaaacgaggctggaccctgaacagcgcgggctacctgctgggcccacgtaaggtactgacagcatggcctccccactcctgaccccacctgcccctcgctttgaaccctggctcctgcccctccgcctgcgctgggcagaccctctggcct

SEQ ID NO: 1980 - DNA, 604 bp, Homo Sapiens
gtaatagctgattctgatgtgtgcctggccttatatatttcagtagattagatcgtgccaatcacaatcctgggtggatttgtgtaagtcacttaacctctgtgtgcctaaacaagttgtgtttttttaaaaggagttatgtttgggcaaagcctttgtcttcaagcagaatgtcacagaaggcagctactttataagccccaatgggccatggagaccactgtcagaaatgggatattagtctagagagaaggtgatctattcccacatgtcatttctaatgttgagtttccatgactgaacaaagagaatatatttattcagcttcacttgcagatcactagtgaatgtgagatttagagctcattgagtatattgcttcaaggtacaaacccaggatgatgatgttgtcgccactgtctcttaatttgaataatagtttcctttaataggagtattagagataagaaagatttgacaatatactggaaatattggattcttggagaaaactgttcagtcacagatatattcttgcctagcagtgaagtgctttattttcagcatagcaataactattagactgttccatttgatctcaatt

SEQ ID NO: 1981 - DNA, 299 bp, Homo Sapiens
tcgagtttttttttttttttttttttttaaactatttaattcactcctttattctgggatgtatattacagataacacaactcacaaatataccatcagacattgaaaactaaggccattctgtgagttatttttaaaacttggtgttttgcacataatgatcttaaaaaaaaatgaattaccaaaaccaagattctcttctaaaatgaaaatttaatgcaggtacaggataactttagggctatatctaatctgaagcttatcaggtagcaaaccattttcgttttctacagcataat

SEQ ID NO: 1982 - DNA, 2448 bp, Homo Sapiens
gggttggttccaagtctttgctattgtgaatagtgccgcaataaacatacgtgtgcatgtgtctttatagcagcatgatttatagtcctttgggtatatacccagtaatgggatggctgggttctagatccctgaggaatcgccacattgacttgcacaatggttgaactagtttacagtcccaccaacagtgtaaaagtgttcctatttctccacatcctctccggcacctgttgtttcctgactttttaatgattgccattctaactggtgtgagatgatatctcattgtggttttgatttgcatttctctgatggccagtgatggtgagcattttttcatgtgttttttggctgcataaatgtcttcttttgagaagtgtctgttcatgatttttttttttagacaaagtattagatcagatatttttggggaaaaatgctttgtgattgcttgttttgaatggtgagcattgtattttgttttaagttgttttctggttgttattacagctatgaagtcttacactccatatttcattctcctgtggagtgctgttgggatagcgaaggctgccaaaatcatcatcgtgccgccaattatgtttgaaagccatatgtacattttcaagacgctagcctcagccttgcacgagagaggccaccatacagtgttcctcctctctgaaggcagagacatcgccccatctaatcattacagcctccagcgctacccagggatctttaacagtaccacctcagatgctttcctacagtccaagatgcggaatattttctctgggagattgacagcaatcgaactgtttgacatactggatcactatactaagaactgtgacctgatggttggcaaccatgccctgatccagggtctgaagaaagaaaaatttgacctgctgctggtggaccctaatgatatgtgtggatttgtgatagctcatcttttaggggttaaatatgctgtattttcaactggcctttggtatcctgctgaagtgggtgctcctgctccattagcatacgtcccagagtttaactcactcctcacagaccgcatgaacttgctgcaaaggatgaaaaataccggtgtttacctcatttccagattaggggtcagctttctggttcttcccaaatatgaaaggataatgcagaagtacaacctgctgccggagaagtccatgtatgatttggttcatgggtccagcctgtggatgctgtgtactgacgtagcactggaattcccaagacccactctgcctaatgttgtttatgtaggaggaatcctaaccaaaccagccagcccactaccagaagatctccaaagatgggtaaatggtgctaatgaacatggctttgtcttggtgtcttttggagctggtgtcaagtatctgtcagaagacattgctaacaaactggcaggagctctggggagattgcctcaaaaagtgatttggaggttttctggacccaaaccaaagaatctaggaaacaacactaaactcatagaatggttaccacaaaatgacctgcttgggcattcaaagattaaagccttcctgagccatggtggtttgaacagtatttttgaaactatgtatcatggtgtgcctgtagtgggaattccactctttggagaccattatgatactatgaccagagtacaggcaaaaggcatggggatattgctagaatggaagacagttactgaaaaagagctctatgaagcactagtgaaggttatcaataatcccagctaccgtcagagggctcagaagctttcggaaattcacaaggatcaacctggtcaccctgtcaatcgaactatctattggatagattatattattcgtcacaatggagcccatcacctacgtgccgctgtccatcagatctccttttgtcagtattttttactggatattgcctttgtgcttttgcttggtgctgccttgttatactttctcttgtcttgggtgacaaaatttatctacagaaaaatcaaaagtctgtggtctagaaataagcatagcacagttaatggacattaccacaatggaatcctcaatggcaagtacaaaagaaatggccatattaaacatgaaaagaaagtgaaatgagccaacagcccaggtgatagaaataaattggttcactcattgaatttttattgctattatttagtctaacagctactaaaagtaaaacatcagtaaacaattctaacatgcccttatgagactactaatgaaattctgtggaattaagatggctgtaaaaagcacaaacctaaaatgcagaaatgtattttattcaaatactgatgtagagagttttggcactgaaccttttagaagccttaattatttaaatcaattcagtgactgtgtcagaccttagttttaaatcttgatatgtgcgtgtccc

SEQ ID NO: 1983 - DNA, 373 bp, Homo Sapiens
ctgatgacaagtacggtgagatatacacagaggtcttctgaggagattctaagaaagcatttacttttctggtaaaagggagtcagacgcatcttgtgtacatttttatctgctatttcctactttgaatgtgtatctgctccctggaggtacagcagacatcttgtgaccatgaggtgacaaaccagcatgctgtagaggacagagtggaaagagaaaaagtctacgtccttgatagcaccaatgagccactgtcccaaccctatactgcctaattctaggctataaataggataggccttttttttttttttttgggttaaacctattttaaatttttggttaacctatttaagggcccccggaaagcaaa

SEQ ID NO: 1984 - DNA, 1067 bp, Homo Sapiens
cgcgcccctggccgagccgctcgcgccccgagacgtcttcatcgctgtcaagaccaccaaaaagttccaccgcgcgcgcctcgacctgctgctggagacctggatctcgcgccacaaggagatgacgttcatcttcactgacggggaagatgaggccctggccaggcacacgggcaacgtggtcatcacaaactgctcggccgcccacagccgccaggcgctgtcctgcaagatggccgtggagtatgaccgcttcatcgagtccggcaggaagtggttctgccacgtggacgatgacaactacgtcaacctgcgggccctgctgcggctgctggccagctacccgcacacgcgggacgtctacgtcggcaagcccagcctggacaggcccatccaggccatggagcgggtcagcgagaacaaggtgcgtcctgtccacttctggtttgccacgggcggcgctggcttctgcatcagccgtgggctggctctgaagatgagcccgtgggccagcgggggtcacttcatgaatacggctgagcggatccggctgcctgatgactgcaccatcggctacatcgtggaggccctgctgggtgtgcccctcatccgcagcggcctcttccactcccacctggagaacctgcagcaggtgcccacctcggagctccacgagcaggtgacgctgagctacggtatgtttgaaaacaagcggaacgccgtccacgtgaaggggcccttctcggtggaggccgacccatccaggtggggaaactgaggcacggagcagctgatgcccaaggtccagcagccatgctggtgggctggggaggcgctcagactccaagccaggcaggccgtgggtccggccgccccacagctggtaatgctgcacctccctctcctgtgatgtggccccaggccccgaccccgctcaggggtggtgggaagagtcctggagagcaggagcagtgccggagcccccactgcagctggtcccagcccctgcagagatccagacgcttgttttttaaatacagcagctctgcggtgcttttccttcctca

SEQ ID NO: 1985 - DNA, 508 bp, Homo Sapiens
  misc_feature (15)..(17): n is a, c, g, or t
  misc_feature (32)..(32): n is a, c, g, or t
  misc_feature (349)..(349): n is a, c, g, or t
  misc_feature (375)..(375): n is a, c, g, or t
  misc_feature (385)..(385): n is a, c, g, or t
  misc_feature (399)..(399): n is a, c, g, or t
  misc_feature (405)..(405): n is a, c, g, or t
  misc_feature (412)..(412): n is a, c, g, or t
  misc_feature (422)..(422): n is a, c, g, or t
  misc_feature (432)..(432): n is a, c, g, or t
  misc_feature (461)..(461): n is a, c, g, or t
  misc_feature (469)..(469): n is a, c, g, or t
  misc_feature (485)..(485): n is a, c, g, or t
gagtctcactcttannncccaggagtgcagtngcccatctcggctcactgcaacctctgcctcccaggctcaagcaattctcctgcctcagcctcccaagtagctgggattacaggcgcttgctactacgcccggctagtttttatatttttagtagagacggggtttcatcatgttggccaggctggtctcaaactcctggccttggctgatctgcctgcctcagcgtcccaaagtgctgggattacaggcatgaggcaccacgcccagctggaagtttttttggttgattcagcctctgggtctaagcaaagatatttgagttggttgccatccccagatgaagttnagaattatctggcagcactcattttncagccctggngccgcagccgttgntgttgnggcaganagtttaaaanaagattagtnaagtacttacatttcatttcattccaagntaagttancagacaaggctattangaaggtcattgtgacctagtctg

SEQ ID NO: 1986 - DNA, 511 bp, Homo Sapiens
tggcgaattcggcacgagggggcggccgacgacgttcgtcatttagtgcgggagggatcctgattcgcgcggccgaaccctccggtgtcccgacccaggctaagcttgagcatggctgagcaggagcccacagccgagcagctggcccagattgcagcggagaacgaggaggatgagcactcggtcaactacaagcccccggcccagaagagcatccaggagatccaggagctggacaaggacgacgagagcctgcgaaagtacaaagaggccctgctgggccgcgtggccgtttccgcagaccccaacgtactcaacgacgtggtgactggcctgaccctggtgtgcagctcggccccgggccccctggagctggacctgacgggcgacctgcagagcttcaagaagcagtcgctcgtgctgaaggagggtgtggagtaccggataaaaatctctttccgggttaaccgagagatagtgtccggcatgaagtacatccagcatacgtaca

SEQ ID NO: 1987 - DNA, 4654 bp, Homo Sapiens
gcagcgtagcgggctggcggtgacttacaccgggactccagagggagagaggaagcgctgcaggccacttgcattgcgtcttccaggctgcgtggacccggcgccccggcgtgtgcggttgtgggggagctcgccgtggcctcccctccctctggctttagcttcctttggggttggcgcaggtgggccaggcagcgcaccgcagatctccccgttcccacgaaggctggctcgctgtctctctccgagcgggagggaccatcctaaaaatatgtaaatatccaagcgctggctccaggctggggcagctgccaaggtccccgcgccgccgccgggtgttttacatgaaaatgagaagcctgatgggaaccgcgttctaacttaaggcagcctggtgattagcatgagactgggcggctgtcctgcttcctgcccttcaatagccgttccgcgcgctcgcgccggagcagcgctgccgccgcgcgggggtcgatcgcaggctcggcgtccttggcagccatggctccggcgccgcctcggccagtaagtaggagcatgcatgtgtagggggcacatgcgtgtcggcgcacccacccagccatccacccgcgcgcacgcacagcgcccggagcctcggcaaggggaagattgacgaggcgctgcagtcgcggggacgacgcgggctcttcctggattccgcaggagcccgcccgccgcagctgctgtctgcagagcctgctcggatcctgtgcacacgcgccccccgctcgagcctctgtgatgaagactgtctcccggggactgcagcggaggcagagccagccagcgccggggactgcgggccgtgcggctgataggcccgcggggacacgactcggacactgtcatccccacgcctcgcgctgagctgcccggcgcggagggtctgccgccgcccctccggcctcccgcacgcccgatcccgggtcagccccggaggcctcggctgcctcatttgtttgggtcttttgtgccgtggctcccagttggccaagcactcctgcgctgaatcgggccattgtctgcgctcccattgccttcacgctgcaagtctcggcgcccccaccccgcccgccccctccccgcctcctcccggccggggagcctcctaacgtgcctttccccccaggaatctggaagctataagccgggcggattgcaaatgaagtgtaatgcattgtgggacgtgtgtaaaatcggagccttcgccgtgggggtgtgggggggcgtggggagggccggacccgccgctggcggtgtagacgccgacgaggaggggctgggaaaatgtgcgcagagtccgcccgggtcgtgcccgccgtagacggatgaaggagcgcgctgcgccccggcgctgaggccccgaggatcggggcggcaggtcgccctccccaccatgaagaagacccggagcacaaccttgcggcgagcctggcctagctcggatttctcggaccgggcctcggaccgcatgaggtcccgcagcgagaaggactaccgcctgcacaagcgtttccccgcggccttcgcgccccaggcttcgcggggctacatgacatcaggtgatgtatcacccatcagtatgtctcccatcagtcagtctcagtttattccactcggggagatcctctgcttggccatctcagcaatgaactcggcaagaaagcctgtcacccaagaagcactgatggagcacctgaccacgtgcttcccaggtgttccaacgccaagccaagaaattctgcggcacacgctgaacacgctggtacgggagaggaagatctacccaactccagatggctacttcatcgtgaccccacagacttatttcataactccttccctcataagaactaacagtaaatggtaccatttggacgagaggatacctgaccggtctcagtgcacctctccgcaacccgggaccatcacgccctctgcctcaggctgtgtcagggaaaggacattgccccgaaaccactgcgactcttgccactgctgcagagaagacgtgcacagcacgcatgcacccaccctgcaaaggaagtctgccaaggactgcaaagacccttactgtcccccttctctgtgccaggtgccacccactgaaaagagcaaaagtactgtaaatttttcctataagacagaaactctctcaaaacctaaagatagtgaaaagcagtcaaaaaaattcgggctaaagttattccggttaagttttaaaaaagacaagaccaaacagctggccaatttttctgcccagtttcctcctgaagagtggcccctgcgagacgaggacacgccagctacgatccctcgggaagtagagatggaaatcattaggcgcattaacccagacctgaccgtggaaaatgtcatgcggcacaccgcgctcatgaagaaactggaagaagaaaaggcccagaggagtaaagccgggtcctctgcccatcacagcggaaggagtaaaaagagtaggactcatcggaagtcccatggaaagtctcggtctcacagcaagacacgggtgtctaaaggagacccttccgacggttcacatctggatatcccagctgaaagagagtatgacttttgtgatcctcttaccagggtgcccagggagggctgcttcatcattgaacacaaaggagataacttcatcatgcacagcaacacaaacgtgctcgagtcccacttccccatgacaccagaatgggatgtgtctggtgaattggctaaaaggagaactgagatgccttttcctgaaccttctaggggaagctcccactcaaaagtgcaccgaagccacagccatacacaggaccggaggtccaggaatgagagatccaacaaagccaaggagagatccaggtcgatggataactccaaaggccctctgggtgcttcttctctagggacgccggaagaccttgctgaaggctgcagccaagacgaccagacccccagccaatcctacattgacgacagtactttaaggcctgcacagaccgttagtctccaaagggctcacatttcgtccacaagctataaagaggtgtgtattccagagatagtcagtggcagcaaggaaccgtccagcgcttgcagccttttggagccaggaaaaccacccgagagtttgccatcctatggcgaactcaactcttgtccaacaaaaacagccacagatgactatttccagtgcaacacctctagtgagacggtgctcacggcaccatcacctctgggaaagaataaggaggaccatgacactctgactttggcagaaggggtgaaaaagctctccccttctgataggcaggtcccccactcctccagggagcctgtggggcacaaggaggagtcaccaaaagggccgggtgggggccccgctgcttcgggaggagtggctgaagggatcgccaacggacgcctcgtccagcaccatggtgccgagcccagcagcttggacaagaggaaagagatatttagcaaagacacactgttcaaacctcttcacagcaccttgtctgtaaacagctatcacaagtcgagcctgtccctcctcaaatctcacccgaagacacctgctgacacattgccaggccgatgtgagaaactggaaccgtccctggggacctcggcggcacaagccatgcctgcttcccagcgtcagcaggagtcaggagggaaccaggaagcctcttttgactattacaacgtctctgatgatgacgactctgaggaaggggcaaacaagaacacagaggaggagaaaaatagagaggacgtaggcaccatgcagtggctcctcgagcgggagaaggaaagagacttgcagaggaaatttgaaaagaacctcacccttcttgctccaaaagaaaccgacagcagcagcaaccagagagccacccattcagcccggctcgacagcatggacagcagcagcatcacagtggacagtggattcaactccccacgtactcgggagagcctggcttccaacacatcaagcattgttgaaagtaaccgtcgtcagaaccccgctttgagcccggcccatggtggagctggtccagccttcaacttccgagcgagcgcggagcccccgacaaatgaagctgagaagctacagaaaccttccaactgcttgcaagcttctgttactagcgtgtgattgtccttctgcctcagatcttctgtctcattcgatacagcaaagtttacgacactgggactgatgtttacatctttggaaagacaagcatctcaaccacagtttttgtgtttacttaaactgtgctgctaagtagggctagggcaaaaaaacaaaaaatctttatttcagagtattgcttttcacatttatggctctgtagcaactgagtaacagtaggggtgatatgtatacttttgcttcactaattgtatctgagcacacataggaaagtctagacactgtaagtgtaatacgcattttcaatgtcatgcagttgccaattccattttaaaatgccacagatgcgtgttgctcccagtctgtggttaaacggtgccacagaactgatccttgacacttccaaaaaaaaaaaaacaaaacaaaacaaaaaaaatt

SEQ ID NO: 1988 - DNA, 517 bp, Homo Sapiens
acagtcagcagtgacatttgggaaaggaggcatacgtatttccacttctacacactcttcctgtgtgtgattagagggatactatattgtgaaggggctatagcctcactgtcctgtagaacagctgccaaagccacagtgctctttctcacagctgtaatgcattacttcagaggcagctttctctttgtctggagtttgtaaatgatctggtttccttcattccaggcatagagctgcttatctctggggttgtaatggatcatggagtgacttcttggtctcttggggaagaacaagttgggcaagtcctcctcactgatagtgcccagtggatcatagatgcaggtgatgcgatgagggccctggcccccagtactgtagaccacatagagaaccccacacaagaggaatgaggcttcagcatcctggcttctgcatggggtatcccatgaatgctccactcccagtgtgcccggctcaatctttgtgagaaccaaatggctatgggtgcctg

SEQ ID NO: 1989 - DNA, 1319 bp, Homo Sapiens
atacaatgaaagcactagaaataattattatacttataaccattgtatttttacatgtttaaaatatagccataattagcctactcaaatccaagtgtaaaagtaaaatgatttgctttcgttttgttttccttgcttaggggatcatggacattgaagcatatcttgaaagaattggctataagaagtctaggaacaaattggacttggaaacattaactgacattcttcaacaccagatccgagctgttccctttgagaaccttaacatccattgtggggatgccatggacttaggcttagaggccatttttgatcaagttgtgagaagaaatcggggtggatggtgtctccaggtcaatcatcttctgtactgggctctgaccactattggttttgagaccacgatgttgggagggtatgtttacagcactccagccaaaaaatacagcactggcatgattcaccttctcctgcaggtgaccattgatggcaccaactacattgtcgatgctgggtttggacgctcataccagatgtggcagcctctggagttaatttctgggaaggatcagcctcaggtgccttgtgtcttccgtttgacggaagagaatggattctggtatctagaccaaatcagaacccaacagtacattccaaatgaagaatttcttcattctgatctcctagaagacagcaaataccgaaaaatctactcctttactcttaagcctcgaacaattgaagattttgagtctatgaatacatacctgcagacatctccatcatctgtgtttactagtaaatcattttgttccttgcagaccccagatggggttcactgtttggtgggcttcaccctcacccataggagattcaattataaggacaatacagatctaatagagttcaagactctgagtgaggaagaaatagaaaaagtgctgaaaaatatatttaatatttccttgcagagaaagcttgtgcccaaacatggtgatagattttttactatttagaataaggagtgaaacaatcttgtctatttgtcatccagctcaccagttatcaactgacgacctatcatgtatcttctgtacccttaccttattttgaagaaatcctagacatcaaatcatttcacctataaaaatgtcatcatatataattaaacagctttttaaagaaacataaccacaaaccttttcaaataataataataataataataataaatgtcttttaaagaggcctgtggttatcttggaaattggtgatttatgctagaaagcttttaatgttggtttattgttgaattc

SEQ ID NO: 1990 - DNA, 159 bp, Homo Sapiens
gtggtctgaggagtgatgtggagttaaggcgccatcctcaccggtgactggtgcggcacctagcatgtttgacaggcggggactgcgaggcacgctgctcgggtgttggggacaacattgaccaacgctttattttccaggtggcagtgctccttttgg

SEQ ID NO: 1991 - DNA, 456 bp, Homo Sapiens
actaagtgataagttagccaagaccacttatttttaacagcataaaaccacctatcaacctctccttgaccccaggagtcatcaagcaaatactcggaaagataggggtgaagagtctaaacttcatggtgatagatgtgtcatgaagtgaattaaaccacaaaggcaattaagtcataaaagcaacagcagtgatagtaactagacagaaggctcagaggatcatccctgaaaagatttcattaactaaaccacaaagtcctgctgaaaaacatatcagcaatctagttaaaaatgggtcacactatttatagagtcaatcaccaaatcacatattctctaagttaaaaaaaaaaaagtctgaaaactttattgagcaagcatgttaaacagtactacttcatgcccaccaaaggaaatagtctttaaattctggcccaaacttgacagaaattt

SEQ ID NO: 1992 - DNA, 2452 bp, Homo Sapiens
ggctgagtggtttgctccttcccctctctctgggaggctgagcaggggtgcctgggttgctcaggccatgggagccacacctgttattgctgcctctgatttgtgtgacactgagaagcccacaggcctgtccctccaactcggtggaccctctctgtgtgcatttggtgtgtgagccagctctgagaagggttcagaagccactggaggcatctggggacctcagcttccatgccatctctgcctcactcccacagggtaatgttggactcggtgacacacagcaccttcctgcctaatgcatccttctgcgatcccctgatgtcgtggactgatctgttcagcaatgaagagtactaccctgcctttgagcatcagacagcctgtgactcatactggacatcagtccaccctgaatactggactaagcgccatgtgtgggagtggctccagttctgctgcgaccagtacaagttggacaccaattgcatctccttctgcaacttcaacatcagtggcctgcagctgtgcagcatgacacaggaggagttcgtcgaggcagctggcctctgcggcgagtacctgtacttcatcctccagaacatccgcacacaaggttactccttttttaatgacgctgaagaaagcaaggccaccatcaaagactatgctgattccaactgcttgaaaacaagtggcatcaaaagtcaagactgtcacagtcatagtagaacaagcctccaaagttctcatctatgggaatttgtacgagacctgcttctatctcctgaagaaaactgtggcattctggaatgggaagatagggaacaaggaatttttcgggtggttaaatcggaagccctggcaaagatgtggggacaaaggaagaaaaatgacagaatgacgtatgaaaagttgagcagagccctgagatactactataaaacaggaattttggagcgggttgaccgaaggttaatgtacaaatttggaaaaaatgcacacgggtggcaggaagacaagctatgatctgctccaggcatcaagctcattttatggatttctgtcttttaaaacaatcagattgcaatagacattcgaaaggcttcattttcttctctttttttttaacctgcaaacatgctgataaaatttctccacatctcagcttacatttggattcagagttgttgtctacggagggtgagagcagaaactcttaagaaatcctttcttctccctaaggggatgaggggatgatcttttgtggtgtcttgatcaaactttattttcctagagttgtggaatgacaacagcccatgccattgatgctgatcagagaaaaactattcaattctgccattagagacacatccaatgctcccatcccaaaggttcaaaagttttcaaataactgtggcagctcaccaaaggtgggggaaagcatgattagtttgcaggttatggtaggagagggtgagatataagacatacatactttagattttaaattattaaagtcaaaaatccatagaaaagtatcccttttttttttgagacgggttctcactatgttgcccagggctggtcttgaactcctatgctcaagtgatcctcccacctcggcctcccaaagtactgtgattacaagcgtgagccacggcacctgggcagaaaagtatcttaattaatgaaagagctaagccatcaagctgggacttaattggatttaacataggttcacagaaagtttcctaaccagagcatctttttgaccactcagcaaaacttccacagacatccttctggacttaaacacttaacattaaccacattattaattgttgctgagtttattcccccttctaactgatggctggcatctgatatgcagagttagtcaacagacactggcatcaattacaaaatcactgctgtttctgtgattcaagctgtcaacacaataaaatcgaaattcattgattccatctctggtccagatgttaaacgtttataaaaccggaaatgtcctaacaactctgtaatggcaaattaaattgtgtgtcttttttgttttgtctttctacctgatgtgtattcaagcgctataacacgtatttccttgacaaaaatagtgacagtgaattcacactaataaatgttcataggttaaagtctgcactgacattttctcatcaatcactggtatgtaagttatcagtgactgacagctaggtggactgcccctaggacttctgtttcaccagagcaggaatcaagtggtgaggcactgaatcgctgtacaggctgaagacctccttattagagttgaacttcaaagtaacttgttttaaaaaatgtgaattactgtaaaataatctattttggattcatgtgttttccaggtggatatagtttgtaaacaatgtgaataaagtatttaacatgcgaa

SEQ ID NO: 1993 - DNA, 350 bp, Homo Sapiens
  misc_feature (320)..(320): n is a, c, g, or t
  misc_feature (324)..(324): n is a, c, g, or t
ggtttaatgaggaagctggggctataaatatgtgtgtatatatgtatatgtatgtttgtacaaatctccatgacattttccaagttttgcgacaagtcactggccggctcaggacgtgtttgtgtctctcttttcttagctcagtgagtactgggtatgtgtcacattgccaaatcccggatcacaagtctccatgaactgctggtgagctaggataataaaacccctgcatcaccattccagaagcttcacaagactgcatatataaggggctggctgtagctgcagctgaaaggagctgtccagccagctgccccttnacantcaccttgccaccatggtcattgcat

SEQ ID NO: 1994 - DNA, 500 bp, Homo Sapiens
ggtctaataggacagccctgcaagacaatcaaccagagcctccaggagcttctacctatggcttattcacaactgggcaagaaaacatcattggtaagaactgctgagtgtgcccttagaaagccctagtagctccagctgtgactatatcaactgtgtgccaagtgtgactttgtacagttttatgtttccactctcctgtatgtgtagccactcgatgcctaacctaccttccacaagccagccccgcatccctgctcccgcagtgtaagtgcagagcctgcctcactggtaagggaaaaccttggcttgggaggccagccctggcccttgaaggggttggctgtgcccagcccacctggctgcagtgggcagctcatgtctgtatctccaaagtgatgtttgtttgcaaaacaccggctgaactgagctggtgttgccaactcttggcagcactgggccaaaccgaccacataccatgagctcccaaatggcgtgtg

SEQ ID NO: 1995 - DNA, 586 bp, Homo Sapiens
gcatgatcctgaagcccaacttccacaaggactggcagtggtgtggccatgtggctcagccagcccatggggcagacctgcagaagcaaggtggccagcaaaagcaggctgcatggcccactgatatgggcccatccacccatagtaaggtgccccatgctgaggcatcactacaaagcacaagctggcaggggcctcagcttggaggagttaagggtggctggcatttacaagaaggtggcccagaccattggcatctctgaggatgcaaggaggaggaaccagtccacccaggccctgcaggccaaggtgcagaggctgaaggaggaccgctcctcactcatcctcttccccaggaagcccttggcccccaagaagggagacagttctgctgaagaactcgaactggatactcagctgacaggaccagaaatgcccatcggcaatgtctacaaggagaaagccagagtcatcactgagtaggaggaaaacttccaggccttgttagtctctgtatggcccatgcaaatgcccagctcttcggcatataggcacaaagagccaaggaagctgtagaagaggacgc

SEQ ID NO: 1996 - DNA, 1175 bp, Homo Sapiens
gggcggcgcacgagcaggagcgcccacggagctggacccccagagccgcgcgcccgcgcagcagttccaggaaggatgttacctttgacgatgacagtgttaatcctgctgctgctccccacgggtcaggctgccccaaaggatggagtcacaaggccagactctgaagtgcagcatcagctcctgcccaaccccttccagccaggccaggagcagctcggacttctgcagagctacctaaagggactaggaaggacagaagtgcaactggagcatctgagccgggagcaggttctcctctacctctttgccctccatgactatgaccagagtggacagctggatggcctggagctgctgtccatgttgacagctgctctggcccctggagctgccaactctcctaccaccaacccggtgatattgatagtggacaaagtgctcgagacgcaggacctgaatggggatgggctcatgacccctgctgagctcatcaacttcccgggagtagccctcaggcacgtggagcccggagagccccttgctccatctcctcaggagccacaagctgttggaaggcagtccctattagctaaaagcccattaagacaagaaacacaggaagcccctggtcccagagaagaagcaaagggccaggtagaggccagaagggagtctttggatcctgtccaggagcctgggggccaggcagaggctgatggagatgttccagggcccagaggggaagctgagggccaggcagaggctaaaggagatgcccctgggcccagaggggaagctgagggccaggcagaggctaaaggagatgcccctgggcccagaggggaagctgggggccaggcagaggccagggagaatggagaggaggccaaggaacttccaggggaaacactggagtctaagaacacccaaaatgactttgaggtgcacattgttcaagtggagaatgatgagatctagatcttaagatacaggtacccacagaagtctcagtgccagaacataagccctgaagtgggcaggggaaatgtacgctgggacaaggaccatctctgtgccccctgtctggtcccagtaggtatcaggtctttctatgcagctcagggagaccctaagttaaggggcagattaccaataaagaactgaatgaattc

SEQ ID NO: 1997 - DNA, 266 bp, Homo Sapiens
  misc_feature (45)..(45): n is a, c, g, or t
  misc_feature (86)..(86): n is a, c, g, or t
  misc_feature (88)..(88): n is a, c, g, or t
  misc_feature (190)..(190): n is a, c, g, or t
tttttcgtcacactgcagggttgaaaccagaagttagttgctttnagaacataaggtcttgtgcaagaggagccctcgctcttctntnccttctcggcaccacctggttctttggggttctccatgttgtgcacgcatcagtggttacagcttacctcttcacagtcagcaatgctttccaggggatgtncattttttaattcctgtgtgttttatctagaaagattcaagaagaatattacagattgtccaaaaatgtcccctgt

SEQ ID NO: 1998 - DNA, 276 bp, Homo Sapiens
cattgtaaagtgttaactatgaaattaaaaataatcccttctattactgttcaaattagtttcagctttccctcaagcttataaggattctaatccttaggagtccaaccctttttggaaaagtatacaatgcaggatattactaataatctatgccatgcaataaaagttaaccccttgaaaatgaaagcatgtcagttctagcaactgcagtggcttatttctaataaaacataaaactatgcttgaatttatttctgtttaaggaaataaaca

SEQ ID NO: 1999 - DNA, 567 bp, Homo Sapiens
gggtacggctgcgagaagacgacagaagggggggaaatttaaatcgcgccggccggctgcacgagccacacggtctttgagctgagtcgaggtggaccctttgaacgcagtcgccctacagccgctgattccccccgcatcgcctcccgtggaagcccaggcccgcttcgcagctttctccctttgtctcataaccatgtccaccaacgagaatgctaatacaccagctgcccgtcttcacagattcaagaacaagggaaaagacagtacagaaatgaggcgtcgcagaatagaggtcaatgtggagctgaggaaagctaagaaggatgaccagatgctgaagaggagaaatgtaagctcatttcctgatgatgctacttctccgctgcaggaaaaccgcaacaaccagggcactgtaattggtctgttgatgacattgtcaaaggcataaatagcagcaatgtggaaaatcagctccaagctactcaagctgccagggaaactactttccagagaaaaacagccccccatagacaacataatccggctggtttgattccgaatttg

SEQ ID NO: 2000 - DNA, 580 bp, Homo Sapiens
ttattcaagattttgaaattcttagcctgggagtgctggagagaacctgatgctttctccagaatgaagagtcccaatttgtatatcagtgttaagaagaaaacaaaacaaacacataggtgagattttcgtggactattttaaaaatgtgtcattaatataaaaaatttatattagcagtatttaatcattctcacctgtaaagaataagaaaaacagaaggtaaatattcttacagagaatagcagagctttaagattcattttcattttaagtccattttattttgccagtgtattaatgtttagaagtctgttttactaatgttatttattaattttttttcatttccatacacagttagttaactaaagagctttttcaagcacccatgtctgtaaaaaaatatttttaaataaagtttcttttgttgtagcagaaaaaaaaaaaaaaaaaaaaaaaaaactcgagggggggcccggtacccaattcgccctatagtgagtcgtattacaattcactggccgtcgttttacaacgtcgtgactgggaaaaccctggcgttacccaacttaatcgc

SEQ ID NO: 2001 - DNA, 638 bp, Homo Sapiens
ctagtttggaagcagttttaatgaagatggaaatgtttatcaactcaacacaggtacccccaaaatacaaatcaaaatatcatcttcagctgcatagcaaatatgatttaagaatttaacatcattatttgatcacaagcgtaaatatgtcaccataaataaatgtaaattcattgtacaaaaattcccaacaactcttaatacaaatatggtacatttgacagtttctgaaacagattatttttaaaactttttaaaacctaagctttatttttttcctggttattagacacacacaaaaaaaataaaaagaggctggggcagtaatgccaaggaggaaagaatattaaactcattgggtgtttggaaatcagtgccactggcaagccagggaaatggaatctttctgctgaaagggaagacctcagtctactgggatcaagtctcctgaaggtaatgtgactcggcccagagggtcaaatttagggatatgaatgtggggtgagagaggtgggtttttgaaataaaaatcccctcaaataaattattcaattctcctcaaaacctggtcaaggattttgaagggactttacccctttttcagtctccgagggggccggttcccatccttaggacac

SEQ ID NO: 2002 - DNA, 298 bp, Homo Sapiens
  misc_feature (230)..(230): n is a, c, g, or t
cttggcacccctcctggagttagaaactaaggccggggcccgcggcgctcggcgcgcaggccgcccggcttcctgcgtccatttccgcgtgctttcaaagaagacagagagaggcactgggttgggcttcatttttttcctccccatccccagtttctttctctttttaaaaataataattatcccaataattaaagccaattcccccctaccaagtgaagctacaactntgcgacataaattttggggtctcgaaccatgtcgctgaccaacacaaagaccggggtttcggtcaagg

SEQ ID NO: 2003 - DNA, 678 bp, Homo Sapiens
aggctggagaactagtcctcgactcacgtgcaaggatgatgctgaaaggaatagcaaggcttatctctaggatccataagttggaccctgggcgttttttacacatggggacccaggctcgccaaagcattgctgctcacctagataaccaggttccagttgagagtccgagagctatttcccgcaccaatgagaatgacccggccaagcatggggatcagcacgagggtcagcactacaacatctccccccaggatttggagactgtatttccccatggccttcctcctcgcttgtgatgcaggtgaagacattcagtgaagcttgcctgatggtaaggaaaccagccctagaacttctgcattacctgaaaaacaccagttttgcttatccagctatacgatatcttctgtatggagagaagggaacaggaaaaaccctaagtcttgccatgttattcatttctgtgcaaaacaggactggctgatactacatattccagatgctcatctttgggtgaaaaatgtcgggatcttctgcagtccagctacaacaaacagcgctttgatcaacctttagaggcttcaacctggctgaagaatttcaaactacaaatgagcgcctcctgaaccagataaaagtccagagagttgtctggaataagagagaagcctggaa

SEQ ID NO: 2004 - DNA, 350 bp, Homo Sapiens
  misc_feature (88)..(88): n is a, c, g, or t
  misc_feature (323)..(324): n is a, c, g, or t
  misc_feature (330)..(330): n is a, c, g, or t
  misc_feature (333)..(334): n is a, c, g, or t
  misc_feature (336)..(336): n is a, c, g, or t
  misc_feature (339)..(339): n is a, c, g, or t
  misc_feature (344)..(345): n is a, c, g, or t
  misc_feature (348)..(348): n is a, c, g, or t
gaaaacgctccctgtcacaaaggggggaacacatgggcgccggctgccggggcggcgatcttagggaactagggtcacctggagatcncgccaccgtctctgcccgctcgactcctccgcccgggccgctcggccggtccagccgcggccggcgcctggctgtgaggtggattcccggcccagtctgaccatctccctccagtttttccacttcgttcggaccttctcataactatgtccaccctctacgtctcccctcacccagatgccttccccagcctccgagccctcatagccgctcgctatggggaggctggggaggnncccggncgnngnggngcccnnccncg

SEQ ID NO: 2005 - DNA, 5718 bp, Homo Sapiens
ggccgagcgcgcggcctggcgcacgatacgccgagccggtctttgagcgctaacgtctttctgtctccccgcggtggtgatgacggtgaaaactgaggctgctaagggcaccctcacttactccaggatgaggggcatggtggcaattctcatcggtgagtgcaggaatcttgcgggacttctgctccaggagacgcaaagtggaaattttttgaaagtcccggatcagattagtgtgtgtggcgccgggacgttatgaagccgtctaaacgtttctttatttctcctccttctatccacagctttcatgaagcagaggaggatgggtctgaacgactttattcagaagattgccaataactcctatgcatgcaaacagtaagttcagaccggattgaggaaataactagtatagtttgaatttgccagcggtaaacattctcatcacggcgtttatcgggaaggcgaagacttcttctggggtggggatctcatttctccttaaattctaatatatttgacacattttaaacattaaagttaatttgctgatttggcttgaactggagatgtaagataaatggttcgtgttggccgaattcacgctttctccatgagcaacaatccttatttctgtatttaatggggtttattattttctttaactgactaatgtattggggtattttcagtttaaacagtgaattatcgggtagaagtcggtagagccagaaactcacttttgatgttggtgtgccccctagtggcgagctggattctaaatcgtgccctttattccctgcagccctgaagttcagtccatcttgaagatctcccaacctcaggagcctgagcttatgaatgccaacccttctcctccagtaagtttttgtatgtgccgtgcatctgtggagaactgtaagggagtcagttagtattcctacattaatggattaaaatagcatttctagaaattagtatcaaggcaggaatgcttcattatgcataacagtgatataaatatttaagtattgagtcagagtattatttttatttttttcctgggcatattttacctcaagtggttattttaaaaggcatatttcataaaaaggttttatctgtctgaaacaacatgactgtgtgcagtttccatactcatttgaaatgtgatgaaatgtagttttgaatgtttatagatgtatggtcatttgcatcagtcatttgtagatgtaacattttctacatcgtttatgttatagatgtcttcctttgaagcaatggtattaaaagaaattctttttttttttttctagccaagtccttctcagcaaatcaaccttggcccgtcgtccaatcctcatgctaaaccatctgactttcacttcttgaaagtgatcggaaagggcagttttggaaaggtaatttcaaatctgaagatcttttggtacacttccttcatgtcctcttttatattctccctggatgaggatcgaaaaatgatttttttaaattgaaatttcaggttcttctagcaagacacaaggcagaagaagtgttctatgcagtcaaagttttacagaagaaagcaatcctgaaaaagaaagaggtgagatgtgcttgatggggctggcattggcggtagacactccttgaataatcttgattctggaatgttggtgccagttgaacatgccactaaatctgaatcgtcattttcctaggagaagcatattatgtcggagcggaatgttctgttgaagaatgtgaagcaccctttcctggtgggccttcacttctctttccagactgctgacaaattgtactttgtcctagactacattaatggtggagaggtgagcaggggggatagaagtcaactcttagtgtctctgcacagcctgctttgttttagtttgagaaaaaagttttcaaagatttttggtggggagaatgttaccagaattagcatttccttcaacctgtcaggttatagttaatagattacttggggccacttcctgcagttgttcttttgctgtgtatgtcaaaactaattaaattacattgcgcaacccagaatgactttgttctgtctcctgcagttgttctaccatctccagagggaacgctgcttcctggaaccacgggctcgtttctatgctgctgaaatagccagtgccttgggctacctgcattcactgaacatcgtttataggtaagcctgagagctcttcaggctaccagttttggtataaaggagacgtagcactggctgtttcatagggccttaaaataatttgtgtttatttgcaacttggttcgctaaaaccagatcccctagcacgtgagctggcttgacttaagtgccaagggggaacagccaagtaggattgtgcctaatccagaatagatgagcagaacaagggctccttttttcttcactacacaactacagtgaacctaaatgcctctaataccttagcaattatctttaagaggatatcttatgaagtgaaattaacttgtgcaactacttttctattcacttttttacagagacttaaaaccagagaatattttgctagattcacagggacacattgtccttactgatttcggactctgcaaggagaacattgaacacaacagcacaacatccaccttctgtggcacgccggaggtaggcgctgtcttggtttggtgcctggtttacccccgccttccaagagagagatgtacaatcatgcacttaactaccaaaaagagtaaactcctctcagagacttcttaatacagttcagtgcaaataaaatacatttgctgtttgatgtagcatgagaaatcccaagtccttctgttcctttactgaaaagtagctgtttgtaagtaagatctgcatcataaaaactttctaatcctaagtaagagatatcaagtgccagcagtttcctaaatgtcagtacacataggtagccagtcaccctcaaaaagtccagcagttttatcaggaaggaatctaaagatatctatcttccaagctggctctgggtctctcagctttttcaaactaaatgtgtggtcgtgggattgcttgctttcgcaggttctaaacgctgtttccctggtctgtttttcagtatctcgcacctgaggtgcttcataagcagccttatgacaggactgtggactggtggtgcctgggagctgtcttgtatgagatgctgtatggcctggtgagtggcacattgggaaccactggaacactgcctgctccctacaatattgccttcacacagcaaaagcagctaagaggcatattggttattttatagttcataagaataatcacttacctggttcttttgtgcatttcacattttactagataggaccacattgaacctgtgtggtggtgaaaaactaccacttattaacatctaccccctaccctccacacacacacacacaaacacacacacgggttgcaaagtagacacttaaatagcaagggaaaagaaagcattgaggtggggagagtttctcaaatcgagcctaatatttattgccgtttatatctttttctctactggtaatgtgtgccatatgaaacttccaattaagtctaaagtaattttccccttctttcagccgcctttttatagccgaaacacagctgaaatgtacgacaacattctgaacaagcctctccagctgaaaccaaatattacaaattccgcaagacacctcctggagggcctcctgcagaaggacaggacaaagcggctcggggccaaggatgacttcgtgagtgatgttttcctgtcctcctgggccggccgggacgtgcactagacctccctgcccttattgaatgcacctgtctaaattaatcttgggtttcttatcaacagatggagattaagagtcatgtcttcttctccttaattaactgggatgatctcattaataagaagattactcccccttttaacccaaatgtggtgagtatctgtctctcttctaagtatagagaagccaagcgatttattttaattcagaattgtctgggggagggttggaaggaatacattggcagatgttttctccataaacctgttattttacctacatagacacatttatcaattcgaagcaccaaaaggcaacaagtgaacattattcttatgtttaactgtgtgtagccttttgagattttgtgcttgaagtgggtgattatggaagttgatataagacttaaacttggtatttaaagcctggtcaagatttccctgtcctgtgtctagtgtgagttcttgacaagagtgtttttcccttcccgtcacagagtgggcccaacgagctacggcactttgaccccgagtttaccgaagagcctgtccccaactccattggcaagtcccctgacagcgtcctcgtcacagccagcgtcaaggaagctgccgaggctttcctaggcttttcctatgcgcctcccacggactctttcctctgaaccctgttagggcttggttttaaaggattttatgtgtgtttccgaatgttttagttagccttttggtggagccgccagctgacaggacatcttacaagagaatttgcacatctctggaagcttagcaatcttattgcacactgttcgctggaattttttgaagagcacattctcctcagtgagctcatgaggttttcatttttattcttccttccaacgtggtgctatctctgaaacgagcgttagagtgccgccttagacggaggcaggagtttcgttagaaagcggacctgttctaaaaaaggtctcctgcagatctgtctgggctgtgatgacgaatattatgaaatgtgccttttctgaagagattgtgttagctccaaagcttttcctatcgcagtgtttcagttctttattttcccttgtggatatgctgtgtgaaccgtcgtgtgagtgtggtatgcctgatcacagatggattttgttataagcatcaatgtgacacttgcaggacactacaacgtgggacattgtttgtttcttccatatttggaagataaatttatgtgtagacttttttgtaagatacggttaataactaaaatttattgaaatggtcttgcaatgactcgtattcagatgcctaaagaaagcattgctgctacaaatatttctatttttagaaagggtttttatggaccaatgccccagttgtcagtcagagccgttggtgtttttcattgtttaaaatgtcacctgtaaaatgggcattatttatgtttttttttttgcattcctgataattgtatgtattgtataaagaacgtctgtacattgggttataacactagtatatttaaacttacaggcttatttgtaatgtaaaccaccattttaatgtactgtaattaacatggttataatacgtacaatccttccctcatcccatcacacaactttttttgtgtgtgataaactgattttggtttgcaataaaaccttgaaaaatatttacatatattgtgtcatgtgttattttgtatattttggttaagggggtaatcatgggttagtttaaaattgaaaaccatgaaaatcctgctgtaatttcctgcttagtggtttgctccaacagcagtggtttctgactccagggagtataggatggcttaagccaccacgtccaggcctttagcagcatt

SEQ ID NO: 2006 - DNA, 11820 bp, Homo Sapiens
attgaggggggatcccagcaggtcccatttgttcagattcttctgggcctttctgtgttgcatttcttcctctgcaggacacctgtcacatgagggtcttcaggggaaaaggaattctagtgtctgtgactgcttcaaaggagaagtaaggggagaggagaggaaagcaggaggaggttggagagaacctcttgttcctgaggtcttccaatctccttcagctcaaagcactcagcatgctgaagttccagactctgggctatcacgttctgacatgcaacacaggcaacaccccagctccatccacgtttctccaaaagcacaggcatgacgtcatatggtgacaaacacccttgtccaaaggaagcccataggatacgctaattctagattcacaaatactctagaggaactcacacaatgggatgggccagtgccccacacagagtatgaggcctcccaccttggttgaatatctttttcttttttttctttttttttttttttgagacggagtctcactctgtcacccaggctggagtgcagtggctcgatctcggctcactgcaacctctgcctcccaggttcaagtgattctcctgcctcagcctctggagtagctggaattacaggtgcccaccaccacaactggctaatttttgtatttttagtagagacgagggtccaccatgttgaccaggcttgtctcgaactcctggtctcaagtgatctgcccacctcggcctagtgctgggattacagacgtgagtcaccacgcccggccccaccttggttaaatttctgaaaatcatttggtaaagtgaggacccctccagctgagacactgccaggaaacagctattgagtctcttagcacccacagcattaaaacaaacccaaaacattttaggcctcgttgagttctggaggcaaaatattcctcatctacaaatttattttattttattttttaataaaagttattattatttttttttatagagagacagggtcttgctctgtgacccagactagagtgcagtggtgtgaccatggttcactgcagcctccacctcctgggctcaagcgatcctcccacctcagcctgccaagtagctgggaccacaggtatgcccctcccccaggctaacttttttttactttttgtggagatgaggtctcactatgttgcccatgctggtcttttttttttttttttttttttttgagacgggagtgcaggctggagtgcccaggctggagtgcagtggcacaatcataactcactgcagcctcaaactcctggggtcaagtgatcctcccacctcagcctcccacataactaggactacaggcctgtgtcaccataatgcctggttaatttttttagtttttgtttgtagaaacagggtctcactatgttacccaggctggcctctaactcctggcctcaatccatcctcccatctcaacctcccaaagtgctaggattatagccacgagccaccatgcccggccccatacttatatttacttgtagtgagaacacttaaaccctactcggtcagtaattttcaagtacacaatacattgttactaactatatacatggtatttttaatttgcatgaatgctccttaaaatcagcgagcccgccttattttttgtattcaattttattggatataaattccacatcagtaaacctgattctcttaaaaatctacacagaaaaaaaaaaagagagagaggttgagttgggtagttgttggtatttttgtttttgtttctttgcttattcagttgaggtttattgtaaaacttgacaccagaaaaaggaagaagtggcgtttttgtgctgtgagcgtgtgacgtgtgtcctttccagagaaaggacagtcatggtgcttttttatcctctctgcccaaagaaggaaagctcttaacagccagcaggaggctttgtagggaccagcgttatcaacgccagtcgcgctgaccaatgatgagttaaagcagttaggtcgtttctaagagcaaatcaaaagctaaggttctgtgattctgaaaatgagacacggacagagactggagacccagagagaaagtgaaggactaaaagacagtcatagggtgggagtttgctctcctctgttttgttctgggtttttttgtttgtttgtgcgctctgtctgaccgcttttcttttttttctttttctttcttttttttttttttttttttgagatggagtcttgctctgccgcccaggctggagtgcggtggcacaatctcggctcactgcaagctccgcctcccacgttcaagggattctcctgcctcagcctcccgagcagctgggattacaggcatgcaccaccacactcagctaatttttgtatttttagtagagatggggtttcaccatattgaccaggctggtcttgaactcctggcgtcaagtgacttgcccgcctcggcctcccaaagtgttgggattacaggcgtgagccaccgcgcctggccctgactgcttttctccttggtttgtttgtcaatcccccttcctctgagccgaattccctttttgttctcattttctctctctgtcccctctctctctccttctttctctccttccattcctcctagatgaagcaaaaactcagataaaccagcacagaggccaggtatggtggctcacacctgtaatcccggcactttgggaagccaaggcaggcaggttgcttgaggccaggagttcaagaccagcctggcccacatggtgaaaccccgtctctactaaaaatacaaaaattagccggacatggtggcacgtgcctgtaatcccaggtactcaagaggtggaggttgcagtgagcggagatcacagccctgcactccagcctgggtgacagagcgagactccatctcaaaacgaaaaacaaaaaacagcacaaagttcccttgtcctgtgactcattctctctctctctttctaccatttctccttccctgtgtcttttttttttctctctgtgggttttatttaagcaatagaagttcttagcaaagaaaaactttatggaattagattgatccacttcatatgtacatatatgaactcagttcagaaactctcttctacccctgcctgatcacctatttggaagtctgttccttcaactcttcttctctttctgggactctttctagcttgggcttcctgcccctcccgtccactctcctgctttcacagcctctccttccccctgcccctcccctgcactgcatggggatgggccccaggtgtccaaggtctccccaccctcctttgtcactggagtcaggattagaacccagctccctagtcaccttgagtcatcagtcctggggctgctgacgggcttgcagaggagagagggagtggggctgggtcttcccaccctgggtcctttcctccttccccactccgtttagctgtaaagctcaattaagtgtgattagctgagaagagtttctgcagaattagagcacgccccacccctgtcttcgtggtccccttcccttaacccggaaactggatgggccaggacaaagagagttaagagctttgtcagtggtctgtctggagcgacagatggaaggaaagggaccggttgagcaacatgacaggtggctgaggagccaggtgcagagtggtagagttggctggcggagtggccagcacatgagaagacaggcaggtaggtggacggagagatagcagcgacgaggacaggccaaacagtgacagccacgtagaggatctggcagacaaagagacaaggtgagaaggaggtaggcgactgccaatgagggagtgacacacaggggagcaggtagagagaggacaagcaggtcatccccttggtgaccttcaaagagaagcagagagggcagaggtggggggcacagggaaagggtgacctctgagattccccttttcccccagactttggaagtgacccaccatggggctcagcatctttttgctcctgtgtgttcttggtgagttctcccggagcagggagagggcaggactgcgactggatcccttcacccccatgaggaggccccaccaccctccccatctcagctctggcccccagcctggtggtgaggaggagaggggctttctctgtgcctccatttacctgcagctctcagggtactgctcacctcggtctcccctattttttgatccctcttcccttctgtccctctctgaatctctgtctctccatttccctcctatgtgtaagcatctttctccctgggtgtctttgatgtttcatggtctttttctatcactgggtctctctctctttctctctctttctcgtctctctttctcctctctctctcctgcctgtttctctctctcactctgtgtgtctctccatctctgtatcttttcttcctctctctgacccatgcccctgtctgtctccagggctcagccaggcagccacaccgaagattttcaatggcactgagtgtgggcgtaactcacagccgtggcaggtggggctgtttgagggcaccagcctgcgctgcgggggtgtccttattgaccacaggtgggtcctcacagcggctcactgcagcggcaggtaagtcccttcctggggtgggcgaagggaggactatgggaaggcaagcgctgggggtaggatcacaagggagggtggtgcccactgggaagaagctgatcctgcaacaagagagtctgaggttagaccaggagtggaacttccttagcagtgggcctggggtggtgctgggcagggtgaggtatgttgggtggagggccggggagggtcctggaacctgccctcctgcctctcccattcctgcatgtaccctttctttcctatatgacatctgccactcaccccagccattccttgacccagtctgggcccggggcccaggtctcacccaagctctttttctttttcttttttttatttttttgagacagggtctcgctctgtcgcccaggctgctgtgcaatggcgtgatcacagctcactgctgtctctgcctcccaggttcaagtgattctcctgccccagcctcctgagtagctgggattacaggcacccgccaccatgcccagctaatttttgtattttttgtagagacagggttttgccatgttggccaggctggtctcgaactcctggcctcaaatgacctgcccgtcttggcctcccaaagtgctgggattacaggtgtgagccactgcacccggccaacatgacccaaactctttgtgcaacttcagaatctatgcctggcacctctctgggcctcagtagactgatgttctggaatttttttctttttctttctttttttttttttttggagacagagtcttgctctttctgtcatccaagctggagtgcagtgatgctatcttggctcactacagcctcaaccacctgggctcaagtgatcctcacacctcagcctcccaaggagctaagactacaggcctgcgccaccacacctggctaatttttaaattttttttgtagagacagggttttgctatgttacccaggctggtctcaaactcctcagctcaagcaatcttcctgccttgacctcccaaagtgctgggattacaggcatgagccactgtgcctggcctggaactttttttgtgaaaggggagatcagatgcaaagaaacagagactcagggagagagagggccagcagcaggatgcagagaggccattcatcaacccactcgttcaatcatgaacccactcgtccacgcatgagcatggagggcacatgctccgtgccaggcggtgggaataaggcagtgaacaaggtccactgatgtccctgccttcatgggcttcaccagccgagagaatcagaaagagaggcctggcgcggtggctcacacctgtaatcccagcactttgggaggccgaggcgggcggatcacttgaggtcaggagtttgagaccagcctgacacacatggtgaaaccttatctctactaaaaatacaaaaattagctgggcatggtggcatgcttctgtaatcccagctacttgggaggctgaggcaggtgaattgcttgaacctgggaggtggaggttgtagtgagccaagatggtgccactgcactccagcctgggcgacagagcgagactcggtcttgaaaaaaaaaaaaaaaaaaaaaaggagagagagagacacagatgcagggacatggtaggagaaacagggaacacccaagatggaaagagggtgatggaggttgggaataagagcctgtaagagagactcggagaatgagagttgcgggtgagaggacagacagtgaggggcagaacagtggggagcggcaggagcgcctgagtgtccgtggaggggtgcaaggtgggggactgcgtgcctgccacccgctcagccgtcgccaccggcagcaggtactgggtgcgcctgggggaacacagcctcagccagctcgactggaccgagcagatccggcacagcggcttctctgtgacccatcccggctacctgggagcctcgacgagccacgagcacgacctccggctgctgcggctgcgcctgcccgtccgcgtaaccagcagcgttcaacccctgcccctgcccaatgactgtgcaaccgctggcaccgagtgccacgtctcaggctggggcatcaccaaccacccacggagtaaggggcccagggccaggggtcaggggtcaggatgggtacaagtctgggatgcagggcgagaggtcgaatcatgacacctcagaggaaggatgggtaaagggtcagggtgtgggatgggacatcaggatcatggtttggggtcagagattatggtggattggggtcttgggagccaaaggggttaaaggactgggtatgaagtcagggatcagaggtcagaggtcagagtgtgtcagaggtcatcacactggagcaaaaggcatatatatatatatatgtatgtataggatatgggcattgtgggtcatgggtctggggttagaggtcaccgtagaattaaggtcatgggatccagaggttgtacaatctggtcaaaatctgaggatggaaattgggattctatccaaaatcacatatctgagattggaggtcatagcgtttggggtgtggggcccgaagtttggggtcatggaggctggggcccaataaactaggatcaggggacactggcgttggaagcagtgaggtttggaagatgcagagctgaggttggaggttaaggtaaagacagggacatggggtcaggagacagaagatatgagatcaagctgggatcataaggtaataagacagaaggtcaaagatcacagtagctggcattgaagagggtcaggtctggattcgttgtctctgacgctggagagacaagaaagttcttgagttatgccactcaaagtcaaatgtcaaagatcaaagagaccgtcaatcatctggggtcatgattcatatgaaattaagtcataaatatgtaacttggaggtttcgggattgtagtacaggtcggtgaggggcaggggtattgacatggatgggccacatccagggaagagggacgtggcctcaaagtggggagatttaggggaccctgcagcacgcatgttctctctccagacccattcccggatctgctccagtgcctcaacctctccatcgtctcccatgccacctgccatggtgtgtatcccgggagaatcacgagcaacatggtgtgtgcaggcggcgtcccggggcaggatgcctgccaggtgagccagtgcaggcagcgtgcgtggtcaccaggacaggaagtgaaggggaggggctggaagcaggaggggaactgatggaggatgaatcagggaaaggggatgctgcagagagacggggtcaaaaaggaagggagaggctggttacggaggctcacacctgtaatcccagcactttgggaggccgaggcgggcggatcacttgaggtcaggagttcaagacaagcctggccaacacggtgagactctgaatctactaaaaataccagaattagccgggggtggtggtgcaagcctgtggccccagctacttggaaggctgaggcaggagaatcgcttgatcccgggaggcggaggttgcagtgagctgagatcacgccactgcactccagcctgggcgacagagccagactctgtctcaaaacaaaataattaataataataataataataataataataataatggaggagaggcccaggataagggagggagagagacagggagtaaaagggaggaccggggaatggaggagggggaggggcagggagagagagggaggaagggaacagagaaggaaagatggggcaggggttacagagagagacagcaaaacagacggagaggactgggagcccagacagggaaccagctgtttctggggctctaagtctttcccataccatcctccagttggtgctgtcccagactgagagagatttgaggatggcggtctctcccctcattggtcagggccccagccattgtccttgagagaactctgtgcttttgatggagtcctgcccaccttccctgggattggtcatttttgatggcactctctcccctcattggtcagaaccccaggcattgtccttgagagaacctctatcctttatggagtcccaccctcctcccctgggattggtcattgataatagtgttctctctcctcattggtcagggccccagccattgtccttgagagaatgctcgactctttatgttgtcttgacagcctcccctgagattggtcattaatgactgtgctctctctcctcattggtcagggccccagccattgtccttgagagaacctctgtcctttatggagttccacccttcttccctgggattggcccctagagacagtggttcttctcttttggttagccattgccattgtcctccgggaaagtgattatactcttttgtctaatgaccagacttggagccctccccaaggcccaggactgggttgaagggttggggaggaaaacagaaataagatgtctcccttgttcagacagtacttctcttcccttccagggtgattctgggggccccctggtgtgtgggggagtccttcaaggtctggtgtcctgggggtctgtggggccctgtggacaagatggcatccctggagtctacacctatatttgcaagtatgtggactggatccggatgatcatgaggaacaactgacctgtttcctccacctccacccccaccccttaacttgggtacccctctggccctcagagcaccaatatctcctccatcacttcccctagctccactcttgttggcctgggaacttcttggaactttaactcctgccagcccttctaagacccacgagcggggtgagagaagtgtgcaatagtctggaataaatataaatgaaggaggggccatgtctgtccatttgaagtcctcatgctggttgagactggaagaaggactcagcagtttccctatctcataggagtagaaacagagctcaaataaggccaggcacagtggctcacacctgtaatcccatcactttgggaagctgaggcaggtggatcacctgaggtcaggaactcgggaccagcctggtcaacatagtgaaaccccaactctactaaaaatgcaaaaattagccaggcatggtggcgcatgcctgtaatcccagctactcaggaggctgagacaggagaatagcatgaacccgtgaggcagaggctgcagcgagccgagattgaaccattacactccagcctgggcgacagagcgagactccatctcaaaaacaaacaaacaaaaaacccagtgctcaaataggatgagggtcttccctgagtagttactcagaaatggagtagaaaaagttacttttaataatataggccgggtgcagtggcccacgcctgtaatcccagcactttgggaggccgaggtgggaggatggcttgagctcagatttcgagatcagcctggcaacacagtgaaatcttgtcactacaaaaacacaaaaaattagctgggtgtggtggtgcgtgcctgtagtcccagctacttgggaagctgaggtgggaggatcacccgagccggggaggtggaggctgcaaagagccgagatcatgccactgcactccagcctgggcaataaagtgagaccttgtctcaaaaacaaaaacccagcaatataaataagacacatgtttcttcatctggcataatagaaatagtgcccagagcttataagcttttcaagagtccacaaaagacccgaaaaagaaaaagaaaattgttagctccaaaataccagatgaaagctgcaaagtcaacatttatgaccatttaatccaatgtccataaaacgtagcattctttccactagccaactgcagtttactttcttgtaatgaagcatacattgtatctttaatgtgggacgtggctttgttctaataagacgaagggtggagtgcaggcttggaaagcaggagagctcagcctacgtctttaatcctcctgcccaccccttggattctgtctccactgggactcaagaggtgaggagagaccatctccccaaatgcactgaagggaaactggaggagggagggagtgaggggtgatcataccagcggaggcacatttgctgagcccccccgcagtctgctctttccaagtggaccctcctggaagcctgatcccaacctcccctgcaagcaggtctgtcacccccatctctcagatgaagaaactgagccttgcaggggtggagtcccttgtccccacgtcataagggtagtcatagtagtaggaagaggaagcacctaggtttgaggccagggctggctgctgtcagaacctaggccctcccctgccttgctccacacctggtcaggggagagaggggaggaaagccaagggaagggacctaactgaaaacaaacaagctgggagaagcaggaatctgcgctcgggttccgcagatgcagaggttgaggtggctgcgggactggaagtcatcgggcagaggtctcacagcagccagtaagtgaacagctggactcgggctgcctgggcggcagggagaagcgggcaggggaagggtcagcagaggagcgaggccccagaggagccctggggtggagcacagccaagggctctgttccctttcctggactcggcttccacaggccctgacctgcctcccccaccctccggtcctgcccctgtgcctggcagcagccccacctgtgtgacatcccagcacaccccccctctccttgcaaaggagaagggagcggcctaggggaggccaggggcccacctgggctggggctgtggagagggagtggctgggacgggaggaaaaagagagacggagattagatggaagaagagggatttcaagacaaattgccagagatgcagtcagagagactgactgagagacacaaagatagaaggaattagagaaagggccacacagagccagacagagagagaagagtggagatggagacagggacgaggacagagaaaggcagacagacacatagggacagaaagagaaaaatcacacaaagtcagaattactgaatgacagggaatgacacatagaacgagacacagattcagagactcagggcagggaaaggaaggctgcagacagacagacagacagaggga

SEQ ID NO: 2007 - DNA, 348 bp, Homo Sapiens
agaaaatacacgctttctgcatgtattagaaacgcacgasctccaccaagtctacaatgaaagtytgaaatttaactgcaaggaattagaagcatatttgcaatcattgcagcttcttctttcttctgctcataaaaggaggaacactttagatagagggcaaatatatctbamaacctaatttctttctttytttgataaggraatcttttccatctccatcctaacatgcacaacctgtgaagagaattgtttctatagtaactggtctgtgatcttttgtggcaagrgaatagcaggcaagaattagggccttkacagaattccacgagctctdagacatktttt

SEQ ID NO: 2008 - DNA, 626 bp, Homo Sapiens
tttttttcgagaggaacgcacgttttattggaagtcttggcggcagggggagtctgcgggggcagggctggggaaggggcggcggagggggcggtgggcgcgcaggtggagcgtgggagatgtcaggtgccaggggagtcctggccggattccatcgctccaggtgtttctaccgcctgcggttggacagacggcggatggagctgcggaaagttccctcctcttcatcgggttccccagtcctctgctgctggttgaacttgcaccggcatcttctgctcagcacgatgaggatgcccaggatgaagaggatcccggcgatgacgaggcctccgatctgcagggactggtagtcgtaagtgaacgggtcgtgttcctttggactttctgccttggccatggtggaggagaccacacagaaaaccaagatgtggccaagagacgccattgtccctggaggaattctgctcgctcaggccaccatggcaacagctggccttcccccactcaggggttcacgcaaagcctggcggggtgaggccagctgcacatcgcacaggtgcgctgtggaaaggcacccgttcctctctcgtgcgattctggctcaggcaattccatatgatcga

SEQ ID NO: 2009 - DNA, 3564 bp, Homo Sapiens
ggcattgatgctgtgtgcgcgtgcgtgtgtgtgtgtgtgtgtgtgtgtgtgtgtgtgtgtgtgtgtgtgtgtgtctggagtcatggcagggtccctttctgtctgtctccttgctctgccccagactggggggctgcagaggtgagggtatctggcctcaacagctgcttattcccgatgggatggcctgggctgggcccctgaggccaggctgacttggacatggcaagaggggtcccaggctcttgtgggcaaagcaggggaggcgccaatgtggaggaacagagtctcctggctggctgctgctctctggagcgggtggagtcagggaagagctgagctggggagtcaccctgggcctggggtcaccgtaggccccatgtagcaccctggttcccctgcctgtaggtgacaggagccagcccagccaggtgtgctccctccccaggccctaggcaggcgggtacaggggccagcagctgcgcccgccccaccttccttcccacccacatgccgaagggtggccaggcaggcaggtggacgagtccaggcagcggctgagtcagtgtgtgtggaatgttctggccgctcccagctgcaccctgcccctacctgccaccacctcaccttcatcctcaggcgctgcggccctgagcccctgccaggaatgcacctttagcccaggcctgctcagtgagctccgccgacagccagccctgctcctcccgccatgaccctgcagacccctctgggcttccaagttcctgggggctgcagtgaacatgctccacctgcatggctggcaaaccatggtgggccccagctgtggtgcgtcctggggtagaggcaaggaagtgatgggaccgcagagatgagacccccagggatgagatgggacccccaggcagggcccagggtccagggcccaggagagagaagcagggagggagagagcttcctggtggaggacgcatcctacagtgggggcaagggtgctctgaggtccggtgaaggcagggactaggctgcccaggccctgcctgcttggctggggctgggggctgctgggaggtggctgggaggctgggcctgggcagctaagctggagctttggccagggtccagagcctccctcccttcagcttcctgctgcacagaaccctcgcccctggccaccccgtgctgcctccttgccctggcagacccagcactggctgctgctagtcagatggggtagcgggcaggggccggaggggccaccctcccagctgacccagcctcctgggccgcttcttccaaaccagcagggtagaaagatggggcacccaccagtctctcccagtgccccggccccagctggcaccacagctatacctgggcttattccagaccttgtcgccgggaccccctgtgagttgtgggattcccaagaggggtgtggggataacccagccaagtgggggctgcagctgtccacagatgcactcagcctggcctctaccccagggccccgctgggctctcattgccggcgcccttgccgcgggcgtcctcctcgtctcctgcctcctctgtgctgcctgctgctgctgccgccgccacaggaagaagcccagggacaaggagtccgtgggtctgggcagtgcccgcggcaccaccaccacccacctggtgaggagcggctccttgctcactcagtccagagagggcttgaaatccaggctccagagcccagggcagcgaggcgagttcagccccagggatggtttaacccccacagaggcagggcgttgaggaccttcctggcagggaaagtgggtgaacagaggtgagaaggaggccatgcaacaggggctgccccatgggcccgagggagccacagcgggttcttgaggaaggcagggggtaccccagatgccacgttttgggtgggtttggccggtctcacagagcgaagccgacgatttgtgcctgttgggtggcctggcctggaggcggggggtcttgacccatgtcatgcaagtgctgcccgggagcccagggctctgatgaggcatgatgtcagcaccacctgccccttgtcccaactcactacaggtgcaacctgatgtggatggcctggagtccagcccgggggatgctcagcaatgggggcgcctgcagctctccctggagttcgactttggaagccaggaggtgaagggccccgctgcgcaggaccagcggttctgcgagtttccggaaagggtgacgggggaagggcagaccccatgccctgggtggtggggagctgacagggcaggggcccttggctgagcccaccccgctggctcccagatcagggtgggcctgaggcaggcagccgacctgaggcctgggggcaccgtggacccctatgcccgggtcagcgtctccacccaggccggacacagacatgagacaaaagtgcaccgaggcacgctctgccccgtgtttgacgagacctgctgcttccacgtgagtcagggatggtcggctgggtgggcctggacggctggatgggcctgggctgggtgggcctgggcagctgggtgggcctgggcagctgggtgggcctgagctagggcagcagggcctggctcacgccgctgcctcagatcccgcaggcggagctgccaggggccaccctgcaggtgcagcttttcaacttcaagcgcttctcggggcatgagcccctgggtgagctccgcctggcactgggcaccgtggatctgcagcatgttctggagcactggtacctgctgggcccgccggctgccactcaggtgaggtgctggtcaccaggccacagcccaaggcagagctggcagggaccctgccctatgggccatcggaaagacaggcctgatgggcagcattttcgggggtctgaaccccaactcggccagaatcaccctcccgggctgaagcccctcttgctgcccacagcccgagcaggtcggggagctgtgcttctctctccggtacgtgcccagctcaggccggctgaccgtggtggtgctggaggctcgaggcctgcgtccaggacttgcagagccctacgtgaaggtccagctcatgctgaaccagaggaagtggaagaagagaaagacagccaccaaaaagggcacggcggccccctacttcaatgaggccttcaccttcctggtgcccttcagccaggtccagaatgtggacctggtgctggctgtctgggaccgcagcctgccgctccgaactgagcccgtaggcaaggtgcacctgggtgcccgggcctcggggcagcccctgcagcactgggcagacatgctggcccaccccggcggcccattgcccagtggcaccccctgcggccagccagggaggtggaccgcatgctggccctgcagccccgccttcgcctgcgcctgcccttgccccactcctgaatgcaccacatgcctctgtctccccgctgagcccaggcacttgcccaggccgccctgcaggaccactgcaataaacgccttctcctgccaaaaaaaaaaaaaaaaaaaaaaaaaaaaag

SEQ ID NO: 2010 - DNA, 2000 bp, Homo Sapiens
gatcacctgggagtaaatatacactaggagtgggctgagaattgagcccttgggctccctggagtttagaggtcaggaaaatgagggcaatgtcataaaggacactgaggaagagtagctggagtagaagaaaaaagagaatggcattcattccaggggtcaagtgaaaaaggatgtaatgagtttcctcaaatgctgctgctagagtaagatgaggactgagagttgactactgaatctagcaacatggaaatggtgaccttgacagaaacagtgtcattgaagtgagagcaatggaagcaaactcaagcaggtttggactcagggagtaaatggctttgtaggggaagcaaaatttccttctaccctcttcagttctgttgttggtccaagaattaaactgacataagacagattaacaggagaaaagcataccaattttattaatatttttacacggacgtggcagtcttcaaaagggaaatgaagaccctaggaagacagtaggccgtgaagcttatatacattttcacgcaaagaacaataaattatggggatgtgacaagacaaaggggcttgggcttggggcattaaattgtaggacagtgcctaggaaatacatgggggaaattaacgaaagacagggtcgttttggtagtttgttgtggaagtccatttcggcatcaactcctagtctctggtgataagaatgttctcttcctagtacagggaaggcacctttttcatggaaaattttatgatctgtttttaggtagaaatgaggaggtcagagagcctatgttagtttgttttgcatcgctgtaaaggaatacctgagactcagtaatttataaagaaaagaggtttaattggctcacagtttggcaagctgctcaagcatggaaccagcatttgcttggcttctggcgaggcctcaggaagtttttactcatggcagaaggtgaagcgggagcaggcatgtcacatggtgagaaagaagcaggagcgagaggaggagcttccaggctcagctctgcatgaatgaacagagtgagaactcactcattatcgcagggacagcatgaagacattcatgagggatctgcccccatgacccaaacacctcccactaggctcatctctaacactggaggtcacaatgcaacataaaatttggaggggaaacacatccataccatatcagagcccttctgcatgagctgtttctcaagtgccttcagattaaaataatcaatatgccaaaacagcatattttgggatggcacgaatcccttcagccccctttttttttgggaatagagtcttgctcttgttgcccaggctggagtgcagtggtgccatctcagttcactgcaacctccacctcccgggttcaagtgattcttgtgcctcagcttctcaagtggctgggattgcgggtgtgtgccaccactcccggctaatttttgtatttttagtggagacaggggttcaccatgttggccaggctggtctcaaaactcttgacctcaggcgatccacccacctctgcctcccaaagtgctgggattacaggcatgagccagtacacctgttccccttcagctcttttgaggagttttgctgtcaatatgaacactggaacagtggctggggaggatgagatctcaatacttccctgacatcccttaagactcaagtcttgatactttgtctgctctctggctctttctttgtcattactattatttttatcttcttgatgttgactcttgctaaaattttttgtcttccttattgttaatgcttatagaaaatgattccttgttatcttttagcccatgtcatccgaatcatttgctgtttctagcctaggtgctttgactatgccagcttgtatttcttcagaattttcattaactatatgtgtggtattgtaggcattacatattttaaaataaatttagccattgcttcaatcacaaaaaaaaaaaaaaaaa

SEQ ID NO: 2011 - DNA, 734 bp, Homo Sapiens
  misc_feature (5)..(7): n is a, c, g, or t
ggtcnnnaaaaactacggctaggtacgaggctgggtttgggcatttgtctggactgattacttggttagaaagccccggagcgctgggtcagcatcatccgtgactgactgagaaggcgcgagaggagtcttccccgctgcacagaggcgtggctgaggctcggcggcgcccagggtacccaggcccggcccggaataaggacatcctctctggccccgctccgctcacagagtcagatggcggcggcgagctgacggccccggcccagggcattgtgacctttgaggacgtggctgtttacttctcctggaaggaatggggtcttcttgatgaggctcagaaatgcctgtaccacgatgtgatgctggagaacttgacacttacaacctccctgggtggttctggagcaggggatgaggaggcaccttatcagcagagcacttctccacagcgggtgtcacaggttaggattcctaaggcccttccttctccccagaagaccaacccctgtgagatatgtggcccagtcttgagacagattttgcacttggttgaacaccaaggaacacaccatggtcagaaactgtatacagacggggcatgttggaaacaattacaatttactgcataccttcatcagcaccagaagcagcatgttggacacgaaacacttcagaagccatgggggcgagcacttgtttcgagcagctgacatttgacgatctgggaagcc

SEQ ID NO: 2012 - DNA, 2882 bp, Homo Sapiens
aagcgcctcgcgggggtctggcccggagtggagggcgcgcggtcccagccctcccgctcggccggcgggtgtcgagttcagccctaggggacctctttctcctggacattgaagatatggccctttggaggtgacccaggagagaagggatgaaggcctttggtcctccacatgagggccccctccaaggactcgtggcctcccgcattgagacttatgggggccggcatcgagcctctgctcagagcactactggcagactctatccccgaggataccctgtgctggatcccagtcgccgacgcctccagcagtatgtcccctttgccaggggttctggccaggcccgaggcctgtcacccatgagactgcgagatccagagcccgagaagaggcacgggggccatgtgggggctggcctgcttcactcccccaaactcaaggaactcaccaaggcccatgagctggaggtgaggctgcacactttcagcatgtttgggatgccccggctgccccctgaggaccggcggcactgggagataggagagggtggcgacagtggcctgaccatcgagaagtcctggagggagctggtgcctgggcacaaggagatgagccaggagctctgccaccaacaggaggccctgtgggagctcctgaccaccgagctgatctacgtgagaaagctcaagatcatgactgatctgctagccgccggcctgctgaacctgcagcgagtgggactgctgatggaagtgtcagctgagaccctgtttggaaatgtccccagcctgattcgaacccaccggagcttttgggatgaggtgctggggcccaccctggaggagactcgggcctcgggccagcctctggaccccattggtctgcaaagtggcttcctgacgtttggccagcggttccacccctatgtccagtactgcctccgagtgaagcagaccatggcttacgcccgagaacagcaagaaactaaccctctcttccatgccttcgtgcagtggtgtgagaagcacaagcgctctgggaggcagatgctctgtgacttgcttatcaagccccaccagcgcatcaccaagtacccactgctgctccatgctgtgctcaagaggagccccgaggcacgagcccaagaggccctgaatgccatgattgaagccgtggagtcattcctgcgacatatcaatgggcaggtccgccagggcgaagagcaagagagcttggcggctgcagcacaacgcatcgggccctacgaggtgctggagccacccagtgatgaggtggagaagaacctgcgcccattctccaccctggacctgacgtcccccatgctgggggttgcatctgagcacaccagacagctgctgctggaggggcctgtgcgagtgaaggagggacgagaagggaagctggacgtgtacctgttcctcttctctgatgtgctccttgtgaccaagccccagcgcaaggcggacaaagccaaggtcatccgaccccctctcatgctggataagctcgtgtgccaacccctgcgagaccccaacagcttcctgctgatccacctcactgaattccagtgtgtctccagcgccctccttgtgcactgtcccagtcctacagaccgtgcccagtggctggagaagacccagcaggcccaggccgccctacagaagctgaaggcagaggagtatgttcaacagaagagggagctcctgaccctctatcgggaccaggacagggagtcccccagcaccaggccctccacgccttccctggagggctctcagagcagcgcagaggggaggactcctgagttctcgaccattatcccccacctggtggtgacagaagacacagatgaagatgctccccttgtgccagatgatacctcagactctggctacggcactttgatcccaggcacccccacggggtcccgctccccactgagccgtctacgccaaagagcccttcggcgggaccctcgcctcaccttctccaccctggaactccgggacatccctctgcgtccccaccctcccgacccccaagctccccaacgccgaagcgcccccgaactgccggaaggaatcctaaaaggaggcagtcttccccaggaagacccaccaacctggtctgaggaagaagatggggcctccgagcgagggaatgtggtggtggaaacactccacagggcccggcttcggggccagcttccctcctccccaacccatgctgactctgccggggaaagcccctgggagtcctcaggggaggaggaagaagaggggcctctgttcctgaaagctggccacacatccctgcgcccaatgcgggctgaggacatgctcagagagatccgggaggagctggccagccaaaggattgagggggccgaggagccccgggacagcaggccacggaagctgactcgggcccagctgcagaggatgcgggggccccacatcattcagctggacacccctctgtccgcatcagaggtatgaggaatgcagaggacctttggcatgcatctctcccagaggagatctctccccagtagtgctggtcaccctccggcatctgtgactctacctcaaggaccacatttcccaaaggaagcctggcccaggcaccctgcctcctgctctgtttggggatcaagaactgtaaatttatgtatcataggtgcacctgagccccacagaaagttgtgcataaaaatgactgccctggctgggcatggctgcctgtaatcccagcactttgggaggctgaggtgggaggatcccttgagcccaggagttccagaccagcctgggcaatatagggaaaccctgtctttacaaaaaaaaattttaaaaatt

SEQ ID NO: 2013 - DNA, 4346 bp, Homo Sapiens
aagctggagcggcggtggcggcggcgtagggaggccggggccggggctgaggccgcggccgggtctgcgaggcccttggggcggcaggcggcggcggcccggggctcgagcccggaggcaggagcagccgccatggccgagagcatcataattcgtgtccagtccccagatggagtgaagcggatcacagcaacaaagagagaaacagcagcaacatttttgaaaaaggttgcaaaggagtttggcttccaaaataatggcttctcggtttacatcaatagaaacaagactggagagataacagcctcctccaacaaatccctcaacttgctaaaaatcaagcatggcgatttgttgttcctgtttccctcgagccttgctgggccctcatctgaaatggagacgtcagttccaccgggcttcaaagtctttggcgctcccaacgtggtggaggatgagattgatcagtacctcagcaaacaggacgggaagatttacagaagccgagacccacagctatgccgccacggccctttggggaaatgcgtgcactgcgtccctctagagccattcgatgaggactatctaaaccatctcgagcctcccgtgaagcacatgtccttccacgcctacatccggaagctgactggaggggctgacaaggggaagtttgttgccctggagaacatcagctgcaagattaagtcagggtgcgaggggcacctcccgtggccgaatggcatctgtactaagtgccagccgagcgccatcacgctgaacagacagaagtacaggcatgtggacaatatcatgtttgagaatcacaccgtcgctgaccgctttcttgacttctggagaaagacagggaaccagcaatttgggtacttatacggacggtacaccgagcacaaagacattccccttggcatcagggctgaagtggctgcgatttatgagccacctcagattggtacacagaacagcttggagcttcttgaggatccaaaagctgaagtggtcgatgaaattgctgccaaacttggcctgcggaaggttggctggatatttacagacctcgtctcagaagatacccgaaagggtaccgtccgctacagtcgaaataaggacacctatttcctaagttcagaagagtgcatcactgcaggagacttccagaacaagcatcccaacatgtgccggctctctccagacggacattttggatccaagtttgttactgcagtggctacaggtggtcctgacaaccaagtccactttgaagggtaccaggtgtccaatcagtgtatggcactggtccgtgatgagtgtttgctgccatgcaaggacgccccggagcttggctacgccaaggagtctagcagtgagcagtacgtgcctgatgtgttttataaggacgtagacaagtttggcaacgagatcacccagctggcccggcccctgcctgtggagtatctcatcatagacatcacaacaactttccccaaggatccagtttacactttttctatttcgcaaaatccatttcctattgaaaaccgggatgtattgggtgagacacaggacttccatagcttggccacctatttgtctcagaatacctcatctgtgttcttggataccatctcagatttccacctcttgctgttcctggtcaccaatgaagttatgcctctgcaggacagcatcagcttgctgctggaggccgtgcggaccagaaatgaggagctcgcccagacatggaagaggtctgagcagtgggccaccatcgagcagctgtgcagtacagttggcgggcagctcccaggtctccatgagtacggggccgtcgagggctccacacacacggccactgcagccatgtgggcctgtcagcactgcacgttcatgaaccagccaggcacaggccactgcgagatgtgcagcctccccaggacctagggcgcctgccctctgctggctaggaccgggcccagcccagcccttcctgaagccagaagcgttgctgagtgtgttccctgtaactgccccatagtgggcagccctggaggaacaaggggctggctgtcctgggctccctgacccactgaagcttctcagcacgttcctccctggagagcgggcgccacggctggtattctgcaggctgaatgcagtctccagactggaaacgcagagcggctcctcacgcctaatcctgttgacaagtcccccgccgtgttggaaagacctctcgcctctacgtggcacctggaattggggcgcacagggaggggcggatgctgccaccacccagccttctctttattttcagtgctttttgtttggcctccctgcccccatgtttttctggctgggagctcttggttacccccttgtctgactgcttggtggcaggcaccctgcctgtgagggccactttcctcttctagtagctgttgtctggtggggacgcagtggccctggacacggctcccctctgcaggtctgcaggtcggtttgctgcctgccctcctcctctcacccgatgtccaggtgggattttaaagtctgcattggttataacaacagttatcagtaattcctgcccagaagacttttatttatttttttttaagataaaaactgcacaaaaggggagtgagagagactagtttccacatccttccctcctttagtgaagcccccgaggttgtgtccagggtgatgagtgtggacgggggcaccagtcagttctcccttgaagtaaacctcagtgcctgagacttttctaccaagccacacagctgcagcaactgcagatactgcgggctgagcaggagcagtggtggcgcctgccctgaggctgccctgcgatggcctgggtgggagagctgggtcaccggtgccgatgctctggccctccccaatacgctgcttcgtcccactgcaccgcctggctgagggcgttaggggctgtgcctcttgtgagggccatttgggacctccctggggcactgcacaattgatagtgtaccaatagggggagactgggcgatctggaacagcacgtggtggggtcctgcttgtgtgctctgcgttcctctgtggcgtggccaggccggggcctggctcttacccggggagtggtgggcatctcgatgcttctttgccttaatgatggccacatctgggctgctctgcacccacgggagaggctggcccagctgcagactgcttagggacttctgtgtccatcctggggggtaagcccacgtgacccacattcttggcactatgaacagagaacatttgcctgttggcttctgaagtggtcagggccatggctgacacctccaggtccgcctggcatgggacaccaagtggaaggcccaagcagctcatctgctcttgggaccaggggccagttgggttgggtctggtcacggcagagcttttgtggagggtcaggaagggtggagaggagctgggttgaagcggactgctgcggatgcaactcccagcttgcccaccgcgggctgtctgctctccctcctagcagctgtcacactgaagttttgtcctctgctgtctcctctggtcctgagatgagctgtgagcctaggtggccaaggcttcctgcattgcttccctgtgagtccaaggccttcccccaccactgggcagaggctggacagcacggacttctagagagagccgcgttgccagttcctctcccactcgctcgtccttatccaccacgctattatagtttccgttgtcctccaccagcatttcccttactctgaagttccggcattcacatcattcatgttttcttttgtcttttagctaaaggaaaagcattggcgatttgtctgattctggttttgagttactctttgttcagtaatgcactttattttattgtccaaagagagtcagagctaagcatacaggcttgggggtgagccctgctgtgagagttcaggccctgggaggctcagccacctcctcttgtgggaaggaggtctcagccccacctcgcatcttcacctgcccttggtgtggacacaccctctcatgctaccagcaccataatccagtgggggtgactgggtgcacacctgcccaggtgaacacagcggctgccagtctcctggtcccgagaggaggtggggcctggccctggctccctccaaccagctgctcctgggacacaggtgctcctgcttcggctctgtttcggctcacaggtgtgcatcactgggcttggatttgcattacattgaccccagccctgcagtggaacctaataaaagcgcctgaagcaaaaaaaaaaaaaaaaa

SEQ ID NO: 2014 - DNA, 574 bp, Homo Sapiens
cctggtggcgaattcggcacgaggcgcacttgcggcggtctacgcgaggaagatggctgcatcccagctgcaagcttcagcggcttcctcagctgctggtgtatcgggtcctagttcggctggcggcccgggtccccagcagcagccgcaaccgccagcacaactggtgggccctgcccagagcggcctcctgcagcaacagcaacaggacttcgatcctgtgcagcgttataagatgctcatcccgcagctgaaggagagtctacagaccttgatgaaggttgcggcccaaaacttgattcagaacactaacatcgacaatggacaaaagagcagtgatggacccatacagcgctttgacaagtgcctggaagagttctatgcactctgtgaccagctggagctgtgcctgcgcctggcgcatgagtgcctgtcacagagttgtgacagtgccaagcactctccaacgttggtgcccacagccaccaagcccgacgcagtgcagcctgacagactcccctacccacagtacctggcggtcatcaaagcccagatttcctgtgccaaggacatt

SEQ ID NO: 2015 - DNA, 4238 bp, Homo Sapiens
gcgctctcaggcgggctccggcggcagcgacgcgagcgcggcgatggggagcggcggcgtggtccactgtaggtgtgccaagtgtttctgttatcctacaaagcgaagaataaggaggaggccccgaaacctgaccatcttgagtctccccgaagatgtgctctttcacatcctgaaatggctttctgtagaggacatcctggccgtccgagctgtacactcccagctgaaggacctggtggacaaccacgccagtgtgtgggcatgtgccagcttccaggagctgtggccgtctccagggaacctgaagctctttgaaagggctgctgaaaaggggaatttcgaagctgctgtgaagctgggcatagcctacctctacaatgaaggcctgtctgtgtctgatgaggcccgcgcagaagtgaatggcctgaaggcctctcgcttcttcagtctcgctgagcggctgaatgtgggtgccgcacctttcatctggctcttcatccgccctccgtggtcggtgagcggaagctgctgcaaggccgtggttcacgagagcctcagggcagagtgccagctgcagaggactcacaaagcatccatattgcactgcttgggcagagtgctgagtctgttcgaggatgaggagaagcagcagcaggcccatgacctgtttgaggaggctgctcatcagggatgtctgaccagctcctacctcctctgggaaagcgacaggaggacagatgtgtcagatcctgggcgatgcctccacagcttccgaaaactcagggactacgctcgcaaaggctgctgggaagcgcagctgtctttagccaaagcctgtgcaaatgcaaaccagcttggactggaggtgagagcttccagtgagatcgtctgccagctatttcaggcttcccaggctgtcagtaaacaacaagtcttctccgtgcagaagggactcaatgacacaatgaggtacattctgatcgactggctggtggaagttgccaccatgaatgacttcacaagcctgtgcctgcacctgaccgtggagtgtgtggaccggtacctgcggaggaggctggtgccgcggtacaggctccagctgctgggcatcgcctgcatggtcatctgcacccggtttatcagtaaagagatcctgaccatccgggaggccgtatggctcacggacaacacttacaagtacgaggacctggtgagaatgatgggcgagatcgtctccgccttggaagggaagattcgagtccccactgtggtggattacaaggaggtcctgctgacgctagtccctgtggagctgagaacccagcacctgtgcagcttcctctgcgagctctccctgctgcacaccagcctgtccgcctacgccccagcccgcctggctgccgcagccctgctcctggccagactgacgcacgggcagacacagccctggaccactcagctgtgggacctcaccggattctcctatgaagacctcattccctgcgtcttgagcctccataagaagtgcttccatgatgacgcccccaaggactacaggcaagtctctctgaccgccgtgaagcagcggtttgaggacaagcgctatggagaaatcagccaggaagaggtgctgagctacagccagttgtgtgctgcattaggagtgacacaagacagccccgaccccccgactttcctcagcacaggggagatccacgccttcctcagctctccctcggggcggagaaccaaacggaagcgggagaacagcctccaggaagacagaggcagcttcgttaccacccccactgcggagctgtccagccaggaggagaccgtgctgggcagcttcctcgactggagcctggactgctgctctggctatgaaggcgaccaggagagtgagggcgagaaggagggcgacgtgacagctcccagcggcatcctcgatgtcaccgtggtctacctgaacccagaacagcattgctgccaggaatccagtgatgaggaggcttgtccagaggcaaagggaccccaggacccacaggcactggcgctggacacccagatccctgcaacccctggacccaaacccctggtccgcaccagccgggagccagggaaggacgtcacgacctcagggtactcctccgtcagcaccgcaagtcccacaagctccgtggacggtggcttgggggccctgccccaacctacctcagtgctgtccctgcacagtgactcgcacacacagccctgccaccatcaggccaggaagtcatgtttacagtgtcgtcccccaagtcccccggagagcagtgttccccagcaacaggtgaagcggataaacctatgcatacacagtgaggaggaggacatgaacctgggccttgtgaggctgtaagtgtgtcagcacatttgccgcagtggatgtgtactgagggggctggaggcgaagggtgggagcatagcataggaacgctgcatagaccatggaggcctttgcgcagagagcagagaggatgacttgcggccaccaagtttctgtctccgcgggagtcccgtgcaagccatcagaatgttgaaatgagggtgaagagctcagatccctctctttggaaagtttagcctggaagcagttggccacactgtgtggagggcacctctctgtcccttccgtgtctcactgtctctggaagcttcagcccatgtgtgtcctggtgttcccagccccaccagagccccgtgccgggagctgacagctttcacgcttaaggcacgtgtgacctgggtagtcagacaccacttgagcccctgcccacatctgctggtttggggcttcagtggggagctgacagctgtgagcacaccactgtcccctcatccacctcggcctgcatggggcacccacttccttctgggtggggcttccatggtaagggggcctgcgtccctgcacactgcgaggactgccttgccacaggcccactccctacgacacgtgactcgttttagagctctgtcccagaggcgttcgtatgtgacccacagatggcgtcaatgtgaacacctctctttgtgctgaatttctgggccattcttttcctgtcttatttctaaatttccttcttccaagatgaaaacaaaagaaaaacttaaaacagaaggtattaaaaaaacaagagattcccaccattatttaggttcacctgcaaaacaaaaatcttactccagcccctcaatgccatcctgacacactttatgcaaaaagaattttcccagataggctagccagaaaaaacttcaagtcctctgtaacatctgaggtgaccaagaggcagaagagcagagcagtcgggggccgtgtcctggctgatcccaactgcagctctgctgtgggggcccgtgggagggaggcagacccctgggctttcctgctggccacggagactctgctcctgcatggaaagggagcctgggagccagcagcccacgcctggggagcctgcctggggccatgtgaccatggcctctccctgggaacgggctgaccacaacacaccctgctgccatccacttctgtttactctgcaaatgtaagaaagaaccacttggccagaagtgtcccccagatgcttttttttttttttttttggagacagttttgctcttgtctccccggctggagtgcagtggcatgatctcaactctcaactcactgtaacctccgcctcccggatactcctgcctcagcctcctgggtagctgggattacaagcacccaaccacgcccagctaatttttgtattttcggtagagacgggatttcaccatgttggccaggctagtctcgaactcatgacctcaagtgatccgcccacttcggtctcccaaagtgctgggattacaggcatgagccacggcgcctggcccccaaatgctcttgaaccggaaacccagggatgggagatgctcactgagctgctgcttttatgtgtgctggtgctatgtgtgttcatgtccgcggcagctgtctttttgctactataagggaattctggccaccctgggtggggtgtggtcggggtgagaacccaagcgttggaactgtagacccgtcctgtcgactgtgtgcccctgggcatgtgtgagcctcagtttcctcatctgtaaggggggcaatgatacctacctcacagggggttgtgaggattaaatgtgaggaggatagtggcaac

SEQ ID NO: 2016 - DNA, 458 bp, Homo Sapiens
tttttttgaacacaagggtcagtttcttcaattcatgagcagtcagaacaggagatgcttaggaaggaatcgtggctggtgcctcttctccatgctcatcccataccccagtgacaggataccgcttccctgaagttaaaaacatgcaccacacttccggtaaaggctggagccacagagggcacctagcaagcttgctttcaaggtcccatcaacaaatgagaagggcagccgaggacagattgacagaaaccccactatgttgcttttcttttttttttttttttttcctgagacaaagtcttgctctgttgcccaggctggagtgcaatggcacaatctcaactcactgcaacctccaccccctgagttcgagcaattctcctgccttggcctcccgagtagctgggattacaggcgcctgccaccatgcctggctaatttttgtatttttagta

SEQ ID NO: 2017 - DNA, 1950 bp, Homo Sapiens
tgtcagaacagtgttgcaggggctgctgcagggagccatttggacatctgcagggcccccccggaggcctcggatggccacgtagggtctgcctatcaggagaacccccagatgatcacagtcccccagagacagccagacccccggggacccagcctctcacagtcagtcctcccacccgagtgaccccgatggcggcctcccggctggcggcgctggaaggagtggactccggtcccagggtgcccggggccagccccggcttcctatattccgagggccagcggctggcactggaggctctgttgagcaagggcgcggaggcgttccagacctgcgtgcagcgcgaggagctgtggcccttcctcagtgcggatgaggttcagggcttggcagcggcagctgaagactggacagtggccaagcaggagcccagcgggatggcagagggagccaccaccgccgatgtggacgcgggcagcctgagctactggcctgggcagtcggagcagccggcgcccgtcctgcggctgggctggccagtggactctgcgtggaaaggcatcacccgggcgcagctgtacacccagcctcctggagagggtcagccgcccctcaaggagctggtgcggctggagatccaggctgcccacaagctagtggccgtggtcatggacgtcttcactgacccagacctgcttttggacttggtggatgctgccacgcgccgctgggtacctgtctacctgctcctggaccgccagcagctgcctgccttcctggaactggcccagcagctgggggtgaacccctggaacacggagaacgtggatgtccgtgtcgtgcggggctgcagcttccagagccgctggcgacggcaggtgagcggcaccgtgcgggagaagtttgtgctgctggacggcgagagggtcatctcaggatcctacagcttcacgtggagtgacgcacgcctgcaccgaggcctggtgaccctgctgactggtgaaattgttgacgccttcagccttgagttccggacgctgtacgcggcctcctgcccgctcccacctgcgcccccccagaaaccctcggtcataggtggcctgcagcggggccgcagcctgcaccgcgtgtcccgccgccgctccgtggcccccgcgtcgcctccgccgcctgacggcccgctggcccaccgcctggccgcctgccgcgtctcccctgctaccccggggccggcactcagtgacattctaaggagtgtgcagcgcgcccggacccccagcggccccccggcccggcccagccgctccatgtgggacctaagccgcctgtcccagctgtctggctccagtgatggggacaacgagctcaagaaatcctggggctccaaggacactccagccaaggctctgatgaggcagcggggcactggaggaggcccctggggggaagtggactcccgatctccgtggggcggtgccctgcccctgccccccgcccaccgcctccgctatctgtccccagcccgaaggcggttcggtggggatgctacattcaaacttcaagagcccagaggcatcaggccgtcagactgggccccccgggcaggacttggggggcaaccctgaacaggagcccaagccaaatctgctggcccacccaaggagcagtgccggacaactgtcggctcagagccctctgcctcaatgccctgccttggacaaggcttctggcctcggcgtctgtcaagcagaagggatgtttgtcacttgttctgcaacttgggctgggagtggtggctcatgcctgtaatccctgcactttgggaggctaaggtgggagggttgcttaaggcgaggagttggagaccagcctgggcaacatagtgagaccccatctctacaattaaaaaaacaaattagttgggaataaaaaaaaaaaaaaaaaaaa

SEQ ID NO: 2018 - DNA, 5541 bp, Homo Sapiens
cagtgccgtttaacctttattgtggtggagtccaccccgctgtgggcctcagataaccctgtacaaaagggaatggagattgcctgtatccacctagattcataagctgccctgaggcgatcttggcatcaagaaagacagcattgaggcacatctcaccatcagcttcagaggatgtcagcctttgatatgtcccatgatttctttttctgcttaacttcagaatgggaaatacaacctagaaccaaacggtcatcacttcagcagggttttttgaagaatcaaatattcactgggatacaaatgcagacaagaagctacagtggatggaaactctgtgagaattgtggagaggtcttcagtgaacagttttgccttaagacacacatgagagctcagaatggagggaacacttttgagggtaattgttatggaaaagacagcatcagtgtgcacaaggaagcctctattggacaagaactttccaaacttaatccatgtggaaaagtcttcaccttaactccaggccttgctgtgcatcttgaaattctcaatggaagacaaccctacgaatgtaaggaatgtggaaaaggctttaagtattttgcaagccttgataatcacatgggaatccacattggagagaaactctgtgaatttcaggaatgtgagagagccatcacaacttcctcacacttaaagcagtgtgtagcagttcatactggaaagaaatccgaaaagactaagaactgtgggaaatccttcactaatttttctcaactttctgcacatgcaaaaactcataaaggagagaagtcctttgaatgtaaagaatgtggaagatcctttagaaattcctcatcctttaatgttcacattcaaattcacactggaataaaaccacacaaatgtacggaatgtgggaaagccttcactagatcaactcaccttactcaacatgtaagaactcacactggaataaaaccctatgaatgtaaggaatgtggccaagccttcactcagtacacgggccttgctatacacatacgaaatcacactggagagaaaccctatcagtgtaaggaatgtgggagagccttcaatagatcttcaacgcttactcaacatagaagaattcacacaggagagaagccttatgaatgtgttgaatgtgggaagaccttcattacttcttcccatcgtagtaaacatttgaaaactcacagtggagaaaggtaaatgcaagatatgtgggaaagaatttctgtattcctcaccccacctgtgaactcctaccagagagaaaccttttgtatgtaaagaatttgggaaagcatttgctctttcctcatgcctaagtatgcatgaaagaattcacactggggagaaatactatgaatgtaaggatatgagtgttgttaccatttagcccattggttgccatctttaattattggcagtgcaaagatcatcagattagtcctaaatgccttttggaggttgtaatggctcacagattggccttagatgcatcccgagggtctgaaattaaacctacaggttctgaatacaacatcatggttacctgagtctgggcatctgtgaagaagggtcatggatggtgaggtcagtactgcaggctgcctcaccttggtgattagattcctaagatcatagcattaacaagttctgtacgagataaatcatgcagattgatcccagcccctgttggttagtggctgccagtgtggcacattcatgtcaaaatttaccagaagccaagatgatgtaggccccagaggtggattgttaaaaagatgctcctccaaggttctcttctgttcccatggatcctgcagagcatgtcaggagtgaaaccatccataactgccagtgccctttcacagctgattatttctatgtccccttcttgtaaaataagaagtgtgacaaccttgactgttctgttctgtcttctctgtccattttaggtggcacaatgtaagtggcagtgtctcttatagtataatccagtctctcttctcacttctgttaagatggctgatatagtccatgaatcccactcatgatctctttatcaaatgattgttcagccacactttgaggattctcttcagtacaagttttctaatttttgcagtatggataggctgagaattttccaaatctccaagttctggttcctttttccttaacaacttcttctgcaattcaggtctccttttgcatttttgccgagaccagctgggtcgtggagaccctaacccagtggctctagaggaattaagacaaagacacagaaatatagtgcagagtgggaatcggggctcacagccttcagagctgagcttgaacagagtttgtcccacatatttattgacagtaagcctgtgataaacattattcctatagattgtagatcagctataagtattccttatgagaaagaaagggacaggctctggcttgttatctgcaacaggaatatgtccttaaggcacaaatcactcatgctattgtttgtggtttaggaatgccttgagcagttttccagttttctgccctgggtgggccaggtgttgcttgccctcattctggtaaaccagcagcctccagcatgggcgtcatagccatcacgagcatgtcacagtgctgcagagattttgtttatggccagtttctcattgcctgtttatggccagatttggggggcctgttcccagcacattttcctgtaagcactcaggaataatgaagcttcctgtgtcctttaacactttaattacagatcttagtgatacataccattttatctgtctcaagctctaccttccgtaaaatgctagaatacagttctgccaagttcttcaccactttatatcaagggttgtcttttcttcatttcccaatagcatgttcctcattccccaatgacacctcaccagaataacccttaccaaccttatttccagcttgcacatcagaatttttccagcctctactcatttgtcagtttcaaagctgcttcacatttttagtttttttgtttgtttttaattgcagtacctcacttctcagtaccaatatctgccttagtcagctcagacaaccataagagaataccgcagaccaaatggcttagaaattaatttaattttaaatcaatgaggttaaaaacacaggatttttttttttttttttttttttttttgaaatggagttttgctcttgttgcccaggctggagtgcaatggtatgatcttggctcaccgcaacctccacctcctgagttccagtgattctcctgcctcaccctcagtagctgggattattggcatgcaccacaaaccttagctaagtttgtatttttagtagagacagggtttctccatgttggttaggctgatctccatgttggtcagatctgacctttggtgatccacctgccttggcctcccaaagtgctgggattacaggcctgagccaccgtatctggcccaaaacacaaatttatattctcacatatctggaggctggaagtctgagatcagagtgccagcatggtcaacctctagtgagagctctcttcctggcatgtaagtgcccacttcctcatgttttcacacgatggagaccaacaaataggtcggtcggtctcccccctccccgcccccttctcttttcacatacagtcacattgaggtttggaacttcatatgaaatttggggggtcactgtgtgtgtgtgtgtgtgtgtgtgtatgtgtatatatatatacatatatatacacatatgtatgtatacctaactcctaaagtggaacagtaagagtcattatttatagattatctgattctctatgtggaaagagaaaagaatcatattaagtactttggactgaacaatggcccccaaaattcgtatgacgatgaagctctctctaaatattttcttgctttactggactgattttaacccgctgcacaacaccaactaaaagtagtaataccagcatacttgtctttgcagttctggtgagatatgcactctattttgttggtttggctgtaggcttttatttcttttttattttttgaagaggttatgtcctgtcagggaaccagccccgatattcacataggttcttttctattttccctaagtgtcagccaacttgagaaataaagggacagagtacaaaagagagaaattttaaagctgggtgtccggggcagacatcacatgtcggtaggttccgtgatgccccacaagccgcaaaaaccagcaagtttttattagggattttcaaaaggggagggagtgtgcaaataggtgtgggtcacagacatcaagtactttacaaggtaatagaatatcacaaggcaagtggaggcagggcgagatcacaggaccaaggtgaaattaaaattgctaatgaagttttgggcaccattgtcattgataacatcttatcaggagacggttttgagatcaactggtctgactaaaatttattaggtgggaatttcctcttcctaataagcctgggagtgctatgggagactggggtctatttcacccctgcagtctcgaccataagagatggctacacccaggggggccagttcagagacccactcccaggtgtgcattctctttctcaaggatgttccttgctgagaaaaagaattcagtgatatttctcccatttgcttgtgaaagaagagaaatgtggctttgttccacctggctcaccggcggtcagaatttaaggttatctctcttgtttcctaaacattgctgttatcctgttcttttttcaaggtgcccagatttcatattgctcaaacacacatgctgtataatttgtgcagttaatgcaattattacagggtcctgaggtaatatacatcctcctcagctgacaggattgagagattaaagtaaagacaggcataggaaatcacaagggtattgactggggaagtgataagtgtccatgaaatctttacaatttatgtttagagattgcagtaaggacaggcataagaaattataaaagtattaatttggggaactaataaatgtccatgaaacctccacaatccatgtttttctgccatggcttcagccagtccccccgtttggggtccctgacttcctgcaacaatgtcctgcaggaaaagttttttctttatatccagtttttacatgatgaattatttcccaatatttcatagtttatgaggctgaattcctcttgaatttattaaatgcttccttcacatcctctgtgatgatcatgtttatttactgataaaactcaatacctagaactgcacctagctcatgatggtacctaataaatacttcaatgaaatgatgtggtgatgcatgcctatagttttagctacttgggagggtggcctgagcccaggggttctagaccagcttaggcaacatagcaagaccccatctcaaaaaaaaaagcatcagcaaaaacaaaaaaaaaaaaaaaaa

SEQ ID NO: 2019 - DNA, 432 bp, Homo Sapiens
  misc_feature (155)..(155): n is a, c, g, or t
  misc_feature (184)..(184): n is a, c, g, or t
  misc_feature (192)..(192): n is a, c, g, or t
  misc_feature (307)..(307): n is a, c, g, or t
  misc_feature (344)..(344): n is a, c, g, or t
  misc_feature (360)..(360): n is a, c, g, or t
  misc_feature (385)..(385): n is a, c, g, or t
  misc_feature (391)..(391): n is a, c, g, or t
  misc_feature (399)..(399): n is a, c, g, or t
  misc_feature (404)..(404): n is a, c, g, or t
  misc_feature (412)..(412): n is a, c, g, or t
tttttttttttgctgtgaaatcttttatttttgttttatgacacagcatcaatttcatgaatactttgaaagggccattagaaaaaataagagccaatttgggtcatttgagaaacattttcagcacaattacagtgggggcacgggccgttcgntaccagctgggttttcccagatgcaacantcgcggtnctggcttctccactggtggggatggggatcgcgccttcggagctctcagggcgcctgtctgtcgggggctgggtgcgtccacagcccctttgagggacctcatcccgatgggccnaggcagggggcttccccacgggttaaaaaagtttccngcctgggcttttgggnttccaagaaggaagggccaagggantggaanttgggccnttttncccttttnccttcttagaaaaaaatttt

SEQ ID NO: 2020 - DNA, 3410 bp, Homo Sapiens
gaattcgaggatccgggtaccatgggcggcggcaggcctagcagcacgggaaccgtcccccgcgcgcatgcgcgcgcccctgaagcgcctgggggacgggtatgggcgggaggtaggggcgcggctccgcgtgccagttgggtgcccgcgcgtcacgtggtgaggaaggaggcggaggtctgagtttcgagggagggggggagagaagagggaacgagcaagggaaggaaagcggggaaaggaggaaggaaacgaacgagggggagggaggtccctgttttggaggagctaggagcgttgccggcccctgaagtggagcgagagggaggtgcttcgccgtttctcctgccaggggaggtcccggcttcccgtggaggctccggaccaagccccttcagcttctccctccggatcgatgtgctgctgttaacccgtgaggaggcggcggcggcggcagcggcagcggaagatggtgttgctgagagtgttaattctgctcctctcctgggcggcggggatgggaggtcagtatgggaatcctttaaataaatatatcagacattatgaaggattatcttacaatgtggattcattacaccaaaaacaccagcgtgccaaaagagcagtctcacatgaagaccaatttttacgtctagatttccatgcccatggaagacatttcaacctacgaatgaagagggacacttcccttttcagtgatgaatttaaagtagaaacatcaaataaagtacttgattatgatacctctcatatttacactggacatatttatggtgaagaaggaagttttagccatgggtctgttattgatggaagatttgaaggattcatccagactcgtggtggcacattttatgttgagccagcagagagatatattaaagaccgaactctgccatttcactctgtcatttatcatgaagatgatattaactatccccataaatacggtcctcaggggggctgtgcagatcattcagtatttgaaagaatgaggaaataccagatgactggtgtagaggaagtaacacagatacctcaagaagaacatgctgctaatggtccagaacttctgaggaaaaaacgtacaacttcagctgaaaaaaatacttgtcagctttatattcagactgatcatttgttctttaaatattacggaacacgagaagctgtgattgcccagatatccagtcatgttaaagcgattgatacaatttaccagaccacagacttctccggaatccgtaacatcagtttcatggtgaaacgcataagaatcaatacaactgctgatgagaaggaccctacaaatcctttccgtttcccaaatattggtgtggagaagtttctggaattgaattctgagcagaatcatgatgactactgtttggcctatgtcttcacagaccgagattttgatgatggcgtacttggtctggcttgggttggagcaccttcaggaagctctggaggaatatgtgaaaaaagtaaactctattcagatggtaagaagaagtccttaaacactggaattattactgttcagaactatgggtctcatgtacctcccaaagtctctcacattacttttgctcacgaagttggacataactttggatccccacatgattctggaacagagtgcacaccaggagaatctaagaatttgggtcaaaaagaaaatggcaattacatcatgtatgcaagagcaacatctggggacaaacttaacaacaataaattctcactctgtagtattagaaatataagccaagttcttgagaagaagagaaacaactgttttgttgaatctggccaacctatttgtggaaatggaatggtagaacaaggtgaagaatgtgattgtggctatagtgaccagtgtaaagatgaatgctgcttcgatgcaaatcaaccagagggaagaaaatgcaaactgaaacctgggaaacagtgcagtccaagtcaaggtccttgttgtacagcacagtgtgcattcaagtcaaagtctgagaagtgtcgggatgattcagactgtgcaagggaaggaatatgtaatggcttcacagctctctgcccagcatctgaccctaaaccaaacttcacagactgtaataggcatacacaagtgtgcattaatgggcaatgtgcaggttctatctgtgagaaatatggcttagaggagtgtacgtgtgccagttctgatggcaaagatgataaagaattatgccatgtatgctgtatgaagaaaatggacccatcaacttgtgccagtacagggtctgtgcagtggagtaggcacttcagtggtcgaaccatcaccctgcaacctggatccccttgcaacgattttagaggttactgtgatgttttcatgcggtgcagattagtagatgctgatggtcctctagctaggcttaaaaaagcaatttttagtccagagctctatgaaaacattgctgaatggattgtggctcattggtgggcagtattacttatgggaattgctctgatcatgctaatggctggatttattaagatatgcagtgttcatactccaagtagtaatccaaagttgcctcctcctaaaccacttccaggcactttaaagaggaggagacctccacagcccattcagcaaccccagcgtcagcggccccgagagagttatcaaatgggacacatgagacgctaactgcagcttttgccttggttcttcctagtgcctacaatgggaaaacttcactccaaagagaaacctattaagtcatcatctccaaactaaaccctcacaagtaacagttgaagaaaaaatggcaagagatcatatcctcagaccaggtggaattacttaaattttaaagcctgaaaattccaatttgggggtgggaggtggaaaaggaacccaattttcttatgaacagatatttttaacttaatggcacaaagtcttagaatattattatgtgccccgtgttccctgttcttcgttgctgcattttcttcacttgcaggcaaacttggctctcaataaacttttaccacaaattgaaataaatatatttttttcaactgccaatcaaggctaggaggctcgaccacctcaacattggagacatcacttgccaatgtacataccttgttatatgcagacatgtatttcttacgtacactgtacttctgtgtgcaattgtaaacagaaattgcaatatggatgtttctttgtattataaaatttttccgctcttaattaaaaattactgtttaattgacatactcaggataacagagaatggtggtattcagtggtccaggattctgtaatgctttacacaggcagttttgaaatgaaaatcaatttaccccatggtacccggatcctcgaattc

SEQ ID NO: 2021 - DNA, 719 bp, Homo Sapiens
cagctaacaggtatggccacggggactgttattcgcaagctggttttccctgtgagggtgacgttagcattacccccaacctcagtttattcagtctgtttatgactacggtagcacaggagtgcaatagtgttttgctcgtgccgaattctgacacgaggcctctcaagctctcggcggctgtggaccagtcgttcacttcaaaatgtctactgttcactgacgttcctgtgcagagtctcatgcttgtgagggtgatcactctacacccccaagtgcatatgggtctgtcaaagcctatactaactttgatgctgagcgggatgcgttgaagcgattgaaacagccatctaagaccaaaggtgtggatgaggtcgaccatatgtcaacgagtttgaccaaccgcagcaatgcacagagacaggatattgccttcgccgtaccagataaggaccaaaaaggaacttgcatcagcactgaagtcagccttatctggccacctggagacggtgatttgggcctattgaagacacctgctcagtatgacgcttctgagctacaagcttccatgaaggggctgggaaccgacgaggactctctcattgagatcatctgctccagaacaacaggagctgcaggacattacagagtctccaggcatgtccagattgtctgaaaaggcatattcggaacattggggattccgaactgtggtcccg

SEQ ID NO: 2022 - DNA, 366 bp, Homo Sapiens
  misc_feature (297)..(297): n is a, c, g, or t
tttgtttaaatattacaatttattttactaattaaaacatttcataacagaaaagcaacttggaaaacagaaatctcagctcaagggcaaaggcaaactcttgaggaagaaggtggcccagaatcaaaggccaacagcaggttaagtgctaggtggtggagtcatggggaggagaggcttctaaactactcaggatgttggttaacggctggaactttgggagacctcgcagctaactacagggcaggcagcccattcacaaagtgggtaaatgttgattccttctgtgggtcttanaggatgcttatagagggtcacggctcaggcggtgttgcggggtgagctgtgctctctatttctgcctgc

SEQ ID NO: 2023 - DNA, 2616 bp, Homo Sapiens
atggcggctcctcccactggggggggggtggcgcggcggcggtggcatctgcggccatggcggcgactactgccaaccccgaaatgacatcagatgtaccatcactgggtccagccattgcctctggaaactctggacctggaattcaaggtggaggagccattgtccagagggctattaagcggcgaccagggctggattttgatgatgatggagaagggaacagtaaatttttgaggtgtgatgatgatcagatgtctaacgataaggagcggtttgccaggtcggatgatgagcagagctctgcggataaagagagacttgccagggaaaatcacagtgaaattgaacggcggcgacggaacaagatgacagcctacatcacagaactgtcagatatggtacccacctgtagtgccctggctcgaaaaccagacaagctaaccatcttacgcatggcagtttctcacatgaagtccttgcggggaactggcaacacatccactgatggctcctataagccgtctttcctcactgatcaggaactgaaacatttgatcttggaggcagcagatggctttctgtttattgtctcatgtgagacaggcagggtggtgtatgtgtctgactccgtgactcctgttttgaaccagccacagtctgaatggtttggcagcacactctatgatcaggtgcacccagatgatgtggataaacttcgtgagcagctttccacttcagaaaatgccctgacagggcgtatcctggatctaaagactggaacagtgaaaaaggaaggtcagcagtcttccatgagaatgtgtatgggctcaaggagatcgtttatttgccgaatgaggtgtggcagtagctctgtggacccagtttctgtgaataggctgagctttgtgaggaacagatgcaggaatggacttggctctgtaaaggatggggaacctcacttcgtggtggtccactgcacaggctacatcaaggcctggcccccagcaggtgtttccctcccagatgatgacccagaggctggccagggaagcaagttttgcctagtggccattggcagattgcaggtaactagttctcccaactgtacagacatgagtaatgtttgtcaaccaacagagttcatctcccgacacaacattgagggtatcttcacttttgtggatcaccgctgtgtggctactgttggctaccagccacaggaactcttaggaaagaatattgtagaattctgtcatcctgaagaccagcagcttctaagagacagcttccaacaggtagtgaaattaaaaggccaagtgctgtctgtcatgttccggttccggtctaagaaccaagaatggctctggatgagaaccagctcctttactttccagaacccttactcagatgaaattgagtacatcatctgtaccaacaccaatgtgaagaactctagccaagaaccacggcctacactctccaacacaatccagaggccacaactaggtcccacagctaatttacccctggagatgggctcaggacagctggcacccaggcagcagcaacagcaaacagaattggacatggtaccaggaagagatggactggccagctacaatcattcccaggtggttcagcctgtgacaaccacaggaccagaacacagcaagccccttgagaagtcagatggtttatttgcccaggatagagatccaagattttcagaaatctatcacaacatcaatgcggatcagagtaaaggcatctcctccagcactgtccctgccacccaacagctattctcccagggcaacacattccctcctaccccccggccggcagagaatttcaggaatagtggcctagcccctcctgtaaccattgtccagccatcagcttctgcaggacagatgttggcccagatttcccgccactccaaccccacccaaggagcaaccccaacttggacccctactacccgctcaggcttttctgcccagcaggtggctacccaggctactgctaagactcgtacttcccagtttggtgtgggcagctttcagactccatcctccttcagctccatgtccctccctggtgccccaactgcatcgcctggtgctgctgcctaccctagtctcaccaatcgtggatctaactttgctcctgagactggacagactgcaggacaattccagacacggacagcagagggtgtgggtgtctggccacagtggcagggccagcagcctcatcatcgttcaagttctagtgagcaacatgttcaacaaccgccagcacagcaacctggccagcctgaggtcttccaggagatgctgtccatgctgggagatcagagcaacagctacaacaatgaagaattccctgatctaactatgtttccccccttttcagaatagaactattggggtgaggataaggggtgggggagaaaaaatcactgtttgtttttaaaaagcaaatctttctgtaaacagaataaaagttcctctcccttcccttccctcacccctgacatgtaccccctttcccttctggctgttcccctgctctgttgcctcctaaggtaacatttataaaaaaaaaaaa

SEQ ID NO: 2024 - DNA, 3756 bp, Homo Sapiens
atgagtacagaaagagactcagaaacgacatttgacgaggattctcagcctaatgacgaagtggttccctacagtgatgatgaaacagaagatgaacttgatgaccaggggtctgctgttgaaccagaacaaaaccgagtcaacagggaagcagaggagaaccgggagccattcagaaaagaatgtacatggcaagtcaaagcaaacgatcgcaagtaccacgaacaacctcactttatgaacacaaaattcttgtgtattaaggagagtaaatatgcgaataatgcaattaaaacatacaagtacaacgcatttacctttataccaatgaatctgtttgagcagtttaagagagcagccaatttatatttcctggctcttcttatcttacaggcagttcctcaaatctctaccctggcttggtacaccacactagtgcccctgcttgtggtgctgggcgtcactgcaatcaaagacctggtggacgatgtggctcgccataaaatggataaggaaatcaacaataggacgtgtgaagtcattaaggatggcaggttcaaagttgctaagtggaaagaaattcaagttggagacgtcattcgtctgaaaaaaaatgattttgttccagctgacattctcctgctgtctagctctgagcctaacagcctctgctatgtggaaacagcagaactggacggagaaaccaatttaaaatttaagatgtcacttgaaatcacagaccagtacctccaaagagaagatacattggctacatttgatggttttattgaatgtgaagaacccaataaccgactagataagtttacaggaacactattttggagaaacacaagttttcctttggatgctgataaaattttgttacgtggctgtgtaattaggaacaccgatttctgccacggcttagtcatttttgcaggtgctgacactaaaataatgaagaatagtgggaaaaccagatttaaaagaactaaaattgattacttgatgaactacatggtttacacgatctttgttgttcttattctgctttctgctggtcttgccatcggccatgcttattgggaagcacaggtgggcaattcctcttggtacctctatgatggagaagacgatacaccctcctaccgtggattcctcattttctggggctatatcattgttctcaacaccatggtacccatctctctctatgtcagcgtggaagtgattcgtcttggacagagtcacttcatcaactgggacctgcaaatgtactatgctgagaaggacacacccgcaaaagctagaaccaccacactcaatgaacagctcgggcagatccattatatcttctctgataagacggggacactcacacaaaatatcatgacctttaaaaagtgctgtatcaacgggcagatatatggggaccatcgggatgcctctcaacacaaccacaacaaaatagagcaagttgattttagctggaatacatatgctgatgggaagcttgcattttatgaccactatcttattgagcaaatccagtcagggaaagagccagaagtacgacagttcttcttcttgctcgcagtttgccacacagtcatggtggataggactgatggtcagctcaactaccaggcagcctctcccgatgaaggtgccctggtaaacgctgccaggaactttggctttgccttcctcgccaggacccagaacaccatcaccatcagtgaactgggcactgaaaggacttacaatgttcttgccattttggacttcaacagtgaccggaagcgaatgtctatcattgtaagaaccccagaaggcaatatcaagctttactgtaaaggtgctgacactgttatttatgaacggttacatcgaatgaatcctactaagcaagaaacacaggatgccctggatatctttgcaaatgaaactcttagaaccctatgcctttgctacaaggaaattgaagaaaaagaatttacagaatggaataaaaagtttatggctgccagtgtggcctccaccaaccgggacgaagctctggataaagtatatgaggagattgaaaaagacttaattctcctgggagctacagctattgaagacaagctacaggatggagttccagaaaccatttcaaaacttgcaaaagctgacattaagatctgggtgcttactggagacaaaaaggaaactgctgaaaatataggatttgcttgtgaacttctgactgaagacaccaccatctgctatggggaggatattaattctcttcttcatgcaaggatggaaaaccagaggaatagaggtggcgtctacgcaaagtttgcacctcctgtgcaggaatctttttttccacccggtggaaaccgtgccttaatcatcactggttcttggttgaatgaaattcttctcgagaaaaagaccaagagaaataagattctgaagctgaagttcccaagaacagaagaagaaagacggatgcggacccaaagtaaaaggaggctagaagctaagaaagagcagcggcagaaaaactttgtggacctggcctgcgagtgcagcgcagtcatctgctgccgcgtcacccccaagcagaaggccatggtggtggacctggtgaagaggtacaagaaagccatcacgctggccatcggagatggggccaatgacgtgaacatgatcaaaactgcccacattggcgttggaataagtggacaagaaggaatgcaagctgtcatgtcgagtgactattcctttgctcagttccgatatctgcagaggctactgctggtgcatggccgatggtcttacataaggatgtgcaagttcctacgatacttcttttacaaaaactttgcctttactttggttcatttctggtactccttcttcaatggctactctgcgcagactgcatacgaggattggttcatcaccctctacaacgtgctgtacaccagcctgcccgtgctcctcatggggctgctcgaccaggatgtgagtgacaaactgagcctccgattccctgggttatacatagtgggacaaagagacttactattcaactataagagattctttgtaagcttgttgcatggggtcctaacatcgatgatcctcttcttcatacctcttggagcttatctgcaaaccgtagggcaggatggagaggcaccttccgactaccagtcttttgccgtcaccattgcctctgctcttgtaataacagtcaatttccagattggcttggatacttcttattggacttttgtgaatgctttttcaatttttggaagcattgcactttattttggcatcatgtttgactttcatagtgctggaatacatgttctctttccatctgcatttcaatttacaggcacagcttcaaacgctctgagacagccatacatttggttaactatcatcctgactgttgctgtgtgcttactacccgtcgttgccattcgattcctgtcaatgaccatctggccatcagaaagtgataagatccagaagcatcgcaagcggttgaaggcggaggagcagtggcagcgacggcagcaggtgttccgccggggcgtgtcaacgcggcgctcggcctacgccttctcgcaccagcggggctacgcggacctcatctcctccgggcgcagcatccgcaagaagcgctcgccgcttgatgccatcgtggcggatggcaccgcggagtacaggcgcaccggggacagctga

SEQ ID NO: 2025 - DNA, 6219 bp, Homo Sapiens
gagaagaagtggcaggtgatgctgaagcgggggagaagcggcagagccggccacacagtgcaggggatggagacaggtgctgggctggtcctcctgcagcatcctcagttgttggagggcagtcatcctcaggccgtacccagccagagaagaaaaagaacagtgtgaagccacgtgtgatagccgtccaacatcggctcttccctccaattacattgtagttgattgtgtctcaaaccatgaattatgtgggacagctggctgggcaggtgattgtcactgtgaaggaactctacaagggcattaaccaggccaccctctctgggtgcattgatgtcatcgtggtacagcagcaggatggcagctatcagtgttcaccttttcacgttcggtttggaaagctgggagtcctgagatccaaagagaaagtgattgatatagaaatcaacggcagtgcagtggatcttcacatgaagttgggtgataacggagaagctttctttgttgaggagactgaagaagaatatgaaaagcttcctgcttaccttgccacctcaccaattcctactgaagatcagttctttaaagatattgacacccctttggtgaaatcgggtggagatgaaacaccatctcagagttcagacatctcacacgtcttggaaacagagacaatttttactccaagttctgtgaaaaagaaaaaacgaaggagaaagaaatacaaacaggacagtaagaaggaagagcaggccgcatctgctgctgcagaagacacatgtgatgtaggcgtgagctccgatgatgacaagggggcccaggcagcacgaggatcttcaaatgcttccttgaaagaagaagaatgtaaagagcctttgctcttccattctggggatcattaccccttatctgatggagattggtcccctttagagaccacctatccccagacagcgtgtcctaagagtgattcagagctggaggtgaaacctgcggagagcctgctcagatcagagtctcacatggagtggacgtggggcggattcccagagtccaccaaggtcagcaaaagagaacgatctgaccatcatcctaggacagctacaattacaccatcagaaaatactcattttcgggtaattcccagtgaggacaacctcatcagtgaagttgagaaggatgcttccatggaagacactgtctgtaccatagtgaagcccaaacccagagccctgggtacacagatgagcgacccaacatctgtggcagagcttctcgaacctcctcttgagagtactcagatttcatctatgttagatgctgaccaccttcccaacgcagccttagcggaggcgccctcagaatccaaaccggcagctaaagtagactcgccgtcaaagaagaaaggtgttcacaaaagaagccaacaccagggacctgatgatatttaccttgatgacttaaagggtctagaacctgaagttgcagctctttatttccctaaaagtgaatcggagcccggttccaggcagtggcccgagtctgacacactctctggctcccagtccccacagtccgtgggaagcgcagctgcagatagcggcaccgagtgcctctcagattctgccatggacttgcctgacgttaccctctccctttgcgggggcctcagtgaaaatggagaaatttcaaaagaaaaattcatggagcatatcattacttatcacgaatttgcagaaaaccctggacttatagacaatcctaaccttgtaataaggatatataatcgttactataactgggctttggcagctcccatgatccttagcttgcaagtattccagaagagcttgcctaaggccacagttgagtcctgggtgaaagacaagatgccaaagaaatctggtcgctggtggttttggcgaaagagagaaagcatgaccaaacagctgccagaatccaaggagggaaaatctgaggcaccgccagccagtgacctgccatccagctccaaggagccggccggtgccaggccggccgagaatgactcctcgagtgacgagggatcacaggagctcgaagaatccatcacagtggaccccatccccacagagcccctgagccacggcagcacaacttcatataagaagtctctccgcctctcctcagaccagatcgcaaaactgaagctccacgatggcccaaatgatgttgtgtttagtattacaacccagtatcaaggcacctgtcgctgtgcagggaccatttacctgtggaactggaatgacaagatcatcatttctgatattgatgggacaataaccaagtcggatgctttgggacagattctcccacagctgggcaaagactggacccaccagggtatagcaaagctctaccattccatcaatgagaatggctacaagtttctgtactgctcggctcgtgccatcggcatggccgacatgacccgtggctacctgcactgggtcaatgacaagggcacaatcttgccccggggccccctgatgctgtcccccagcagcttgttctccgccttccacagagaagtgatagaaaagaaaccagagaagttcaaaattgagtgtctaaatgatatcaagaatctgtttgccccgtctaagcagcccttctatgctgcctttggaaaccgtccaaatgatgtctatgcctacacacaagttggagttccagactgtagaatattcaccgtgaaccccaagggtgaattaatacaagaaagaaccaaaggaaacaagtcatcgtatcacaggctgagtgagctcgtggagcatgtgttcccccttctcagtaaggagcagaattccgcttttccctgcccggagttcagctccttctgctactggcgagacccgatccctgaagtggacctggatgacctgtcttgaggtggcacctcagtgggtgggcagggcttggtccccctccccacagcaagggaaggcagctggctcttctgctgacctcagataccagccttccccagcggggacgggtgcttctggagctggtcccgccatcctcctttgccttcccaggccagctgctcaggctcggcaggtctgcagctcagctcctggaaggagaagggaggaactgggcctggggctggaggcctgggatccctcctttgtgggtcgcacacatgtttcctgctgtgagctggggcctccttccattgcatcattttaaaggaagaaaaaagcagctaaaaaagagtggaccaaaacactgcacacagtgaagtgttccagtttccactgggcagttgaggtggcttctgtaaccagggctgtcttcagatgtcagggtccctgaactgctgcgggcccagtcagtgatgctggctgaagctgcctgtgcacgtttcttctctggtcgcctcatttcctgctacactgaaggggtcagctgctccagtgggccaagttgggcaggacccccgcccctgcagggcccatgcaccagagccactgagcccagtcccataaacctggccctctttggggaaagatccccacagagcatcctcctctcatctgtgccaactccacgagcccttaatttcttagtcctcaccagaagaacaggtctcacaagtatatatttgatgtctgtaataaaagtgggaaggtgggtcttaaaacagaccaaaccccgccccgcccccaacaactctgcttttagggaggcctccgaaatgcagataggcggttgagtggggtcctgggaagagcgctgaatccctctgcttgctgcctggtgtgggcctttggaaagcatcttgccttgggacaggatttctaaaattctgtgattcagatttgtcagggaagcacagtgaagcttgcttaaaggcactggccagcagtgtgtgactttggcttttgggatcacaccctgtaatcgggcccgtggaagcagcgtcaaagaggggtcttggagctcctatggagcagactgccccccgagcagtgtccccagcctagccctgtgagaccccatggggacacgggtgcctatgtattttcactaaaatatacatggtagctccatttactgatgcggttgtaatgagctcacatcgtgtctgaagagatggcaccagggaaaggtgtgccataagctgctccagagcttttggtatgctgagtgttgacagagctgcactcttaacatcaagagaactgtcaggagcccagaaccaaccccaggtcttggtctccattggcgagaacacaggacgtggtggttcctgagcagagagggatctgcagatacaggcttggcgctcggggtggtctcgtggccaactcttcatgcccctgccgttgtagtggaacctctacatgttttagtttgcttcacctaaaataatgctgatctagagatagagaaataggggtggttatttttccagattggagagttgaaagtccctgactgatttcagccattttcctagtgcttgtcggatgcagagacaatgttgaaatcccctaaacacagttctcagtggcaaaacctaggaaggctcatgttcccagagaagggaccacatgagccttctcccatgcaaagcttcccccagcttaaatagttgataaggactaattgtttaatgagtttatttatctacagtaggttagggatcctgggttctgtttatatgaagttcttcccagtttgtgaattctagtacagcagccatgcagccaccttatttcatagatgccatctgtgtgtcctcttgactaccttctatttagaggaagaatgagagctttgtgtgtttaactgagcttatagtaggacttctttgcatatgtatggtactgaaaaatcttaatatacatctttaatcctttttaggttgtcctttaaagagtttttgactagtttctttttcttgacagctcttctctttggacacatgggccttcttagagggttcagtctaggacccggctctcctggccctgtgttgagggcagctggtccctctgtccctgtgtctgctagcactagactttgttgctgcagattgatccagtgggtacataggctaattaatgtgagtctttccttgtttaaaggagtccctcttgctgaaagtagatgattactattgctgtagtgttaggaaagtattaagtttgtgctgaaaatccattgccatttggtacaaatgacatttgttctttctgtgaaagagatgccctcgagtgtgtttgtacacaaacccttaggatggtgagttgaagcatcaccctcgcgctatcttcagtgacgggtgacggctcagggagatggcaggcagattgggctctaagtcattattctctcagttactccattggtgaaatggccctttccctgtttgcagttcagtctaagtctcgtatttgctttgctgtctgtgtgctgaagctcgtcccgtgtgagttgctgtctgccccttgtcaggctgtgaggtgctcgtgtagacctggagcatgcaggctgcctccgtttttgggtactgtgttgtgttttgctctgtctaaaaacatctgcatagttttcaactggaaaaagaaaaaacttaaaaatgggatgtcctaaaatgaaagctgctcaaagtcacagaacaaccgagggacaaaggagattggatgactgggaagcgctggcccggaacagcccctgcaactgtggggcctgcacacagcccttccacagttggcactgcaggtgcaggccaaccctttaaagaataaacaaggaagtcagctctttcactttttacaagttggcaaaaacagacttccggggaatttcgatgttttcccgtgttgtagagcttccagggtttaataaaactggttaaaaattgagtctttccctgaagtaagtgctctttccagatgaaaactactcttttggttttgtttgaaagtaagaaagggaggggaaactttgctcttttaataattatgttcagcctatgatgaagtatttgattattagacagcaatgtcactaataagttttaagttgtccaaagttaattgtaaacatcatcagtacagtactcttagttacagtaaagcaattgttgcaagatgaatggctaatattttggtgcagtgtttgatgttcaaaacaaaatgttacaacaataaacgaacataacat

SEQ ID NO: 2026 - DNA, 6540 bp, Homo Sapiens
tgctgatcgctcgtgccggtgcggccgttaaccgcccttgccggagccctaggctcaaaagcagccccttacccttcctgggcttcccccaacccctttcccggtctgccctggggcatgagcagcgatggccggctgcatccctgaggagaaaacttaccggcgcttcctggagctattcctgggcgagtttcgcggaccgtgcggcggcggcgagccggagccggaacccgaacccgaacccgaacccgaacccgagtccgagcccgagcccgaacctgaactggtagaagctgaggcggccgaggcttcggtagaggaacccggggaggaggcggccacggtagccgcgacggaggagggggaccaggagcaagacccggagcccgaggaggaggcggcggttgagggtgaggaggaggaggagggcgcggcgacggcggcggcagccccggggcactcggccgtgccgccgccgccgccccagctgccgcctttgcccccgctcccgcgaccgctgtcagagcgcatcacccgcgaggaggtggagggcgaaagcctggacctgtgcctgcagcagctctacaaatataattgcccttcctttttggctgctgctttagccagagccacatcagatgaagtccttcagagtgatctttctgcacattatatcccaaaggaaacggatggcacagaagggactgtggagattgagacagtgaaattggcccgttctgtcttcagcaaactacacgagatttgctgcagctgggtgaaagacttccccctccgcaggagaccccagctttattatgagacatcaatccatgccatcaaaaacatgcgcaggaaaatggaggacaaacatgtctgcattcctgactttaatatgctcttcaacctagaggaccaggaagaacaagcttactttgcagtgtttgatggccatgggggagtagatgctgctatttatgcctccattcacctccacgttaacttagtccgccaggagatgttcccccatgatcctgctgaggccctgtgcagggccttccgggtcactgatgagcggtttgtgcagaaagcagccagggagagcttaagatgtgggaccacaggagtggtgactttcatcagaggcaacatgctacatgtggcctgggtgggtgattcccaggttatgcttgtgagaaagggccaagctgttgaactaatgaagccacacaaaccagacagagaggatgaaaagcagagaattgaggcccttggaggttgcgtagtctggtttggtgcctggagggtgaatggaagtctgtcggtttccagagctattggagatgctgaacataagccatatatctgtggggatgcagattctgcctccactgttctggatgggaccgaagactacctcattctggcctgtgatggcttctatgacaccgtgaaccctgatgaggcagtgaaagttgtgtccgaccacctgaaagagaataatggagacagcagcatggttgcccacaaattagtggcatcagctcgtgatgctgggtcaagtgataacatcacggttattgtggtattcctgagggacatgaacaaagctgtaaatgttagtgaggaatcagattggacagagaactcttttcaaggagggcaagaagatggtggggatgataaggagaatcatggagagtgcaaacgcccttggcctcagcaccagtgctcagcaccagccgacctaggctatgatgggcgtgtggattcattcactgatagaactagcctgagcccagggtcccaaatcaacgtgctggaagacccaggctacctagatctcacacaaatagaagcaagcaaacctcacagtgcccagtttttgctaccagttgagatgtttggtcctggtgcaccaaagaaagcaaatcttattaatgagttaatgatggagaaaaaatcagttcagtcatcattgcctgaatggagtggtgctggagagtttcccactgctttcaatttgggttcaacaggggagcagatatacagaatgcagagcttgtctcctgtctgttcagggttggaaaatgaacagttcaaatccccgggaaacagagtttctagattgtctcatttacgccaccactactcaaagaagtggcacagattcaggtttaatccaaagttttattcatttctctctgctcaagagccttcccacaaaataggcactagcctgtcctcacttactggaagtgggaagagaaataggataagaagttctctgccatggaggcaaaatagttggaaagggtacagtgaaaacatgaggaagctcagaaagactcatgatattccatgcccagatcttccttggagctataaaatagaataatttttctttcaagtaggttagctagctctcccccaataaaaataccactatcagagtagaaacaaggtagacatttctaaaacatatgtgcttcattatgaatccatggatggctcaattcttaaatgtaaatagatctctaggaaactcaaagtacagtgttttcaatctaaaaagaagtattggcagtttcacttgcaaaattacacagctggtccctgtgatgtgtctcgacaccaatacacaacccccttcccaccatccttcatgtcactagatacacaacccccttcccaccatcccttcagtcactagtggaagctttcaagttagttatttcagtcaggatatacagtgttgaaatctcaatgcagttgaaatctggtctgatgtgcctaatttatctgtggaaaatttaatgctgaattacatttggttgggaaatgtccctcaaaatcctgggcactatgaaggaaccccctgccccctcacctttttgggtaggtaaaagactaaaagccatatggattttaactgataacaatgaaagtggtaaatcagtgtaaaagtgtcatattctcagacttgtgaggcggtttatagtcagaaagatttacggatttttttcctgtaacataaaagattgtgaactttttttaattaaaaaatatttcctagggctgtagttatttgggagtttcataacctgttatggtgcttttggtggaaatttttattatttagcattttaggagaccgctgtcaactggttttaatctatgatgctaatgtgttttccactgtaccctcatctcaggaataaaactgctttaacggagatgatgtcaggtacaaatacactatagagtcaaaataccatttacaaagaaaatcaaaagcatttctatattttgtctttttttagttcagacagcaaaggcatgtactactataaaatacaaagtgattttagagaatgaaaaatgctacttttatcttctctaaaattatttcccccaaggtagtgaagtaattggaatgaaggaggctgaaagtattgtctaaagtgagcccagaggccactgagaatgcagattactgacagccaggtctgtttagttgtaattggaagacacatgagtgtcctgcttacatgtagcttcagactgcagagacaggacgtgtgcttttcatttcaatatttagttatatttgatattttgaaactgtctgctttttgctatttctgcagtttcaagttagttagaagcatgttgtcaactaaagacaacaaactatcagattcattcattcagtgaagcagcctctgattctctaagagtcacgaatgtcttagtgttaccctcccctagtcaacagcagaccagcctggccaatgcctatgggtggcccctctggagtgctcactaacaagggtgagtgctctcgctaagaagtgtcccccgcctaatcatgtgtttataggatagtacacgttccccaggcccataacagaggactaaaatctctgaattttaaagacacagatgactggcatattttggataccagtatagctatatcaaatagacaaaaacagcttcactttagcaatgatcagattgttaatctacagattttattttttaaaatttggatgtaagtagagactttcagtatttgttttctcttgattttgaagtcatttcttcttctcacgtctgtgacaaatggttgaaaaggagtcaacatggccccaactatagtgccggaaccttttcatcattctgaggctttgccccacacatggtcctcactcatatctgtcaccttctgaagcctagatcttgttaacccatcaggtgcagtgtcagtttcaaatcaaattatctaagaaaacaagaaaacaaaggcagcagactattggtacacattatagtccaaagtgcttagcgaagtaaaaaaaaaagctttttaaaatttctattgttgtctattggtaatgtttttgatcagaataaagagggtaaagggaaaaagttactacacatgctaggctttctcagtggggaaaaaaatggctggatagaactgggacaaacacagacccatctttaggggtctggattttgtaggtccgactacacagcagtgttaactcatttctcatgccattagctctctacaaaataaagcaaagtagttctagtgtggtcgttataaaccaatattgtgaaaaatagcaactattcatttgttcacaacatgcgtatttatagagtagttaggtaccatttgtaaggtaaatcctttaaaattctataatacatactaaaatagtggttattggtctgatatatgctgctcttggttctataaactagataaaagcagtgctttgtgaaatgcagtgttctctcttaacgccactggtgataggaagtagttcccttcagttcaaatcctgtgcccttatttgctgcttgctgacgtaagcaataagtaaccctctaactaatggtatctacatatttctgtaacttgtatttaatgatggtgtacctggtgattgtaaaaatattagacagatataaaagtatctatataatatctataaactgttaatgctgaggtatagtctgtgaattatgtgttttgtatttttattcattgtgtaatttagtggtggtgaaagttctacactcaatccttaaagagtggcagtatccctttttcaatttaacatggtctgcatcaatctgtttgcctgctaaacaagttagaataggaaatagtaaaataaatccaaacaagagtgtaatattggttagggaaacaaacttcaggtcaccaactgaagtcattacaaactccttgtacattcactgtgagtttcaaagggagtcagtccctaatttacaggtttcctttgttcactttctagatgtgtacttttgagggacatgaggttaggcaacattacagcaacacacactggggctattaatcccatttaggtctgtactaaagaggatgggtagaaacacatatgtatataccttttctttacctagaagtgccatccattgtccttgaattattatgattaaagttactgttgcatttaggaggctccttgaaagtaacaccttttccaaggacaatggcaacaatgtcaatgtcaacactgagtctaattttgaccacatttatagtggtatagtgtcaatactgcattttcatgacaaccacactccactgttgaaacactgtgccagtgagaagtgcaacatccagtgggcagatgaaaatgatgcatggccaagttcagtgtttacagataaaactgctgtggttcaagtgcttccttccccatcaaatccttgataaggctttgtgggaaaatgatctaaattattgttttaatttttaaacctaatttattcactcagtgaacattcttacctaagcaaggctataaaagggaatactacagttttgtccacactttaatttgagaccatttttctttgaatcgtaagttagcaaaagaaatttttttcacctttgaaaatcacgtgatgttaaaggacaaatgcccactcttctattctgatctgcaaatagcttaaatgtctcttgcaaaacaaagtaagataccaccagtattacaacacaatgattttccagacaaatggtatggtgttgaaaaataactgttacttcttaaagcagcattttatcttctattttgaagactatttattgtaataattagaaaacatgaaatagggaactccagactgacacagcagttgtttttgaaaaggaaataaactttgatgaattagataatccagatacatcattgtaaactcttactctaggtgctctttggtgagagacaggctttgttctcttgttcataacatttctctgcaaagaattctctatggagtgaagcgaatgaagtgaataatttcttaccaaataaatttatcaatttacaaatctgctctacatctcacttttgagttcagttgtagtcatgagtgatccttcatattttattaaaagtgttcattcaggtaaggtgtatgttgaaattttgccaattatcttaataaaacctggcaatttaaaaa

SEQ ID NO: 2027 - DNA, 678 bp, Homo Sapiens
tgacctctaatgatatttattgttttgtaaatccattttgtgtgattttattatagctcctcagctctcttctgattcctgtttgcatgatatattgttttccatcattcgaactggttaccatttgcatggtatactgttttccatcattttactttcaacttacttctttctgtaagtctaaaatgtgtcttatagacaacctgtacttggatgtaccttttttatccaggcaaataatccttgccttttgattggaatatttagttcatttacatttaacagaattaataatatggttggatttatttctgctattttactatttgttttccatatgtcttacatcttttttgttccactttctcctttattgccctcttctgtttcagcaagtatttttcagtgtgtcattttaattcctgttaattttttgctattaaaaaaattgtaattgggtgctgtagggattgtatgcatcagtcttcttcaggttagtactgactcagttctggtaaaatagggcaactttgccccgctgtagctccattttcactttcttatggtataaatccaagaataccaggaaatattttttgcttttcaccagtttgtcttttaaggccttatggaaaaaaaaaaaaaaaaacttgagggggggcccggtcccaatttttc

SEQ ID NO: 2028 - DNA, 573 bp, Homo Sapiens
ttttgcataacaagtttatttttttaaaaggcatatagacaataaacaaagtaaataatcagatcttaacttctgtcctagacttgttccgttaagttctagtctgtgagcacttgtagttcaataatcgtcatcttcatcagagtccattacttttcttctgttgaatttcactgttgttgtcttttctgtttgttggcttacttttttaaggatttctattaaaccttgttctgataccttctcacttagttgtccatatcttgccatctgtataaggtaattctctactgctttagttttttcaggctttacaagtgctaagttacttaacctggcccgggccgactgatccagaacttgggctaagatactgtttctcatttctgcttccctgtgctttgcttcctgttgggccgcatcaccaggatccccgtgtttggcctgcagctcggccagcctctgtctcctcagcgcctcaagctcctcgtccgccatggctcggcgtcacgctggagcagccgcggtcactctcgcagcccttcgtcgcagtcgtttctcttgttttttttg

SEQ ID NO: 2029 - DNA, 14756 bp, Homo Sapiens
ctgggcggccgggcgcggggagagggcgcgggagcggctcgtgcggcaggtaccatgcggacgcgcgagcccggcgaggccccggcaggcccgtccctgctcgggggcgcgctgagacggcgggtgagctccacgagagcgccgtcgccacttcgggccaactttgcgattcccgacagttaagcaatggggagacatttggctttgctcctgcttctgctccttctcttccaacattttggagacagtgatggcagccaacgacttgaacagactcctctgcagtttacacacctcgagtacaacgtcaccgtgcaggagaactctgcagctaagacttatgtggggcatcctgtcaagatgggtgtttacattacacatccagcgtgggaagtaaggtacaaaattgtttccggagacagtgaaaacctgttcaaagctgaagagtacattctcggagacttttgctttctaagaataaggaccaaaggaggaaatacagctattcttaatagagaagtgaaggatcactacacattgatagtgaaagcacttgaaaaaaatactaatgtggaggcgcgaacaaaggtcagggtgcaggtgctggatacaaatgacttgagaccgttattctcacccacctcatacagcgtttctttacctgaaaacacagctataaggaccagtatcgcaagagtcagcgccacggatgcagacataggaaccaacggggaattttactacagttttaaagatcgaacagatatgtttgctattcacccaaccagtggtgtgatagtgttaactggtagacttgattacctagagaccaagctctatgagatggaaatcctcgctgcggaccgtggcatgaagttgtatgggagcagtggcatcagcagcatggccaagctaacggtgcacatcgaacaggccaatgaatgtgctccggtgataacagcagtgacattgtcaccatcagaactggacagggacccagcatatgcaattgtgacagtggatgactgcgatcagggtgccaatggtgacatagcatctttaagcatcgtggcaggtgaccttctccagcagtttagaacagtgaggtcctttccagggagtaaggagtataaagtcaaagccatcggtgacattgattgggacagtcatcctttcggctacaatctcacactacaggctaaagataaaggaactccgccccagttctcttctgttaaagtcattcacgtgacttctccacagttcaaagccgggccagtcaagtttgaaaaggatgtttacagagcagaaataagtgaatttgctcctcccaacacacctgtggtcatggtaaaggccattcctgcttattcccatttgaggtatgtttttaaaaggacacctggaaaagctaaattcagtttaaattacaacactggtctcatttctattttagaaccagttaaaagacagcaggcagcccattttgaacttgaagtaacaacaagtgacagaaaagcgtccaccaaggtcttggtgaaagtcttaggtgcaaatagcaatccccctgaatttacccagacagcgtacaaagctgcttttgatgagaacgtgcccattggtactactatcatgagcctgagtgccgtagaccctgatgagggtgagaatgggtacgtgacatacagtatcgcaaatttaaatcatgtgccgtttgcgattgaccatttcactggtgccgtgagtacgtcagaaaacctggactacgaactgatgcctcgggtttatactctgaggattcgtgcatcagactggggcttgccgtaccgccgggaagtcgaagtccttgctacaattactctcaataacttgaatgacaacacacctttgtttgagaaaataaattgtgaagggacaattcccagagatctaggcgtgggagagcaaataaccactgtttctgctattgatgcagatgaacttcagttggtacagtatcagattgaagctggaaatgaactggatttgtttagtttaaaccccaactcgggggtattgtcattaaagcgatcgctaatggatggcttaggtgcaaaggtgtctttccacagtctgagaatcacagctacagatggagaaaattttgccacaccattatatatcaacataacagtggctgccagtcacaagctggtaaacttgcagtgtgaagagactggtgttgccaaaatgctggcagagaagctcctgcaggcaaataaattacacaaccagggagaggtggaggatattttcttcgattctcactctgtcaatgctcacataccgcagtttagaagcactcttccgactggtattcaggtaaaggaaaaccagcctgtgggttccagtgtaattttcatgaactccactgaccttgacactggcttcaatggaaaactggtctatgctgtttctggaggaaatgaggatagttgcttcatgattgatatggaaacaggaatgctgaaaattttatctcctcttgaccgtgaaacaacagacaaatacaccctgaatattaccgtctatgaccttgggataccccagaaggctgcgtggcgtcttctacatgtcgtggttgtcgatgccaatgataatccacccgagtttttacaggagagctattttgtggaagtgagtgaagacaaggaggtacatagtgaaatcatccaggttgaagccacagataaagacctggggcccaacggacacgtgacgtactcaattcttacagacacagacacattttcaattgacagcgtgacgggtgttgttaacatcgcacgccctctggatcgagagctgcagcatgagcactccttaaagattgaggccagggaccaagccagagaagagcctcagctgttctccactgtcgttgtgaaagtatcactagaagatgttaatgacaacccacctacatttattccacctaattatcgtgtgaaagtccgagaggatcttccagaaggaaccgtcatcatgtggttagaagcccacgatcctgatttaggtcagtctggtcaggtgagatacagccttctggaccacggagaaggaaacttcgatgtggataaactcagtggagcagttaggatcgtccagcagttggactttgagaagaagcaagtgtataatctcactgtgagggccaaagacaagggaaagccagtttctctgtcttctacttgctatgttgaagttgaggtggttgatgtgaatgagaacctgcacccacccgtgttttccagctttgtggaaaaggggacagtgaaagaagatgcacctgttggttcattggtaatgacggtgtcggctcatgatgaggacgccggaagagatggggagatccgatactccattagagatggctctggcgttggtgttttcaaaataggtgaagagacaggtgtcatagagacgtcagatcgactggaccgtgaatcgacctcccattattggctaacagtctttgcaaccgatcagggtgtcgtgcctctttcatcgttcatagagatctacatagaggttgaggatgtcaatgacaatgcaccacagacatcagagcctgtttattacccagaaatcatggaaaattctcctaaagatgtatctgtggtccagatcgaggcatttgatccagattcgagctctaatgacaagctcatgtacaaaattacaagtggaaatccacaaggattcttttcaatacatcctaaaacaggtctcatcacaactacgtcaaggaagctagaccgagaacagcaagatgaacacatattagaggttactgtgacagacaatggtagtccccccaaatcaaccattgcaagagtcattgtgaaaatccttgatgaaaatgacaacaaacctcagtttctgcaaaagttctacaaaatcagactccctgagcgggaaaagccagaccgagaaagaaatgccagacgggagccgctctatcgcgtcatagccaccgacaaggatgagggccccaatgcagaaatctcctacagcatcgaagacgggaatgagcatggcaaatttttcatcgaaccgaaaactggagtggtttcgtccaagaggttttcagcagctggagaatatgatattctttcaattaaggcagttgacaatggtcgccctcaaaagtcatcaaccaccagactccatattgaatggatctccaagcccaaacagtccctggagcccatttcatttgaagaatcattttttacctttactgtgatggaaagtgaccccgttgctcacatgattggagtaatatctgtggagcctcctggcatacccctttggtttgacatcactggtggcaactacgacagtcacttcgatgtggacaagggaactggaaccatcattgttgccaaacctcttgatgcagaacagaagtcaaactacaacctcacagtcgaggctacagatggaaccaccactatcctcactcaggtattcatcaaagtaatagacacaaatgaccatcgtcctcagttttctacatcaaagtatgaagttgttattcctgaagatacagcgccagaaacagaaattttgcaaatcagtgctgtggatcaggatgagaaaaacaaactaatctacactctgcagagcagtagagatccactgagtctcaagaaatttcgtcttgatcctgcaaccggctctctctatacttctgagaaactggatcatgaagctgtttcaccagcacacctcacggtcatggtacgagatcaagatgtgcctgtaaaacgcaactttgcaaggattgtggtcaatgtcagcgacacgaatgaccacgccccgtggttcaccgcttcctcctacaaagggcgggtttatgaatcggcagccgttggctcagttgtgttgcaggtgacggctctggacaaggacaaagggaaaaatgctgaagtgctgtactcgatcgagtcaggaaatattggaaatattggaaattcttttatgattgatcctgtcttgggctctattaaaactgccaaagaattagatcgaagtaaccaagcggagtatgatttaatggtaaaagctacagataagggcagtccaccaatgagtgaaataacttctgtgcgtatctttgtcacaattgctgacaacgcctctccgaagtttacatcaaaagaatattctgttgaacttagtgaaactgtcagcattgggagtttcgttgggatggttacagcccatagtcaatcatcagtggtgtatgaaataaaagatggaaatacaggtgatgcttttgatattaatccacattctggaactatcatcactcagaaagccctggactttgaaactttgcccatttacacattgataatacaaggaactaacatggctggtttgtccactaatacaacggttctagttcacttgcaggatgagaatgacaacgcgccagtttttatgcaggcagaatatacaggactcattagtgaatcagcctcaattaacagcgtggtcctaacagacaggaatgtcccactggtgattcgagcagctgatgctgataaagactcaaatgctttgcttgtatatcacattgttgaaccatctgtacacacatattttgctattgattctagcactggtgctattcatacagtactaagtctggactatgaagaaacaagtatttttcactttaccgtccaagtgcatgacatgggaaccccacgtttatttgctgagtatgcagcgaatgtaacagtacatgtaattgacattaatgactgcccccctgtgtttgccaagccattatatgaagcatctcttttgttaccaacatacaaaggagtaaaagtcatcacagtaaatgctacagatgctgattcaagtgcattctcacagttgatttactccatcaccgaaggcaacatcggggagaagttttctatggactacaagactggtgctctcactgtccaaaacacaactcagttaagaagccgctacgagctaaccgttagagcttccgatggcagatttgccggccttacctctgtcaaaattaatgtgaaagaaagcaaagaaagtcacctaaagtttacccaggatgtctactctgcggtagtgaaagagaattccaccgaggccgaaacattagctgtcattactgctattgggagtccaatcaatgagcctttgttttatcacatcctcaacccagatcgcagatttaaaataagccgcacttcaggggttctgtcaaccactggcacgcccttcgatcgtgagcagcaggaggcgtttgatgtggttgtagaagtgatagaggaacataagccttctgcagtggcccacgttgtcgtgaaggtcattgtagaagaccaaaatgataatgcgccggtgtttgtcaaccttccctactacgccgttgttaaagtggacactgaggtgggccatgtcattcgctatgtcactgctgtagacagagacagtggcagaaacggggaagtgcattactacctcaaggaacatcatgaacactttcaaattggacccttgggtgaaatttcactgaaaaagcaatttgagcttgacaccttaaataaagaatatcttgttacagtggttgcaaaagatggagggaacccggccttttcagcggaagttatcgttccgatcactgtcatgaataaagccatgcctgtgtttgaaaaacctttctacagtgcagagattgcagagagcatccaggtgcacagccctgtggtccacgtgcaggctaacagcccggaaggcctgaaagtgttctacagcatcacagacggagaccctttcagccagttcactattaacttcaatactggagttatcaatgtcatagctcctctggactttgaggcccacccggcatataagctgagcatacgcgcaactgactccttgacgggcgctcatgctgaagtatttgtggacatcatagtagacgacatcaatgataaccctcctgtgtttgctcagcagtcttatgcggtgaccctgtctgaggcatctgtaattggaacgtctgttgttcaagttagagccaccgattctgattcagaaccaaatagaggaatctcataccagatgtttgggaatcacagcaagagtcatgatcattttcatgtagacagcagcactggcctcatctcactactcagaaccctggattacgagcagtcccggcagcacacgatttttgtgagggcagttgatggtggtatgcccacgctgagcagtgatgtgattgtcacggtggacgttaccgacctcaatggtaatccaccactctttgaacaacagatttatgaagccagaattagcgagcacgcccctcatgggcatttcgtgacctgtgtaaaagcctatgatgcagacagttcagacatagacaagttgcagtattccattctgtctggcaatgatcataaacattttgtcattgacagtgcaacagggattatcaccctctcaaacctgcaccggcacgccctgaagccattttacagtcttaacctgtcagtgtctgatggagtttttagaagttccacccaggttcatgtaactgtaattggaggcaatttgcacagtcctgctttccttcagaacgaatatgaagtggaactagctgaaaacgctcccctacataccctggtgatggaggtgaaaactacggatggggattctggtatttatggtcacgttacttaccatattgtaaatgactttgccaaagacagattttacataaatgagagaggacagatatttactttggaaaaacttgatcgagaaaccccggcggagaaagtgatctcagtccgtttaatggctaaggatgctggaggaaaagttgctttctgcaccgtgaatgtcatccttacagatgacaatgacaatgcaccacaatttcgagcaaccaaatacgaagtgaatatcgggtccagtgctgctaaagggacttcagtcgtaaagtctgcaagtgatgccgatgagggctccaatgccgacatcacctatgccattgaagcagactctgaaagtgtaaaagagaatttggaaattaacaaactgtccggcgtaatcactacaaaggagagcctcattggcttggaaaatgaattcttcactttctttgttagagctgtggataatgggtctccatcaaaagaatctgttgttcttgtctatgttaaaatccttccaccggaaatgcagcttccaaaattttcagaacctttctatacctttacagtgtcagaggacgtgcctgttggaacagagatagatctcatccgagcagaacatagtgggactgttctttacagcctggtcaaagggaatactccagaaagcaatagggatgagtcctttgtgattgacagacagagcgggagactgaagttggagaagagtcttgatcatgagacaactaagtggtatcagttttccatactggccaggtgcactcaagatgaccatgagatggtggcttctgtagatgttagtatccaagtgaaagatgcaaatgacaacagcccggtctttgaatctagtccatatgaggcattcattgttgaaaacctgccagggggaagtagagtaattcagatcagggcatctgatgctgactcaggaaccaacggccaagttatgtatagcctggatcagtcacaaagtgtggaagtcattgaatcctttgccattaacatggaaacaggctggattacaactttaaaggaacttgaccatgaaaagagagacaattaccagattaaagtggttgcatcagatcatggtgaaaagatccagctatcctccacagccattgtggatgttaccgtcaccgatgtcaacgatagtccaccacgattcacggccgagatctataaagggactgtgagtgaggatgacccccaaggtggggtgattgccatcttaagtaccacggatgctgattctgaagagatcaacagacaagttacatatttcataacaggaggggatcctttaggacagtttgccgttgaaactatacagaatgaatggaaggtatatgtgaagaaacctctagacagggaaaaaagggacaattaccttcttactatcacggcaactgatggcaccttctcatcaaaagcgatagttgaagtgaaagttctggatgcaaatgacaacagtccagtttgtgaaaagactttatattcagacactattcctgaagacgtccttcctggaaaattgatcatgcagatctctgctacagacgcagacatccgctctaacgctgaaattacttacacgttattgggttcaggtgcagaaaaattcaaactaaatccagacacaggtgaactgaaaacgtcaaccccccttgatcgtgaggagcaagctgtttatcatcttctcgtcagggccacagatggaggaggaagattctgccaagccagtattgtcgtcacgctagaagatgtgaacgataacgcccccgaattctctgccgatccttatgccatcaccgtgtttgaaaacacagagccgggaacgctgctgacaagagtgcaggccacagatgccgacgcaggattaaatcggaagattttatactcactgattgactctgctgatgggcagttctccattaacgaattatctggaattattcagttagaaaaacctttggacagagaactccaggcagtatacaccctctctttgaaagctgtggatcaaggcttgccaaggaggctgactgccactggcactgtgattgtatcagttcttgacataaatgacaacccccctgtgtttgagtaccgtgaatatggtgccaccgtgtctgaggacattcttgttggaactgaagttcttcaagtgtatgcagcaagtcgggatattgaagcaaatgcagaaatcacctactcaataataagtggaaatgaacatgggaaattcagcatagattctaaaacaggggccgtatttatcattgagaatctggattatgagagctctcatgagtattacctaacagtagaggccactgatggaggcacgccttcactgagcgacgttgccactgtgaacgttaatgtaacagatatcaacgataatacccctgtgttcagccaagacacctacacgacagtcatcagtgaagatgccgttcttgagcagtctgtcatcacggttatggccgatgatgccgatggaccttccaacagccacatccactactcaattatagatggcaaccaaggaagctcgttcacaattgaccccgtcaggggagaagtcaaagtgaccaaacttctcgaccgagaaacgatttcaggttacacgctcacggttcaagcttctgataatggcagtccacccagagtcaacacgacgaccgtgaacatcgatgtgtccgatgtcaatgacaacgcgcccgtcttctccaggggaaactacagtgtcattatccaggaaaataagccagtgggcttcagcgtgctgcagctggtagtaacagatgaggattcttcccataacggtccacccttcttctttactattgtaactggaaatgatgagaaggcttttgaagttaacccgcaaggagtcctcctgacatcatctgccatcaagaggaaggagaaagatcattacttactgcaggtgaaggtggcagataatggaaagcctcagttgtcatctttgacatacattgacattagggtaattgaggagagcatctatccgcctgcgattttgcccctggagattttcatcacctcttctggagaagaatactcaggtggcgtcattgggaagatccatgccacagaccaggacgtgtatgatactctaacctacagtctcgaccctcagatggacaacctgttctctgtttccagcacagggggcaagctgatagcacacaaaaagctagacatagggcaataccttctcaatgtcagcgtaacagatgggaagttcacgacggtggccgacatcacagtgcatatcagacaagtcacacaggagatgttgaaccacaccatcgcgatccgctttgccaacctcactccggaagaattcgttggtgactactggcgcaacttccagcgagctttacggaacatcctgggtgtgaggaggaacgacatacagattgttagtttgcagtcctctgaacctcacccacatctggacgtcttactttttgtagagaaaccaggtagtgctcagatctcaacaaaacaacttctgcacaagattaactcttccgtgactgacattgaggaaatcattggagttaggatactgaatgtattccagaaactctgcgcgggactggactgcccctggaagttctgcgatgaaaaggtgtctgtggatgaaagtgtgatgtcaacacacagcacagccagactgagttttgtgactccccgccaccacagggcagcggtgtgtctctgcaaagagggaaggtgcccacctgtccaccatggctgtgaagatgatccgtgccctgagggatccgaatgtgtgtctgatccctgggaggagaaacacacctgtgtctgtcccagcggcaggtttggtcagtgcccagggagttcatctatgacactgactggaaacagctacgtgaaataccgtctgacggaaaatgaaaacaaattagagatgaaactgaccatgaggctcagaacatattccacgcatgcggttgtcatgtatgctcgaggaactgactatagcatcttggagattcatcatggaaggctgcagtacaagtttgactgtggaagtggccctggaattgtctctgttcagagcattcaggtcaatgatgggcagtggcacgcagtggccctggaagtgaatggaaactatgctcgcttggttctagaccaagttcatactgcatcgggcacagccccagggactctgaaaaccctgaacctggataactatgtgttttttggtggccacatccgtcagcagggaacaaggcatggaagaagtcctcaagttggtaatggtttcaggggttgtatggactccatttatttgaatgggcaggagctccctttaaacagcaaacccagaagctatgcacacatcgaagagtcggtggatgtatctccaggctgcttcctgacggccacggaagactgcgccagcaacccttgccagaatggaggcgtttgcaatccgtcacctgctggaggttattactgcaaatgcagtgccttgtacatagggacccactgtgagataagcgtcaatccgtgttcctccaacccatgcctctatgggggcacgtgtgttgtcgacaacggaggctttgtttgccagtgtagaggattatatactggtcagaggtgtcagcttagtccatactgcaaagatgaaccctgtaagaatggcggaacatgctttgacagtttggatggcgccgtttgtcagtgtgattcgggttttaggggagaaaggtgtcagagtgatatcgacgagtgctctggaaacccttgcctgcacggggccctctgtgagaacacgcacggctcctatcactgcaactgcagccacgagtacaggggacgtcactgcgaggatgctgcgcccaaccagtatgtgtccacgccgtggaacattgggttggcggaaggaattggaatcgttgtgtttgttgcagggatatttttactggtggtggtgtttgttctctgccgtaagatgattagtcggaaaaagaagcatcaggctgaacctaaagacaagcacctgggacccgctacggctttcttgcaaagaccgtattttgattccaagctaaataagaacatttactcagacataccaccccaggtgcctgtccggcctatttcctacaccccgagtattccaagtgactcaagaaacaatctggaccgaaattccttcgaaggatctgctatcccagagcatcccgaattcagcacttttaaccccgagtctgtgcacgggcaccgaaaagcagtggcggtctgcagcgtggcgccaaacctgcctcccccacccccttcaaactccccttctgacagcgactccatccagaagcctagctgggactttgactatgacacaaaagtggtggatcttgatccctgtctttccaagaagcctctagaggaaaagccttcccagccatacagtgcccgggaaagcctgtctgaagtgcagtccctgagctccttccagtccgaatcgtgcgatgacaatgggtatcactgggatacatcagattggatgccaagcgttcctctgccggacatacaagagttccccaactatgaggtgattgatgagcagacacccctgtactcagcagatccaaacgccatcgatacggactattaccctggaggctacgacatcgaaagtgattttcctccacccccagaagacttccccgcagctgatgagctaccaccgttaccgcccgaattcagcaatcagtttgaatccatccaccctcctagagacatgcctgccgcgggtagcttgggttcttcatcaagaaaccggcagaggttcaacttgaatcagtatttgcccaatttttatcccctcgatatgtctgaacctcaaacaaaaggcactggtgagaatagtacttgtagagaaccccatgccccttacccgccagggtatcaaagacacttcgaggcgcccgctgtcgagagcatgcccatgtctgtgtacgcctccaccgcctcctgctctgacgtgtcagcctgctgcgaagtggagtccgaggtcatgatgagtgactatgagagcggggacgacggccacttcgaagaggtgacgatcccgcccctggattcccagcagcacacggaagtctgactctcaactccccccaaagtgcctgactttagtgaacctagaggtgatgtgagtaatccgcgctgttctttgcagcagtgcttccaagctttttttggtgagccgaatgggcatggctgcgctggatcctgcgcctctggacgtgctagccatttccagtgtcccaactactgtcatcgtgaggttttcatcggctgtgccatttcccaacgtcttttgggatttacatctgtctgtgttaaaataatcaaacgaaaaatcagtcctgtgttgtcagcatgattcatgtatttatatagatttgattattttaattttcctgtctcttttttttgtaaattttatgtacagatttgatttttcatagttttaactagatttccaagatattttgtgcatttgtttcaactgaattttggtggtgtcagtgccattatctagcaccctgatttttttttttttactataaccagggtttcattctgtctttttccactgaagtgtgacattttgttagtacatttcagtgtagtcattcatttctagctgtacataggatgaaggagagatcagatacatgaacatgtcttacatgggttgctgtatttagaattataaacatttttcattattggaaagtgtaacggggaccttctgcatacctgtttagaaccaaaaccaccatgacacagtttttatagtgtctgtatatttgtgatgcaatggtcttgtaaaggtttttaatgaaaactaccattagccagtctttcttactgacaataaattattaataaaat

SEQ ID NO: 2030 - DNA, 622 bp, Homo Sapiens
cacggttcttatagtgggacgcattgccataggggtctccatctccctctcttccattgccacttgtgtttacatcgcagagattgctcctcaacacagaagaggccttcttgtgtcactgaatgagctgatgattgtcatcggcattctttctgcctatatttcaaattacgcatttgccaatgttttccatggctggaagtacatgtttggtcttgtgattcccttgggagttttgcaagcaattgcaatgtattttcttcctccaagccctcggtttctggtgatgaaaggacaagagggagctgctagcaaggttcttggaaggttaagagcactctcagatacaactgaggaactcactgtgatcaaatcctccctgaaagatgaatatcagtacagtttttgggatctgtttccgttcaaaagacaacatgcggacccgaataattgataggactacactagtatttttttgtacaaatcactggccacccaacatattgttctatgcatcaactgttttgaagtcagttggatttcaaagcaatgaggcagctagcctccgcctccactggggttggagtcgtcaaggtcattaacaccatccctggcaatcttc

SEQ ID NO: 2031 - DNA, 497 bp, Homo Sapiens
  misc_feature (160)..(160): n is a, c, g, or t
  misc_feature (330)..(330): n is a, c, g, or t
  misc_feature (426)..(426): n is a, c, g, or t
  misc_feature (450)..(450): n is a, c, g, or t
tttttttgtatcctggaatatttgtgtatgtgtgtgtgtgtgtatatatatatatatatatatatatatatatatatatataaaatgagagatcttggggatggacacaaagtctaaacacaaaattcatttatggctcatatatactttatgcacatancctgaaggtaattttatgatatttgaaatcattttctatataaaacagtttgtgtacattgaaccataagaaagcaaatgtgtttgttaggtgtggaattttccactcatggtgtcatagcgttcaggaaggtttggattttggggcatttgggggttttaactgttcanattagggatgctcaacctgtatctgaatgggaaataaagactatattggaatgagcgccttctatttcttcttcaagtggctgaaggtatcatccnaatctgacatattctccctgggantattgctttaaatataaaaacgcctggggcaaaagggaattccctcc

SEQ ID NO: 2032 - DNA, 2210 bp, Homo Sapiens
cagggagtcccaccagcctagtcgccagaccttctgtgggatcatcggacccacctggaaccccacctgacccaagcccacctgctgcagcccactgcctggccatgaccatcacttacacaagccaagtggctaatgcccgcttaggctccttctcccgcctgctgctgtgctggcggggcagcatctacaagctgctatatggcgagttcttaatcttcctgctctgctactacatcatccgctttatttataggctggccctcacggaagaacaacagctgatgtttgagaaactgactctgtattgcgacagctacatccagctcatccccatttccttcgtgctgggcttctacgtgacgctggtcgtgacccgctggtggaaccagtacgagaacctgccgtggcccgaccgcctcatgagcctggtgtcgggcttcgtcgaaggcaaggacgagcaaggccggctgctgcggcgcacgctcatccgctacgccaacctgggcaacgtgctcatcctgcgcagcgtcagcaccgcagtctacaagcgcttccccagcgcccagcacctggtgcaagcaggctttatgactccggcagaacacaagcagttggagaaactgagcctaccacacaacatgttctgggtgccctgggtgtggtttgccaacctgtcaatgaaggcgtggcttggaggtcgaatccgggaccctatcctgctccagagcctgctgaacgagatgaacaccttgcgtactcagtgtggacacctgtatgcctacgactggattagtatcccactggtgtatacacaggtggtgactgtggcggtgtacagcttcttcctgacttgtctagttgggcggcagtttctgaacccagccaaggcctaccctggccatgagctggacctcgttgtgcccgtcttcacgttcctgcagttcttcttctatgttggctggctgaaggtggcagagcagctcatcaacccctttggagaggatgatgatgattttgagaccaactggattgtcgacaggaatttgcaggtgtccctgttggctgtggatgagatgcaccaggacctgcctcggatggagccggacatgtactggaataagcccgagccacagcccccctacacagctgcttccgcccagttccgtcgagcctcctttatgggctccaccttcaacatcagcctgaacaaagaggagatggagttccagcccaatcaggaggacgaggaggatgctcacgctggcatcattggccgcttcctaggcctgcagtcccatgatcaccatcctcccagggcaaactcaaggaccaaactactgtggcccaagagggaatcccttctccacgagggcctgcccaaaaaccacaaggcagccaaacagaacgttaggggccaggaagacaacaaggcctggaagcttaaggctgtggacgccttcaagtctgccccactgtatcagaggccaggctactacagtgccccacagacgcccctcagccccactcccatgttcttccccctagaaccatcagcgccgtcaaagcttcacagtgtcacaggcatagacaccaaagacaaaagcttaaagactgtgagttctggggccaagaaaagttttgaattgctctcagagagcgatggggccttgatggagcacccagaagtatctcaagtgaggaggaaaactgtggagtttaacctgacggatatgccagagatccccgaaaatcacctcaaagaacctttggaacaatcaccaaccaacatacacactacactcaaagatcacatggatccttattgggccttggaaaacagggatgaagcacattcctaacctgcttcctaatggggatgcttcgccagccaggtcctcacctgtgtgtacaccagcaggacactgatccagtcacagccatacagctgtccacactgaagaacgtgtcctacaacagcctgaatcaaatggttagcttaatagataaaaatcccagactacttcagcctttaatgccttttattcataaaaactgtgaaagctagactgaaccattggaaacatttaactcagactctggattcagagtcgggaacccttagttctatctgaatccaagacagccacaccttagtatactgcccaaactaatgagtttaataaatacaaatactcgttaaaaaaaaa

SEQ ID NO: 2033 - DNA, 4975 bp, Homo Sapiens
ctctcacacacacacacccctcccctgccatccctccccggactccggctccggctccgattgcaatttgcaacctccgctgccgtcgccgcagcagccaccaattcgccagcggttcaggtggctcttgcctcgatgtcctagcctaggggcccccgggccggacttggctgggctcccttcaccctctgcggagtcatgagggcgaacgacgctctgcaggtgctgggcttgcttttcagcctggcccggggctccgaggtgggcaactctcaggcagtgtgtcctgggactctgaatggcctgagtgtgaccggcgatgctgagaaccaataccagacactgtacaagctctacgagaggtgtgaggtggtgatggggaaccttgagattgtgctcacgggacacaatgccgacctctccttcctgcagtggattcgagaagtgacaggctatgtcctcgtggccatgaatgaattctctactctaccattgcccaacctccgcgtggtgcgagggacccaggtctacgatgggaagtttgccatcttcgtcatgttgaactataacaccaactccagccacgctctgcgccagctccgcttgactcagctcaccgagattctgtcagggggtgtttatattgagaagaacgataagctttgtcacatggacacaattgactggagggacatcgtgagggaccgagatgctgagatagtggtgaaggacaatggcagaagctgtcccccctgtcatgaggtttgcaaggggcgatgctggggtcctggatcagaagactgccagacattgaccaagaccatctgtgctcctcagtgtaatggtcactgctttgggcccaaccccaaccagtgctgccatgatgagtgtgccgggggctgctcaggccctcaggacacagactgctttgcctgccggcacttcaatgacagtggagcctgtgtacctcgctgtccacagcctcttgtctacaacaagctaactttccagctggaacccaatccccacaccaagtatcagtatggaggagtttgtgtagccagctgtccccataactttgtggtggatcaaacatcctgtgtcagggcctgtcctcctgacaagatggaagtagataaaaatgggctcaagatgtgtgagccttgtgggggactatgtcccaaagcctgtgagggaacaggctctgggagccgcttccagactgtggactcgagcaacattgatggatttgtgaactgcaccaagatcctgggcaacctggactttctgatcaccggcctcaatggagacccctggcacaagatccctgccctggacccagagaagctcaatgtcttccggacagtacgggagatcacaggttacctgaacatccagtcctggccgccccacatgcacaacttcagtgttttttccaatttgacaaccattggaggcagaagcctctacaaccggggcttctcattgttgatcatgaagaacttgaatgtcacatctctgggcttccgatccctgaaggaaattagtgctgggcgtatctatataagtgccaataggcagctctgctaccaccactctttgaactggaccaaggtgcttcgggggcctacggaagagcgactagacatcaagcataatcggccgcgcagagactgcgtggcagagggcaaagtgtgtgacccactgtgctcctctgggggatgctggggcccaggccctggtcagtgcttgtcctgtcgaaattatagccgaggaggtgtctgtgtgacccactgcaactttctgaatggggagcctcgagaatttgcccatgaggccgaatgcttctcctgccacccggaatgccaacccatggggggcactgccacatgcaatggctcgggctctgatacttgtgctcaatgtgcccattttcgagatgggccccactgtgtgagcagctgcccccatggagtcctaggtgccaagggcccaatctacaagtacccagatgttcagaatgaatgtcggccctgccatgagaactgcacccaggggtgtaaaggaccagagcttcaagactgtttaggacaaacactggtgctgatcggcaaaacccatctgacaatggctttgacagtgatagcaggattggtagtgattttcatgatgctgggcggcacttttctctactggcgtgggcgccggattcagaataaaagggctatgaggcgatacttggaacggggtgagagcatagagcctctggaccccagtgagaaggctaacaaagtcttggccagaatcttcaaagagacagagctaaggaagcttaaagtgcttggctcgggtgtctttggaactgtgcacaaaggagtgtggatccctgagggtgaatcaatcaagattccagtctgcattaaagtcattgaggacaagagtggacggcagagttttcaagctgtgacagatcatatgctggccattggcagcctggaccatgcccacattgtaaggctgctgggactatgcccagggtcatctctgcagcttgtcactcaatatttgcctctgggttctctgctggatcatgtgagacaacaccggggggcactggggccacagctgctgctcaactggggagtacaaattgccaagggaatgtactaccttgaggaacatggtatggtgcatagaaacctggctgcccgaaacgtgctactcaagtcacccagtcaggttcaggtggcagattttggtgtggctgacctgctgcctcctgatgataagcagctgctatacagtgaggccaagactccaattaagtggatggcccttgagagtatccactttgggaaatacacacaccagagtgatgtctggagctatggtgtgacagtttgggagttgatgaccttcggggcagagccctatgcagggctacgattggctgaagtaccagacctgctagagaagggggagcggttggcacagccccagatctgcacaattgatgtctacatggtgatggtcaagtgttggatgattgatgagaacattcgcccaacctttaaagaactagccaatgagttcaccaggatggcccgagacccaccacggtatctggtcataaagagagagagtgggcctggaatagcccctgggccagagccccatggtctgacaaacaagaagctagaggaagtagagctggagccagaactagacctagacctagacttggaagcagaggaggacaacctggcaaccaccacactgggctccgccctcagcctaccagttggaacacttaatcggccacgtgggagccagagccttttaagtccatcatctggatacatgcccatgaaccagggtaatcttggggggtcttgccaggagtctgcagtttctgggagcagtgaacggtgcccccgtccagtctctctacacccaatgccacggggatgcctggcatcagagtcatcagaggggcatgtaacaggctctgaggctgagctccaggagaaagtgtcaatgtgtagaagccggagcaggagccggagcccacggccacgcggagatagcgcctaccattcccagcgccacagtctgctgactcctgttaccccactctccccacccgggttagaggaagaggatgtcaacggttatgtcatgccagatacacacctcaaaggtactccctcctcccgggaaggcaccctttcttcagtgggtctcagttctgtcctgggtactgaagaagaagatgaagatgaggagtatgaatacatgaaccggaggagaaggcacagtccacctcatccccctaggccaagttcccttgaggagctgggttatgagtacatggatgtggggtcagacctcagtgcctctctgggcagcacacagagttgcccactccaccctgtacccatcatgcccactgcaggcacaactccagatgaagactatgaatatatgaatcggcaacgagatggaggtggtcctgggggtgattatgcagccatgggggcctgcccagcatctgagcaagggtatgaagagatgagagcttttcaggggcctggacatcaggccccccatgtccattatgcccgcctaaaaactctacgtagcttagaggctacagactctgcctttgataaccctgattactggcatagcaggcttttccccaaggctaatgcccagagaacgtaactcctgctccctgtggcactcagggagcatttaatggcagctagtgcctttagagggtaccgtcttctccctattccctctctctcccaggtcccagccccttttccccagtcccagacaattccattcaatctttggaggcttttaaacattttgacacaaaattcttatggtatgtagccagctgtgcactttcttctctttcccaaccccaggaaaggttttccttattttgtgtgctttcccagtcccattcctcagcttcttcacaggcactcctggagatatgaaggattactctccatatcccttcctctcaggctcttgactacttggaactaggctcttatgtgtgcctttgtttcccatcagactgtcaagaagaggaaagggaggaaacctagcagaggaaagtgtaattttggtttatgactcttaaccccctagaaagacagaagcttaaaatctgtgaagaaagaggttaggagtagatattgattactatcataattcagcacttaactatgagccaggcatcatactaaacttcacctacattatctcacttagtcctttatcatccttaaaacaattctgtgacatacatattatctcattttacacaaagggaagtcgggcatggtggctcatgcctgtaatctcagcactttgggaggctgaggcagaaggattacctgaggcaaggagtttgagaccagcttagccaacatagtaagacccccatctc

SEQ ID NO: 2034 - DNA, 3319 bp, Homo Sapiens
gcatgccggcaaccgcgtctgcaggggtgccggcgaccgtgtcagaaaagcaagagttttaccagcttctgaagaacctgatcaatccaagctgtatggtgcggaggcaagcagaggaaatctatgaaaatatcccaggtctgtgtaagactaccttcctcttagatgccgtcagaaatagaagagcaggttatgaggtgagacaaatggctgccgcactgctacgacggcttttgtcctctgggtttgaggaggtttatccaaatctgcctgctgatgttcagagagatgtcaagattgaactgattctggctgttaagttagaaacacatgctagcatgaggaaaaaactttgtgatatttttgcagtgctggccaggaatttgatagatgaggatggcactaaccactggccggaaggtctgaagtttcttattgattcaatctactccaaaaatgtggttctatgggaagttgcacttcacgttttctggcactttcctgggatttttgggacccaagagcggcatgatttggatatcatcaaacggttgttggaccagtgtattcaagatcaagaacatccagcaatcaggacgttatccgctagagctgcagctgcatttgtacttgctaatgagaataatattgctcttttcaaagactttgcagacttgcttcctggaatcttacaggctgtgaatgactcatgctaccaggatgatgattcagtgctagaatcccttgttgagattgcagataccgtacctaagtacttgggtccttatttagaagatactctacagttgagtttgaagttatgtggagactctaggcttagtaatctgcagcgccagctggccctcgaagttatagtgaccttgtctgaaactgccactccgatgttgaaaaaacatacaaatattattgcacaggcagttcctcatatattagcaatgatggttgatctacaagatgatgaggactgggtaaatgctgatgaaatggaagaagatgattttgacagcaatgcagttgctgcggagagtgcactagacagactggcttgtgggcttggtggaaaagttgttttaccaatgaccaaggagcatatcatgcagatgcttcagagccctgactggaagtatcgacatgctggattaatggccttatctgccattggagaaggatgccatcaacaaatggaatcaattctagatgaaacagttaactccgttttgctttttcttcaggatcctcatccaagggtgagggctgcagcctgtactacacttggacagatggctacagattttgcacctaatttccaaaagaaatttcatgaaacagtgattgcagctctgttacgtaccatggaaaatcaaggtaatcagcgtgtgcaatcacatgcagcttctgctcttattatttttattgaagactgccctaaatcattgctagttctatatgtggatagtatggtgaaaaatctacattccgtcttggtgattaaacttcaagagttgattcggaatggaactaagttggctttggaacaacttgtgacaaccattgcatcagttgcagatacaatagaagaaaaatttgtcccatattatgatatattcatgccctcactaaagcacattgttgagcttgctgttcagaaggaactcaagcttctgagaggaaaaactatcgagtgcattagccatattggtcttgctgttgggaaggaaaaatttatgcaagatgcatcaaatgtgatgcagctgttgttgaagacacaatcagacttaaataatatggaagatgatgaccctcagacctcttacatggtttcagcatgggctagaatgtgtaaaattcttggaaaagattttcaacagtaccttccactggttatcgagcctcttattaagactgcttcagctaaacctgatgttgctctcttagacacacaggatgtggaaaatatgagtgacgatgatggctggcaatttgtaaatcttggagaccagcagagttttggaattaaaacttcaggacttgaagcaaaagcaactgcttgccaaatgttggtttactatgctaaggagttaagggaagggtttgtggaatatacagaacaagttgtgaagctgatggttcctttactgaaattttatttccatgacaatgttcgagtggcagcagcagagtccatgccttttctcctggaatgtgcaagaattcgtggcccagagtatcttgcacagatgtggcaattcatatgtgaccccttaatcaaggctattggtactgaaccagatacagatgtgctctcagaaataatgaattcttttgcaaagtccattgaagttatgggagatggttgccttaatgatgaacacttggaagaactgggaggaatactgaaagcaaaacttgaagggcactttaaaaaccaagaattgagacaggtgaaaagacaggaagaaaactatgatcaacaggttgagatgtctctgcaagatgaggatgaatgtgatgtttatattctgaccaaagtatcagatattttgcactcattatttagtacttataaggaaaagattttaccatggtttgaacaactacttccattaattgtaaatctaatttgttcaagtaggccatggccagacagacagtggggattgtgcatatttgatgacatcatagagcactgcagtccaacttcatttaaatatgtagaatattttcggtggccaatgctactaaatatgcgagataacaaccctgaagtcaggcaagctgctgcttatggcctgggtgtcatggcacagtttggtggagatgattatcgttctttatgttcagaagctgttccactgctggtaaaagttattaagtgtgcaaattccaaaaccaaaaaaaatgtcattgctacagagaactgtatctcagcaatagggaagattttgaagtttaagcctaactgtgtaaatgtagatgaagttcttccacactggttatcatggcttccactgcatgaagataaagaggaagctattcagactttgagttttctctgtgacctaattgaaagtaaccacccagttgtaattggtccaaataattccaatcttcccaaaataatcagtataattgcagaaggaaaaattaatgagactattaactatgaggatccttgtgccaaacgcctagctaatgtcgtgcgtcaggtacagacttctgaagatttatggttggaatgtgtatcacaacttgatgatgaacagcaggaagccttacaggagttgctaaattttgctag

SEQ ID NO: 2035 - DNA, 352 bp, Homo Sapiens
  misc_feature (280)..(280): n is a, c, g, or t
  misc_feature (326)..(326): n is a, c, g, or t
ctttgaggatatttagccactcataaataattgtctcaaggtatttaaaagtgatttgtgccttattttaatgcaaaattagcagttttattctattttaaaaacaaaggcagaaaaacaattctgcatgttattctttaaaaacatccagaataatactaccaagtatttgtatttcaaaccagtaaaattttgaatattcaaagtctgctcttaaacttagacttcctagtattatggtggttatagtgagaatgaaattaaactgggtgagttccgnaataaaggaaagtgttatattctacagtgcccatattttctatggnaactaaatcaaatattgtagtcccct

SEQ ID NO: 2036 - DNA, 289 bp, Homo Sapiens
ggtcgaccgcaagcagcgcaacaggagcgccaggttcgacatgaggctctgctgcagtcagcaacttggaatattcagacttcagaccagcatcacagattataaccctccgtaaatcatctgcatcccagctcccatcaaaagccagcctgaaggacccatggacacgtgactccagtgttctcaacaacatcttaagatcaagttggtttgcacaacatttgcatctacttgggacaaagcaagaacaataagggcaaaaaagtgaaaaaaaaaaaaaaagtcgacg

SEQ ID NO: 2037 - DNA, 259 bp, Homo Sapiens
  misc_feature (9)..(9): n is a, c, g, or t
  misc_feature (11)..(11): n is a, c, g, or t
  misc_feature (53)..(53): n is a, c, g, or t
  misc_feature (93)..(93): n is a, c, g, or t
ctcgtgctngntgcctcctgggctgccgctcttcctgccctactacatctgtnttgcagatgaggatgattacagggactttgtcaacctggntcatgcccacagccttctgagggactatcagcagagagaaggcattgccatggatcagttgctttcccaaagccttcctaatgatggtgatgaaaaatatgagaagaccataattaaaagtggagatcagacgttttacaaattcatgaagcgaattgctgcttgt

SEQ ID NO: 2038 - DNA, 743 bp, Homo Sapiens
catccgctgtcatgcctggctaatttttgtatttttagtagagacgggggttcaccatcttgaccaaactggtcttgaactcttgacctcgtgatccagctgcctcggcctctcagagtgttgggattacaggcgtgagccaccatgcctggcctcttggaatatttaataagctaaaaaattcttatacacaggtagattaattaggtagccaggagtggcccctgaaagtatgtctggcaaaacctagaactgcatcctagccatcactgtaccttctgccctccctgctgtctcctctgccagttacagttaaaaggttgtgggtgaggacgctgggcagagtcccaggcgtctgctgtcagctccccagcccggcctgcctgccgagccatctgggcgtcccacggtggagagtgtggtgcttgtgacgcggtggtgctgggagccatcctggtggcagatgtgggctctcactgcaagtcagtgtaagtccccagggactgtcagcagcacgtcctgctgccctctctctgcagaagccctggtaacctgcgtttggaaatctctacgatttctgaggagctgtcagccctgtcttgtcaccctgtgtggggccgcttcgaatggcttgtccggcgggtgaaaggaccggggcttccttgaagggcccccatgccttggaggccgccggtccccggcttggtggcgccttcactgggggccaccgttggggccccttt

SEQ ID NO: 2039 - DNA, 653 bp, Homo Sapiens
tttaaaacttttattaacgcttgaagaaaaataatgcaatgtgacaatgtacaggtcctgttgcctaaatccgtagtagaaacagatattatcacttagcaagctcacgtggtgccaattctgagatcagacggggttgttcctccttaggaagtggccactggaagcattgtttttccatgctatttccgtgaagccttttgcttggttcgagtttaaatttctccctttgtgtgagtatgactatagttctggcctggtgttttctatttatttagttttagatgtcagcattttactatacttggtcctctcacttcagaataacagggctatttattgatacaaaggagaggtgttcagatcatcttgttaagatgcagagctcaaaataaacactaaatctttatttggagatccacatccttcctcaaaggaaggctcatgagtaaatttgtatgcagtataaagcccaagtagagggtgtatttttaatgactactttgcttacattttagattgtgcaaatgtctcaatcaatgcttgcaagaatgtggaccttcctcagttttaagccgaagaccctgagcaataaatactgttgcatgcttccaataacgttgagggatgggattgaaaagcttatttcccca

SEQ ID NO: 2040 - DNA, 518 bp, Homo Sapiens
  misc_feature (195)..(195): n is a, c, g, or t
  misc_feature (203)..(203): n is a, c, g, or t
  misc_feature (331)..(331): n is a, c, g, or t
  misc_feature (390)..(390): n is a, c, g, or t
  misc_feature (514)..(514): n is a, c, g, or t
gaagatgacaaaagtccactacaccactttccttggctatctgatgcacccccatcttcccatgcgcgcacctcagaaatcaggctcccacctgacataacacaaccatgcctcacaaaaagacagtggtttatcccttccctaggagaaaagagaggcaatgcaagctgcttcatcaactgttaatacttcttncagggccngcaacccaggatatctgcaggtgtctctccctctggtttggtcatggctctctctgttctagaatgtatgggttaaagtcggctgccacaccatgccctcggaggtggtggtccaaggacccctgagngcttctaaggtccttcctttcccaaccccacgtggttttcttcagtcaggataccatantgcaacagaccgaagcggaacagcttatgagggatgcagcagccttctgtttagccaggctttaaggatctgcaaaaatgtaaaacgatgccactcctactgatggaatatattgttttggganaata

SEQ ID NO: 2041 - DNA, 1349 bp, Homo Sapiens
aatcaaaaaggtctcaccacataccatgtggatgcagcacctctcaggattgctaggagctcccctgtttgcatgagaaaagtagtcccccaaattaacatcagtgtctgtttcagaatctctctactcagatgaccccagaaactgaaccaacagaagcagacttttcagaagatggtgaagacagaaacccagtacttgcaaaagtagacttggtgtgaagactcacttctcagctgaaattatatatatacacatatatatatatatcccacatctgggatcatgatagactcgttagggcttcaaggccctcagagatgatcagtccaactgaacgatcttacaaatgaggaaaccaagataaatgagctgccagaatcaggtttccaatcaacagcagtgagatgggattggacagtagaatttcaatgtccagtgagtgaggttcttgtaccacttcatcaaaatcatggatcttggctgggtgcggtgcctcatgcctgtaatcctagcactttgggaggctgaggcaggcaatcacttgaggtcaggagttcgagaccagcctggccatcatggcgaaacctcatctctactaaaaatacaaaagttaaccaggtgtgtggtgcacgtttgtaatcccagttactcaggaggctgaggcacaaagaattgagtatcactttaactcaggaggcagaggttgcagtgagccgagattgcaccactgcactccagcttgggtgataaaataaaataaaatagtcgtgaatcttgttcaaaatgcagattcctcagattcaataatgagagctcagactgggaacagggcccaggaatctgtgtggtacaaacctgcatggtgtttatgcacacagagatttgagaaccattgttctgaatgctgcttccatttgacaaagtgccgtgataatttttgaaaagagaagcaaacaatggtgtctcttttatgttcagcttataatgaaatctgtttgttgacttattaggactttgaattatttctttattaaccctctgagtttttgtatgtattattattaaagaaaaatgcaatcaggattttaaacatgtaaatacaaattttgtataacttttgatgacttcagtgaaattttcaggtagtctgagtaatagattgttttgccacttagaatagcatttgccacttagtattttaaaaaataattgttggagtatttattgtcagttttgttcacttgttatctaatacaaaattataaagccttcagagggtttggaccacatctctttggaaaatagtttgcaacatatttaagagatacttgatgccaaaatgactg

SEQ ID NO: 2042 - DNA, 321 bp, Homo Sapiens
  misc_feature (15)..(15): n is a, c, g, or t
  misc_feature (25)..(25): n is a, c, g, or t
  misc_feature (38)..(38): n is a, c, g, or t
  misc_feature (297)..(297): n is a, c, g, or t
ctcgtgcgcattgantctacttctnatccttatctttnttgcagctgctgttgctgccccctttgatgatgatgacaagatcgttgggggctacatctgtaaggagaattctgtcccctaccaggtgtccttgaattctggctaccacttctgcggtggctccctcatcagcgaacagtgggtggtgtcagcaggtcactgctacaagtcccgcatccaggtgagactgggagagcacaacatcgaagtcctggaggggaattgaacagttcatccaatgcagccaagatcatccgncaccccaaatacaacagccggact

SEQ ID NO: 2043 - DNA, 3003 bp, Homo Sapiens
gctataaggatcacgcgccccagtcgacgctgagctcctctgctactcagagttgcaacctcagcctcgctatggctcccagcagcccccggcccgcgctgcccgcactcctggtcctgctcggggctctgttcccaggacctggcaatgcccagacatctgtgtccccctcaaaagtcatcctgccccggggaggctccgtgctggtgacatgcagcacctcctgtgaccagcccaagttgttgggcatagagaccccgttgcctaaaaaggagttgctcctgcctgggaacaaccggaaggtgtatgaactgagcaatgtgcaagaagatagccaaccaatgtgctattcaaactgccctgatgggcagtcaacagctaaaaccttcctcaccgtgtactggactccagaacgggtggaactggcacccctcccctcttggcagccagtgggcaagaaccttaccctacgctgccaggtggagggtggggcaccccgggccaacctcaccgtggtgctgctccgtggggagaaggagctgaaacgggagccagctgtgggggagcccgctgaggtcacgaccacggtgctggtgaggagagatcaccatggagccaatttctcgtgccgcactgaactggacctgcggccccaagggctggagctgtttgagaacacctcggccccctaccagctccagacctttgtcctgccagcgactcccccacaacttgtcagcccccgggtcctagaggtggacacgcaggggaccgtggtctgttccctggacgggctgttcccagtctcggaggcccaggtccacctggcactgggggaccagaggttgaaccccacagtcacctatggcaacgactccttctcggccaaggcctcagtcagtgtgaccgcagaggacgagggcacccagcggctgacgtgtgcagtaatactggggaaccagagccaggagacactgcagacagtgaccatctacagctttccggcgcccaacgtgattctgacgaagccagaggtctcagaagggaccgaggtgacagtgaagtgtgaggcccaccctagagccaaggtgacgctgaatggggttccagcccagccactgggcccgagggcccagctcctgctgaaggccaccccagaggacaacgggcgcagcttctcctgctctgcaaccctggaggtggccggccagcttatacacaagaaccagacccgggagcttcgtgtcctgtatggcccccgactggacgagagggattgtccgggaaactggacgtggccagaaaattcccagcagactccaatgtgccaggcttgggggaacccattgcccgagctcaagtgtctaaaggatggcactttcccactgcccatcggggaatcagtgactgtcactcgagatcttgagggcacctacctctgtcgggccaggagcactcaaggggaggtcacccgcaaggtgaccgtgaatgtgctctccccccggtatgagattgtcatcatcactgtggtagcagccgcagtcataatgggcactgcaggcctcagcacgtacctctataaccgccagcggaagatcaagaaatacagactacaacaggcccaaaaagggacccccatgaaaccgaacacacaagccacgcctccctgaacctatcccgggacagggcctcttcctcggccttcccatattggtggcagtggtgccacactgaacagagtggaagacatatgccatgcagctacacctaccggccctgggacgccggaggacagggcattgtcctcagtcagatacaacagcatttggggccatggtacctgcacacctaaaacactaggccacgcatctgatctgtagtcacatgactaagccaagaggaaggagcaagactcaagacatgattgatggatgttaaagtctagcctgatgagaggggaagtggtgggggagacatagccccaccatgaggacatacaactgggaaatactgaaacttgctgcctattgggtatgctgaggccccacagacttacagaagaagtggccctccatagacatgtgtagcatcaaaacacaaaggcccacacttcctgacggatgccagcttgggcactgctgtctactgaccccaacccttgatgatatgtatttattcatttgttattttaccagctatttattgagtgtcttttatgtaggctaaatgaacataggtctctggcctcacggagctcccagtccatgtcacattcaaggtcaccaggtacagttgtacaggttgtacactgcaggagagtgcctggcaaaaagatcaaatggggctgggacttctcattggccaacctgcctttccccagaaggagtgatttttctatcggcacaaaagcactatatggactggtaatggttcacaggttcagagattacccagtgaggccttattcctcccttccccccaaaactgacacctttgttagccacctccccacccacatacatttctgccagtgttcacaatgacactcagcggtcatgtctggacatgagtgcccagggaatatgcccaagctatgccttgtcctcttgtcctgtttgcatttcactgggagcttgcactattgcagctccagtttcctgcagtgatcagggtcctgcaagcagtggggaagggggccaaggtattggaggactccctcccagctttggaagcctcatccgcgtgtgtgtgtgtgtgtgtatgtgtagacaagctctcgctctgtcacccaggctggagtgcagtggtgcaatcatggttcactgcagtcttgaccttttgggctcaagtgatcctcccacctcagcctcctgagtagctgggaccataggctcacaacaccacacctggcaaatttgattttttttttttttttcagagacggggtctcgcaacattgcccagacttcctttgtgttagttaataaagctttctcaactgcc

SEQ ID NO: 2044 - DNA, 510 bp, Homo Sapiens
cacgatcgacagttgcagatgggaaaaccatggtaaatgacatatagactcattctctaaagcccaggcaataatagatttggtgcaattagtgaccaacatatacatttaagagataatactgactgtgaccagaaccttctgatggttctgaagcatctgctctttagagttacttcagctttacatgtctatgaaatataagattcctcaatgggatgttatagcttattctgcactagatacaagtaatatgtatagattaagaacaaatgactacttttcaccttccaggagcctgtttttatttatacaaaattagattggttttccacccacatgtatgcataagtgcttctcaaatttacaccgttcatatctgaaatcccacaataaatgcaaataaatggatactagtttatatatttcatattttcattcatcttttttgtttttgttggaaacagagtctcggtggcccaggcggaagtgtcaaggggggtaccgagc

SEQ ID NO: 2045 - DNA, 490 bp, Homo Sapiens
ctgaagttgaagtacaaccagcatatcaatagattaccagaagcccagttgagcacagtagaatatatatctgttgcagcactatccaaaatatttgctgtcgcagcaacatacccatatcaagtcgtaagagctcgtcttcaggatcaacacatgttttacagtggtgtaatagatgtaatcacaaagacatggaggaaagaaggcgtcggtggattttacaagggaattgctcctaatttgattagagtgactccagcctgctgtattacctttgtggtatatgaaaacgtctcacattttttacttgaccttagagaaaagagaaagtaagctcaaagaggacaattccagtatatctgcccaaggcagcaacaagctcttttgtgtttaaggcataaaagaagaattctgcatagaaacatggctcatattcgaaattgctctatagtcaatagaagccagagaactgctaagtctcctgcaatgt

SEQ ID NO: 2046 - DNA, 413 bp, Homo Sapiens
tttttttttttttttttgctttcttggacggtccaggaggctttggaacagggctcctcggggttttcttgccaactgtctgagcccgggaacaagcacgggcccccttcctccttcagctcctgcccacactccatttcaccctccgaggccgacgccattgtggagttattgttctcagaatctgctatgggggctgcaggaggcagcctctctccgcactggctgcagaacttgggggtttcctccttggagacatgctggcacgaaggacactccatgggtcctgctgggactgccctgcagatccagaagcaagagcaggagtcgctggcagcctgctatatactacatgtcctgtcacgtgaccacgggttcagtttcattttctggggcccccgagctcgccgcct

SEQ ID NO: 2047 - DNA, 355 bp, Homo Sapiens
cgcagcttcatgtaagaattatccagtctatactgtagccacctctggtagatcaaaccgttcctcaatgctacagtgaggtgaggagagaagatggcatacaggcggaagcatcagcaaatgatacttttccgaatgctgattcttcatctgtccctcatggagcagtctattatccagtaatgtcagatccctatgggcagccacctttgccaggtttcgactcctgccttccggttgtgccagattattcctgtgttcccccctggcatccagttggtacagcatatggtggttcttctcaaattcatggtgctataaatcctgggccaattggctgtattgctccatatct

SEQ ID NO: 2048 - DNA, 1637 bp, Homo Sapiens
aagaactggcctgtacattttcaaggaattcttgagaggttcttggagagattctgggagccaaacactccattgggatcctagctgttttagagaacaacttgtaatggagccttcatctcttgagctgccggctgacacagtgcagcgcattgcggctgaactcaaatgccacccaacggatgagagggtggctctccacctagatgaggaagataagctgaggcacttcagggagtgcttttatattcccaaaatacaggatctgcctccagttgatttatcattagtgaataaagatgaaaatgccatctatttcttgggaaattctcttggccttcaaccaaaaatggttaaaacatatcttgaagaagaactagataagtgggccaaaatagcagcctatggtcatgaagtggggaagcgtccttggattacaggagatgagagtattgtaggccttatgaaggacattgtaggagccaatgagaaagaaatagccctaatgaatgctttgactgtaaatttacatcttctaatgttatcattttttaagcctacgccaaaacgatataaaattcttctagaagccaaagccttcccttctgatcattatgctattgagtcacaactacaacttcacggacttaacattgaagaaagtatgcggatgataaagccaagagagggggaagaaaccttaagaatagaggatatccttgaagtaattgagaaggaaggagactcaattgcagtgatcctgttcagtggggtgcatttttacactggacagcactttaatattcctgccatcacaaaagctggacaagcgaagggttgttatgttggctttgatctagcacatgcagttggaaatgttgaactctacttacatgactggggagttgattttgcctgctggtgttcctacaagtatttaaatgcaggagcaggaggaattgctggtgccttcattcatgaaaagcatgcccatacgattaaacctgcattagtgggatggtttggccatgaactcagcaccagatttaagatggataacaaactgcagttaatccctggggtctgtggattccgaatttcaaatcctcccattttgttggtctgttccttgcatgctagtttagagatctttaagcaagcgacaatgaaggcattgcggaaaaaatctgttttgctaactggctatctggaatacctgatcaagcataactatggcaaagataaagcagcaaccaagaaaccagttgtgaacataattactccgtctcatgtagaggagcgggggtgccagctaacaataacattttctgttccaaacaaagatgttttccaagaactagaaaaaagaggagtggtttgtgacaagcggaatccaaatggcattcgagtggctccagttcctctctataattctttccatgatgtttataaatttaccaatctgctcacttctatacttgactctgcagaaacaaaaaattagcagtgttttctagaacaacttaagcaaattatactgaaagctgctgtggttatttcagtattattcgatttttaattattgaaagtatgtcaccattgaccacatgtaactaacaataaataatataccttac

SEQ ID NO: 2049 - DNA, 435 bp, Homo Sapiens
ttttttttttttttttttttttctgggcaattcgctctttattttgggaccagggaaggaccacacacagccctgcagctcagggggcgggggcatccaaacccgggactgcagtacccgaaccctgcccaaaccccgctgtccggaggcgaaatccgggtttccagggtcgggagtgaacatgtaaatgaggtgggcgtggtctgcaggtctcccaggaggcctcgggtgtcctcaccacaggtctgcgcctccggcctgcgggatcgaagggaaaggaatccgatccggggaggcaagcctgggagacgtcgtaagtgatggaccaggatggggccagaccgcgctctcggaggcaggatgttatgtgacttgatgggggcgcttttaccgccacctgccgaggcggtcctcgcagtctgggaagaacgtttt

SEQ ID NO: 2050 - DNA, 2881 bp, Homo Sapiens
ttttcactttaaagagttctgtgagtcagaagtcattttgactgccctcaataaaattagtaatgcaattggtcattttctctttacagattgttcagttcaagggaatgaagaattcagaataattttggtaaatggattccaatatcgggaataagaataagctgaacagttgacctgctttgaagaaacatactgtccatttgtctaaaataatctataacaaccaaaccaatcaaaatgaattcaacattattttcccaggttgaaaatcattcagtccactctaatttctcagagaagaatgcccagcttctggcttttgaaaatgatgattgtcatctgcccttggccatgatatttaccttagctcttgcttatggagctgtgatcattcttggtgtctctggaaacctggccttgatcataatcatcttgaaacaaaaggagatgagaaatgttaccaacatcctgattgtgaacctttccttctcagacttgcttgttgccatcatgtgtctcccctttacatttgtctacacattaatggaccactgggtctttggtgaggcgatgtgtaagttgaatccttttgtgcaatgtgtttcaatcactgtgtccattttctctctggttctcattgctgtggaacgacatcagctgataatcaaccctcgagggtggagaccaaataatagacatgcttatgtaggtattgctgtgatttgggtccttgctgtggcttcttctttgcctttcctgatctaccaagtaatgactgatgagccgttccaaaatgtaacacttgatgcgtacaaagacaaatacgtgtgctttgatcaatttccatcggactctcataggttgtcttataccactctcctcttggtgctgcagtattttggtccactttgttttatatttatttgctacttcaaggtaagaaaactttttttctatcatttccatttttaccttctttacacagaattcctcatcaaatgagtgtttctatttaaacttttttcttccatagatatatatacgcctaaaaaggagaaacaacatgatggacaagatgagagacaataagtacaggtccagtgaaaccaaaagaatcaatatcatgctgctctccattgtggtagcatttgcagtctgctggctccctcttaccatctttaacactgtgtttgattggaatcatcagatcattgctacctgcaaccacaatctgttattcctgctctgccacctcacagcaatgatatccacttgtgtcaaccccatattttatgggttcctgaacaaaaacttccagagagacttgcagttcttcttcaacttttgtgatttccggtctcgggatgatgattatgaaacaatagccatgtccacgatgcacacagatgtttccaaaacttctttgaagcaagcaagcccagtcgcatttaaaaaaatcaacaacaatgatgataatgaaaaaatctgaaactacttatagcctatggtcccggatgacatctgtttaaaaacaagcacaacctgcaacatactttgattacctgttctcccaaggaatggggttgaaatcatttgaaaatgactaagattttcttgtcttgctttttactgcttttgttgtagttgtcataattacatttggaacaaaaggtgtgggctttggggtcttctggaaatagttttgaccagacatctttgaagtgctttttgtgaatttatgcatataatataaagacttttatactgtacttattggaatgaaatttctttaaagtattacgatgcgctgacttcagaagtacctgccatccaatacggtcattagattgggtcatcttgattagattagattagattagattgtcaacagattgggccatccttactttatgataggcatcattttagtgtgttacaatagtaacagtatgcaaaagcagcattcaggagccgaaagatagtcttgaagtcattcagaagtggtttgaggtttctgttttttggtggtttttgtttgttttttttttttttcaccttaagggaggctttcatttcctcccgactgattgtcacttaaatcaaaatttaaaaatgaataaaaagacatacttctcagctgcaaatattatggagaattgggcacccacaggaatgaagagagaaagcagctccccaacttcaaaaccattttggtacctgacaacaagagcattttagagtaattaatttaataaagtaaattagtattgctgcaaatagctaaattatatttatttgaattgatggtcaagagattttccattttttttacagactgttcagtgtttgtcaagcttctggtctaatatgtactcgaaagactttccgcttacaatttgtagaaacacaaatatcgttttccatacagcagtgcctatatagtgactgattttaactttcaatgtccatctttcaaaggaagtaacaccaaggtacaatgttaaaggaatattcactttacctagcagggaaaaatacacaaaaactgcagatacttcatatagcccattttaacttgtataaactgtgtgacttgtggcgtcttataaataatgcactgtaaagattactgaatagttgtgtcatgttaatgtgcctaatttcatgtatcttgtaatcatgattgagcctcagaatcatttggagaaactatattttaaagaacaagacatacttcaatgtattatacagataaagtattacatgtgtttgattttaaaagggcggacattttattaaaatcaatattgtttttgctttttctgaggagtctctttcagtttcattttttctcatcccatgacttccctccgatggt

SEQ ID NO: 2051 - DNA, 336 bp, Homo Sapiens
  misc_feature (326)..(326): n is a, c, g, or t
ccaaccccctaaatcagaatccctggggttgggcccaagagtctccattttttgacaagctcctccaggagattcctccagacatggaaatcctcacttgactcttcccccataacaaactgccctgatgtctgcagagagagggtctgctgtagacagggattaagaaaaagcaggacattttcagataggatgcccaaacccagacgcagattaggacccatgaagtagggggtagagctgaccctcaggaatgtgcccagacagagcttaagctttcaggaaaattaagaaagaccctcagaccccagagtcttgtcttgagnttagcttcga

SEQ ID NO: 2052 - DNA, 1537 bp, Homo Sapiens
gctctcattaccttctgcccatcacttaataaatagccagccaattcatcaacattctggtacactgttggagagatgagacagtcacaccagctgcccctagtggggctcttactgttttcttttattccaagccaactatgcgagatttgtgaggtaagtgaagaaaactacatccgcctaaaacctctgttgaatacaatgatccagtcaaactataacaggggaaccagcgctgtcaatgttgtgttgtccctcaaacttgttggaatccagatccaaaccctgatgcaaaagatgatccaacaaatcaaatacaatgtgaaaagcagattgtcagatgtaagctcgggagagcttgccttgattatactggctttgggagtatgtcgtaacgctgaggaaaacttaatatatgattaccacctgactgacaagctagaaaataaattccaagcagaaattgaaaatatggaagcacacaatggcactcccctgactaactactaccagctcagcctggacgttttggccttgtgtctgttcaatgggaactactcaaccgccgaagttgtcaaccacttcactcctgaaaataaaaactattattttggtagccagttctcagtagatactggtgcaatggctgtcctggctctgacctgtgtgaagaagagtctaataaatgggcagatcaaagcagatgaaggcagtttaaagaacatcagtatttatacaaagtcactggtagaaaagattctgtctgagaaaaaagaaaatggtctcattggaaacacatttagcacaggagaagccatgcaggccctctttgtatcatcagactattataatgaaaatgactggaattgccaacaaactctgaatacagtgctcacggaaatttctcaaggagcattcagtaatccaaacgctgcagcccaggtcttacctgccctgatgggaaagaccttcttggatattaacaaagactcttcttgcgtctctgcttcaggtaacttcaacatctccgctgatgagcctataactgtgacacctcctgactcacaatcatatatctccgtcaattactctgtgagaatcaatgaaacatatttcaccaatgtcactgtgctaaatggttctgtcttcctcagtgtgatggagaaagcccagaaaatgaatgatactatatttggtttcacaatggaggagcgctcatgggggccctatatcacctgtattcagggcctatgtgccaacaataatgacagaacctactgggaacttctgagtggaggcgaaccactgagccaaggagctggtagttacgttgtccgcaatggagaaaacttggaggttcgctggagcaaatactaataagcccaaactttcctcagctgcataaaatccatttgcagtggagttccatgtttattgtccttatgccttcttcttcatttatcccagtacgagcaggagagttaataacctccccttctctctctacatgttcaataaaagttgttgaaagattaac

SEQ ID NO: 2053 - DNA, 275 bp, Homo Sapiens
acgcgtccgccgcgagcgaggctcaccgtccccggcgtgcaggatccggggctgctgagcgctcgctcccgcgtgtccggcgcttggagtccccgcggcaggagaggagtcgggacactagagctccaggggcgcctgtgggctccagggcctccggcttccccagtccccttcagctaaagccccagagacgtgctcagccccaggacctctgcggaacaagatccggattggagaagccactgcaactacccgaaatgggcagcaaaaccttg

SEQ ID NO: 2054 - DNA, 2881 bp, Homo Sapiens
ccagcgaggatgcagacgagttgcacaaaattttactggagaaaaaggatgcctgaacacgcaaagtcggctgcagaattattgccaagttgctgctgcttccaccgccccttagtcagtttttcttctcttctttgacattctaagaacttatagataacttaaaacttttgtgaggaagattaatgtggccaataaaacctttaaatgttaagtgtcaagaaactgcactctcccttcttaagaactgcctaaagtgtaaaatacatttgaatgcaatttttggaagattttttaatgttcgtttattaaactaaccctaagtgatttcttcaaggactgcaatcagggtatcaatttgctttcccaaaggctcttccaacccgtgggttttggggtccaccgccaccaccagagaggcttttgaacaggtgcctggctgtgttcagaaggaagctggcctgtgtgcttctctccggtgggctcagccgacgtgtgagacttgttctgttaccaaatgaaccgggctgccacgctgtgacaggcgtttgtcctctgctttatttttactttgaagctcaaatgcgagtactaagtgttcacctcagcgttcgaatcattggcctgtaaccctgtgggctgcttcacgagaattcaggacctgcattttcattctaaaaagaaatgaacagcttgtgaaggagttttttggcttcatagtttctattcatgaggtagtgttacttctttatccccctaaagacaaaatgaagataaagggggattgccaggaatgggtttaaaagcacaaatgtggtagcttatcatctacaccatggagagtgaacccttacgaaatgaaagtcaaatgagaccatccgagaaaaagatgcgcataggcatttgtaccatgatcaaccccacgcacatgaaaactgtgaccaagtgacgtgcctgggagctttgacacacgagccgtgtgaattcactaggaaacatgtaataaagtcatggaagagaaaatcgtgtgtaaattttgcctttaactttagaccgcagtatattataatacatttgatatctgaaatatctttacttttttaagagtaagattccatatgtctgtctggaagggagccatggttattcacacgaatatccctgtcacttctccagaggtgtcaggtaactaacacgagcattctttgaagactctgggcacatgaatgatacacagaattgaatgtttaaatttccactttgagtcctcatgaatcatttgagactagtaccagctgatcttgtgtacaggctcagggtcagtgcccaagggctcccgcgtgtgtgttctgatcttcagtgcgtagcacattctccatttagaaaagagtggtcagaataattgtggacggtacagtggctttttaaaactacagtctttaggtgtaaggtttggcgccgggagcaattttatgatcaaatatgatgaactcctaagtcactgaggtgtgattgggccaatgttggcatgaggttcttgctctacttccagtgttttgattccactgggagaatttggcctagtgtgtggctttggatgaatccgtgtagagagaggtgagcttgtcctgttacagatgctgtcagacatagcgatagtaggcacctagggaggaagtggccgttagttttacactgactttttaagaatggagaatgcacgtgggtttctgttgcggatgattcatagtaagcaagcggttgatgctgttaataccggccccacccgattgacattaagtttattcagcttttaaaaagatgaagaactaaggggaacaaatttaagtttgttgcaacttagccacacatgcttccctggtaccagctggaatcagcagctcacaggcatcttcaggacacttcagtgtatatgacacagtactttgttagcgtctgcgtgtgtatggaaagttgacaaaaaatggcatgaaaagatcatgattggattttcttttaaacctgcccttctgtaaaaaatagtttatatatttttaaattagtaggtatgtgtggcttccttttttcctaacattcccagcaaatttttgctgctaagactatcactgttaaagtgaaaattacagggaaaaatgtgatgaatataccgtaactcaaaatgtgatattttcttaaaatcactcttttatgctttaggaactggttggtctccactttgattattagtgtaaagagcctgagtatacgtggatttcattgtaaaatttaactccttgtcttttacttggggcacggggcccctggagggcttccctactttccccactatgttaacaggtaattctgatttatgcgtttagtttgacttatttttaacaaaatattagaagttatgctttaaaatgtttaatgtggactgaaattttcatcttttgtttgagaatctatgaagtgtatcatatacgtggcctaaagcaaggtgtgtattttgttattctgaaattgttttgcatctggacaaatactaaatatcccagtggccttttttttttttttttttaaacctgtgtatccatctcatccttttgcgcattcctagtaagcaaaaaaatttgttatgccatcttcattattcgaattacagactgaaaaaatatggccagtttttaaagaagtttagattatgttttccatggaaggacaagtctgactgttcataggctgattttctttaagaggattattctgttttacaatttcaattctagatcacattttatatatgctgcatgccaaaaaaaaaaaaaaaaaaaaaaaaaaaaaaaaaaaaaaaaaaaaaaaaaaaaaaaaaaaaaaaaaa

SEQ ID NO: 2055 - DNA, 375 bp, Homo Sapiens
  misc_feature (62)..(62): n is a, c, g, or t
  misc_feature (198)..(198): n is a, c, g, or t
  misc_feature (306)..(306): n is a, c, g, or t
  misc_feature (357)..(357): n is a, c, g, or t
gtgattcaatattcaagagtctttattgaagacttgagatgggacttccaactcagaggatntgggaatcccagctcaaatgatacaggataaactgggatgggctaggatggacaggctgtggatatgggagtcatgggtcaaagtcttatcccagatggctccaggtacagtgggcttcctgggctggaactgggncctccccacttcattctgctcaaagcttcttgaaggagctggtttgacttcaacttgctagagcctagcctcatctttcagtcaactgggaaggcttatcagagggantccagcccaaccagattgaagtacattcttctttttgggtcgcccgggganctgctctgcttacggtac

SEQ ID NO: 2056 - DNA, 2616 bp, Homo Sapiens
agaggagcctgagaagaggcagaggaaggcgaaacatggctgctctaggagtccagagtatcaactggcagacggccttcaaccgacaagcgcatcacacagacaagttctccagccaggagctcatcttgcggagaggccaaaacttccaggtcttaatgatcatgaacaaaggccttggctctaacgaaagactggagttcattgtctccacagggccttacccctcagagtcggccatgacgaaggctgtgtttccactctccaatggcagtagtggtggctggagtgcggtgcttcaggccagcaatggcaatactctgactatcagcatctccagtcctgccagcgcacccataggacggtacacaatggccctccagatcttctcccagggcggcatctcctctgtgaaacttgggacgttcatactgctttttaacccctggctgaatgtggatagcgtctttatgggtaaccacgctgagagagaagagtatgttcaggaagatgccggcatcatctttgtgggaagcacaaaccgaattggcatgattggctggaactttggacagtttgaagaagacattctcagcatctgcctctcaatcttggataggagtctgaatttccgccgtgacgctgctactgatgtggccagcagaaatgaccccaaatacgttggccgggtgctgagtgccatgatcaatagcaatgatgacaatggtgtgcttgctgggaattggagcggcacttacaccggtggccgggacccaaggagctggaacggcagcgtggagatcctcaaaaattggaaaaaatctggcttcagcccagtccgatatggccagtgctgggtctttgctgggaccctcaacacagcgctgcggtctttggggattccttcccgggtgatcaccaacttcaactcagctcatgacacagaccgaaatctcagtgtggatgtgtactacgaccccatgggaaaccccctggacaagggtagtgatagcgtatggaatttccatgtctggaatgaaggctggtttgtgaggtctgacctgggcccctcgtacggtggatggcaggtgttggatgctaccccgcaggaaagaagccaaggggtgttccagtgcggccccgcttcggtcattggtgttcgagagggtgatgtgcagctgaacttcgacatgccctttatcttcgcggaggttaatgccgaccgcatcacctggctgtacgacaacaccactggcaaacagtggaagaattccgtgaacagtcacaccattggcaggtacatcagcaccaaggcggtgggcagcaatgctcgcatggacgtcacggacaagtacaagtacccagaaggctctgaccaggaaagacaagtgttccaaaaggctttggggaaacttaaacccaacacgccatttgccgcgacgtcttcaatgggtttggaaacagaggaacaggagcccagcatcatcgggaagctgaaggtcgctggcatgctggcagtaggcaaagaagtcaacctggtcctactgctcaaaaacctgagcagggatacgaagacagtgacagtgaacatgacagcctggaccatcatctacaacggcacgcttgtacatgaagtgtggaaggactctgccacaatgtccctggaccctgaggaagaggcagaacatcccataaagatctcgtacgctcagtatgagaagtacctgaagtcagacaacatgatccggatcacagcggtgtgcaaggtcccagatgagtctgaggtggtggtggagcgggacatcatcctggacaaccccaccttgaccctggaggtgctgaacgaggctcgtgtgcggaagcctgtgaacgtgcagatgctcttctccaatccactggatgagccggtgagggactgcgtgctgatggtggagggaagcggcctgctgttgggtaacctgaagatcgacgtgccgaccctagggcccaaggagcggtcccgggtccgttttgatatcctgccctcccggagtggcaccaagcaactgctcgccgacttctcctgcaacaagttccctgcaatcaaggccatgttgtccatcgatgtagccgaatgaagggcgctggtggcctcccgtacaaacttggacaacacggagcagggagagctcaccatggaatgaaccccccgcccatgctgtccggcctgggaaaccctctccatctcccaaggctgccagacatggactccgggctccagcacatccccctctcctctcccccaggttggggctgggtccaccctgtcctatgacttgatcacttttgcacattccctggccgcttctccccagagctgcctgctctgtgagccccacagccctgctcattcctcacgcccttcaatgctgcaggatggactggcccctgacccagggactctccaaacgggatacaggagagaagctggtctagactgtttgctgatccccaacctgcacggggcattcctgcttctctctcaggccaccacagagggcaggggatggttagtcacctgccccagcactcacaccctaactcaaaataaatgttaaataagtgcgatcacacaaa

SEQ ID NO: 2057 - DNA, 14082 bp, Homo Sapiens
atgctgtctgtgaagctgaatctgtgagaacacctcactattcacggcaaccggagtggaagaaacaggtgcaaaaagattgtgtgtttgtctgcttttgtgaggctggtcagagattctgtgcctgctttatctgtgcttggctatgactctacctccaggtttaccataccccatagaatgtgtaagagaaaagtaccaacagggaaatcagcaaaaagctttcctatgaaggtgtgtagccagcctccgcagaatttgaaatgtctgaggtttcttctggtgagtaaaagctgcagataatcaacagccattcagaagaatgataaatgccacaagcatttggaaacaggcttccctaaagatgaaagagaagatgttcaaaagaaaacattcacaaaatgggtaaatgcacaattttctaagtttgggaagcagcatattgagaacctcttcagtgacctacaggatgggaggcgcctcctagacctcctcgaaggcctgacagggcaaaaactgccaaaagaaaaaggatccacaagagttcatgccctgaacaatgtcaacaaggcactgcgggttttgcagaacaataatgttgatttagtgaatattggaagtactgacatcgtagatggaaatcataaactgactcttggtttgatttggaatataatcctccactggcaggtcaaaaatgtaatgaaaaatatcatggctggattgcaacaaaccaacagtgaaaagattctcctgagctgggtccgacaatcaactcgtaattatccacaggttaatgtaatcaacttcaccaccagctggtctgatggcctggctttgaatgctctcatccatagtcataggccagacctatttgactggaatagtgtggtttgccagcagtcagccacacaacgactggaacatgcattcaacatcgccagatatcaattaggcatagagaaactactcgatcctgaagatgttgataccacctatccagataagaagtccatcttaatgtacatcacatcactcttccaagttttgcctcaacaagtgagcattgaagccatccaggaagtggaaatgttgccaaggccacctaaagtgactaaagaagaacattttcagttacatcatcaaatgcactattctcaacagatcacggtcagtctagcacagggatatgagagaacttcttcccctaagcctcgattcaagagctatgcctacacacaggctgcttatgtcaccacctctgaccctacacggagcccatttccttcacagcatttggaagctcctgaagacaagtcatttggcagttcattgatggagagtgaagtaaacctggaccgttatcaaacagctttagaagaagtattatcgtggcttctttctgctgaggacacattgcaagcacaaggagagatttctaatgatgtggaagtggtgaaagaccagtttcatactcatgaggggtacatgatggatttgacagcccatcagggccgggttggtaatattctacaattgggaagtaagctgattggaacaggaaaattatcagaagatgaagaaactgaagtacaagagcagatgaatctcctaaattcaagatgggaatgcctcagggtagctagcatggaaaaacaaagcaatttacatagagttttaatggatctccagaatcagaaactgaaagagttgaatgactggctaacaaaaacagaagaaagaacaaggaaaatggaggaagagcctcttggacctgatcttgaagacctaaaacgccaagtacaacaacataaggtgcttcaagaagatctagaacaagaacaagtcagggtcaattctctcactcacatggtggtggtagttgatgaatctagtggagatcacgcaactgctgctttggaagaacaacttaaggtattgggagatcgatgggcaaacatctgtagatggacagaagaccgctgggttcttttacaagacatccttctcaaatggcaacgtcttactgaagaacagtgcctttttagtgcatggctttcagaaaaagaagatgcagtgaacaagattcacacaactggctttaaagatcaaaatgaaatgttatcaagtcttcaaaaactggccgttttaaaagcggatctagaaaagaaaaagcaatccatgggcaaactgtattcactcaaacaagatcttctttcaacactgaagaataagtcagtgacccagaagacggaagcatggctggataactttgcccggtgttgggataatttagtccaaaaacttgaaaagagtacagcacagatttcacaggctgtcaccaccactcagccatcactaacacagacaactgtaatggaaacagtaactacggtgaccacaagggaacagatcctggtaaagcatgctcaagaggaacttccaccaccacctccccaaaagaagaggcagattactgtggattctgaaattaggaaaaggttggatgttgatataactgaacttcacagctggattactcgctcagaagctgtgttgcagagtcctgaatttgcaatctttcggaaggaaggcaacttctcagacttaaaagaaaaagtcaatgccatagagcgagaaaaagctgagaagttcagaaaactgcaagatgccagcagatcagctcaggccctggtggaacagatggtgaatgagggtgttaatgcagatagcatcaaacaagcctcagaacaactgaacagccggtggatcgaattctgccagttgctaagtgagagacttaactggctggagtatcagaacaacatcatcgctttctataatcagctacaacaattggagcagatgacaactactgctgaaaactggttgaaaatccaacccaccaccccatcagagccaacagcaattaaaagtcagttaaaaatttgtaaggatgaagtcaaccggctatcaggtcttcaacctcaaattgaacgattaaaaattcaaagcatagccctgaaagagaaaggacaaggacccatgttcctggatgcagactttgtggcctttacaaatcattttaagcaagtcttttctgatgtgcaggccagagagaaagagctacagacaatttttgacactttgccaccaatgcgctatcaggagaccatgagtgccatcaggacatgggtccagcagtcagaaaccaaactctccatacctcaacttagtgtcaccgactatgaaatcatggagcagagactcggggaattgcaggctttacaaagttctctgcaagagcaacaaagtggcctatactatctcagcaccactgtgaaagagatgtcgaagaaagcgccctctgaaattagccggaaatatcaatcagaatttgaagaaattgagggacgctggaagaagctctcctcccagctggttgagcattgtcaaaagctagaggagcaaatgaataaactccgaaaaattcagaatcacatacaaaccctgaagaaatggatggctgaagttgatgtttttctgaaggaggaatggcctgcccttggggattcagaaattctaaaaaagcagctgaaacagtgcagacttttagtcagtgatattcagacaattcagcccagtctaaacagtgtcaatgaaggtgggcagaagataaagaatgaagcagagccagagtttgcttcgagacttgagacagaactcaaagaacttaacactcagtgggatcacatgtgccaacaggtctatgccagaaaggaggccttgaagggaggtttggagaaaactgtaagcctccagaaagatctatcagagatgcacgaatggatgacacaagctgaagaagagtatcttgagagagattttgaatataaaactccagatgaattacagaaagcagttgaagagatgaagagagctaaagaagaggcccaacaaaaagaagcgaaagtgaaactccttactgagtctgtaaatagtgtcatagctcaagctccacctgtagcacaagaggccttaaaaaaggaacttgaaactctaaccaccaactaccagtggctctgcactaggctgaatgggaaatgcaagactttggaagaagtttgggcatgttggcatgagttattgtcatacttggagaaagcaaacaagtggctaaatgaagtagaatttaaacttaaaaccactgaaaacattcctggcggagctgaggaaatctctgaggtgctagattcacttgaaaatttgatgcgacattcagaggataacccaaatcagattcgcatattggcacagaccctaacagatggcggagtcatggatgagctaatcaatgaggaacttgagacatttaattctcgttggagggaactacatgaagaggctgtaaggaggcaaaagttgcttgaacagagcatccagtctgcccaggagactgaaaaatccttacacttaatccaggagtccctcacattcattgacaagcagttggcagcttatattgcagacaaggtggacgcagctcaaatgcctcaggaagcccagaaaatccaatctgatttgacaagtcatgagatcagtttagaagaaatgaagaaacataatcaggggaaggaggctgcccaaagagtcctgtctcagattgatgttgcacagaaaaaattacaagatgtctccatgaagtttcgattattccagaaaccagccaattttgagcagcgtctacaagaaagtaagatgattttagatgaagtgaagatgcacttgcctgcattggaaacaaagagtgtggaacaggaagtagtacagtcacagctaaatcattgtgtgaacttgtataaaagtctgagtgaagtgaagtctgaagtggaaatggtgataaagactggacgtcagattgtacagaaaaagcagacggaaaatcccaaagaacttgatgaaagagtaacagctttgaaattgcattataatgagctgggagcaaaggtaacagaaagaaagcaacagttggagaaatgcttgaaattgtcccgtaagatgcgaaaggaaatgaatgtcttgacagaatggctggcagctacagatatggaattgacaaagagatcagcagttgaaggaatgcctagtaatttggattctgaagttgcctggggaaaggctactcaaaaagagattgagaaacagaaggtgcacctgaagagtatcacagaggtaggagaggccttgaaaacagttttgggcaagaaggagacgttggtggaagataaactcagtcttctgaatagtaactggatagctgtcacctcccgagcagaagagtggttaaatcttttgttggaataccagaaacacatggaaacttttgaccagaatgtggaccacatcacaaagtggatcattcaggctgacacacttttggatgaatcagagaaaaagaaaccccagcaaaaagaagacgtgcttaagcgtttaaaggcagaactgaatgacatacgcccaaaggtggactctacacgtgaccaagcagcaaacttgatggcaaaccgcggtgaccactgcaggaaattagtagagccccaaatctcagagctcaaccatcgatttgcagccatttcacacagaattaagactggaaaggcctccattcctttgaaggaattggagcagtttaactcagatatacaaaaattgcttgaaccactggaggctgaaattcagcagggggtgaatctgaaagaggaagacttcaataaagatatgaatgaagacaatgagggtactgtaaaagaattgttgcaaagaggagacaacttacaacaaagaatcacagatgagagaaagcgagaggaaataaagataaaacagcagctgttacagacaaaacataatgctctcaaggatttgaggtctcaaagaagaaaaaaggctctagaaatttctcatcagtggtatcagtacaagaggcaggctgatgatctcctgaaatgcttggatgacattgaaaaaaaattagccagcctacctgagcccagagatgaaaggaaaataaaggaaattgatcgggaattgcagaagaagaaagaggagctgaatgcagtgcgtaggcaagctgagggcttgtctgaggatggggccgcaatggcagtggagccaactcagatccagctcagcaagcgctggcgggaaattgagagcaaatttgctcagtttcgaagactcaactttgcacaaattcacactgtccgtgaagaaacgatgatggtgatgactgaagacatgcctttggaaatttcttatgtgccttctacttatttgactgaaatcactcatgtctcacaagccctattagaagtggaacaacttctcaatgctcctgacctctgtgctaaggactttgaagatctctttaagcaagaggagtctctgaagaatataaaagatagtctacaacaaagctcaggtcggattgacattattcatagcaagaagacagcagcattgcaaagtgcaacgcctgtggaaagggtgaagctacaggaagctctctcccagcttgatttccaatgggaaaaagttaacaaaatgtacaaggaccgacaagggcgatttgacagatctgttgagaaatggcggcgttttcattatgatataaagatatttaatcagtggctaacagaagctgaacagtttctcagaaagacacaaattcctgagaattgggaacatgctaaatacaaatggtatcttaaggaactccaggatggcattgggcagcggcaaactgttgtcagaacattgaatgcaactggggaagaaataattcagcaatcctcaaaaacagatgccagtattctacaggaaaaattgggaagcctgaatctgcggtggcaggaggtctgcaaacagctgtcagacagaaaaaagaggctagaagaacaaaagaatatcttgtcagaatttcaaagagatttaaatgaatttgttttatggttggaggaagcagataacattgctagtatcccacttgaacctggaaaagagcagcaactaaaagaaaagcttgagcaagtcaagttactggtggaagagttgcccctgcgccagggaattctcaaacaattaaatgaaactggaggacccgtgcttgtaagtgctcccataagcccagaagagcaagataaacttgaaaataagctcaagcagacaaatctccagtggataaaggtttccagagctttacctgagaaacaaggagaaattgaagctcaaataaaagaccttgggcagcttgaaaaaaagcttgaagaccttgaagagcagttaaatcatctgctgctgtggttatctcctattaggaatcagttggaaatttataaccaaccaaaccaagaaggaccatttgacgttcaggaaactgaaatagcagttcaagctaaacaaccggatgtggaagagattttgtctaaagggcagcatttgtacaaggaaaaaccagccactcagccagtgaagaggaagttagaagatctgagctctgagtggaaggcggtaaaccgtttacttcaagagctgagggcaaagcagcctgacctagctcctggactgaccactattggagcctctcctactcagactgttactctggtgacacaacctgtggttactaaggaaactgccatctccaaactagaaatgccatcttccttgatgttggaggtacctgctctggcagatttcaaccgggcttggacagaacttaccgactggctttctctgcttgatcaagttataaaatcacagagggtgatggtgggtgaccttgaggatatcaacgagatgatcatcaagcagaaggcaacaatgcaggatttggaacagaggcgtccccagttggaagaactcattaccgctgcccaaaatttgaaaaacaagaccagcaatcaagaggctagaacaatcattacggatcgaattgaaagaattcagaatcagtgggatgaagtacaagaacaccttcagaaccggaggcaacagttgaatgaaatgttaaaggattcaacacaatggctggaagctaaggaagaagctgagcaggtcttaggacaggccagagccaagcttgagtcatggaaggagggtccctatacagtagatgcaatccaaaagaaaatcacagaaaccaagcagttggccaaagacctccgccagtggcagacaaatgtagatgtggcaaatgacttggccctgaaacttctccgggattattctgcagatgataccagaaaagtccacatgataacagagaatatcaatgcctcttggagaagcattcataaaagggtgagtgagcgagaggctgctttggaagaaactcatagattactgcaacagttccccctggacctggaaaagtttcttgcctggcttacagaagctgaaacaactgccaatgtcctacaggatgctacccgtaaggaaaggctcctagaagactccaagggagtaaaagagctgatgaaacaatggcaagacctccaaggtgaaattgaagctcacacagatgtttatcacaacctggatgaaaacagccaaaaaatcctgagatccctggaaggttccgatgatgcagtcctgttacaaagacgtttggataacatgaacttcaagtggagtgaacttcggaaaaagtctctcaacattaggtcccatttggaagccagttctgaccagtggaagcgtctgcacctttctctgcaggaacttctggtgtggctacagctgaaagatgatgaattaagccggcaggcacctattggaggcgactttccagcagttcagaagcagaacgatgtacatagggccttcaagagggaattgaaaactaaagaacctgtaatcatgagtactcttgagactgtacgaatatttctgacagagcagcctttggaaggactagagaaactctaccaggagcccagagagctgcctcctgaggagagagcccagaatgtcactcggcttctacgaaagcaggctgaggaggtcaatactgagtgggaaaaattgaacctgcactccgctgactggcagagaaaaatagatgagacccttgaaagactccaggaacttcaagaggccacggatgagctggacctcaagctgcgccaagctgaggtgatcaagggatcctggcagcccgtgggcgatctcctcattgactctctccaagatcacctcgagaaagtcaaggcacttcgaggagaaattgcgcctctgaaagagaacgtgagccacgtcaatgaccttgctcgccagcttaccactttgggcattcagctctcaccgtataacctcagcactctggaagacctgaacaccagatggaagcttctgcaggtggccgtcgaggaccgagtcaggcagctgcatgaagcccacagggactttggtccagcatctcagcactttctttccacgtctgtccagggtccctgggagagagccatctcgccaaacaaagtgccctactatatcaaccacgagactcaaacaacttgctgggaccatcccaaaatgacagagctctaccagtctttagctgacctgaataatgtcagattctcagcttataggactgccatgaaactccgaagactgcagaaggccctttgcttggatctcttgagcctgtcagctgcatgtgatgccttggaccagcacaacctcaagcaaaatgaccagcccatggatatcctgcagattattaattgtttgaccactatttatgaccgcctggagcaagagcacaacaatttggtcaacgtccctctctgcgtggatatgtgtctgaactggctgctgaatgtttatgatacgggacgaacagggaggatccgtgtcctgtcttttaaaactggcatcatttccctgtgtaaagcacatttggaagacaagtacagataccttttcaagcaagtggcaagttcaacaggattttgtgaccagcgcaggctgggcctccttctgcatgattctatccaaattccaagacagttgggtgaagttgcatcctttgggggcagtaacattgagccaagtgtccggagctgcttccaatttgctaataataagccagagatcgaagcggccctcttcctagactggatgagactggaaccccagtccatggtgtggctgcccgtcctgcacagagtggctgctgcagaaactgccaagcatcaggccaaatgtaacatctgcaaagagtgtccaatcattggattcaggtacaggagtctaaagcactttaattatgacatctgccaaagctgctttttttctggtcgagttgcaaaaggccataaaatgcactatcccatggtggaatattgcactccgactacatcaggagaagatgttcgagactttgccaaggtactaaaaaacaaatttcgaaccaaaaggtattttgcgaagcatccccgaatgggctacctgccagtgcagactgtcttagagggggacaacatggaaactcccgttactctgatcaacttctggccagtagattctgcgcctgcctcgtcccctcagctttcacacgatgatactcattcacgcattgaacattatgctagcaggctagcagaaatggaaaacagcaatggatcttatctaaatgatagcatctctcctaatgagagcatagatgatgaacatttgttaatccagcattactgccaaagtttgaaccaggactcccccctgagccagcctcgtagtcctgcccagatcttgatttccttagagagtgaggaaagaggggagctagagagaatcctagcagatcttgaggaagaaaacaggaatctgcaagcagaatatgaccgtctaaagcagcagcacgaacataaaggcctgtccccactgccgtcccctcctgaaatgatgcccacctctccccagagtccccgggatgctgagctcattgctgaggccaagctactgcgtcaacacaaaggccgcctggaagccaggatgcaaatcctggaagaccacaataaacagctggagtcacagttacacaggctaaggcagctgctggagcaaccccaggcagaggccaaagtgaatggcacaacggtgtcctctccttctacctctctacagaggtccgacagcagtcagcctatgctgctccgagtggttggcagtcaaacttcggactccatgggtgaggaagatcttctcagtcctccccaggacacaagcacagggttagaggaggtgatggagcaactcaacaactccttccctagttcaagaggaagaaatacccctggaaagccaatgagagaggacacaatgtaggaagtcttttccacatggcagatgatttgggcagagcgatggagtccttagtatcagtcatgacagatgaagaaggagcagaataaatgttttacaactcctgattcccgcatggtttttataatattcatacaacaaagaggattagacagtaagagtttacaagaaataaatctatatttttgtgaagggtagtggtattatactgtagatttcagtagtttctaagtctgttattgttttgttaacaatggcaggttttacacgtctatgcaattgtacaaaaaagttataagaaaactacatgtaaaatcttgatagctaaataacttgccatttctttatatggaacgcattttgggttgtttaaaaatttataacagttataaagaaagattgtaaactaaagtgtgctttataaaaaaaagttgtttataaaaacccctaaaaacaaaacaaacacacacacacacacatacacacacacacacaaaactttgaggcagcgcattgttttgcatccttttggcgtgatatccatatgaaattcatggctttttctttttttgcatattaaagataagacttcctctaccaccacaccaaatgactactacacactgctcatttgagaactgtcagctgagtggggcaggcttgagttttcatttcatatatctatatgtctataagtatataaatactatagttatatagataaagagatacgaatttctatagactgactttttccattttttaaatgttcatgtcacatcctaatagaaagaaattacttctagtcagtcatccaggcttacctgcttggtctagaatggatttttcccggagccggaagccaggaggaaactacaccacactaaaacattgtctacagctccagatgtttctcattttaaacaactttccactgacaacgaaagtaaagtaaagtattggatttttttaaagggaacatgtgaatgaatacacaggacttattatatcagagtgagtaatcggttggttggttgattgattgattgattgatacattcagcttcctgctgctagcaatgccacgatttagatttaatgatgcttcagtggaaatcaatcagaaggtattctgaccttgtgaacatcagaaggtattttttaactcccaagcagtagcaggacgatgatagggctggagggctatggattcccagcccatccctgtgaaggagtaggccactctttaagtgaaggattggatgattgttcataatacataaagttctctgtaattacaactaaattattatgccctcttctcacagtcaaaaggaactgggtggtttggtttttgttgcttttttagatttattgtcccatgtgggatgagtttttaaatgccacaagacataatttaaaataaataaactttgggaaaaggtgtaagacagtagccccatcacatttgtgatactgacaggtatcaacccagaagcccatgaactgtgtttccatcctttgcatttctctgcgagtagttccacacaggtttgtaagtaagtaagaaagaaggcaaattgattcaaatgttacaaaaaaacccttcttggtggattagacaggttaaatatataaacaaacaaacaaaaattgctcaaaaaagaggagaaaagctcaagaggaaaagctaaggactggtaggaaaaagctttactctttcatgccattttatttctttttgatttttaaatcattcattcaatagataccaccgtgtgacctataattttgcaaatctgttacctctgacatcaagtgtaattagcttttggagagtgggctgacatcaagtgtaattagcttttggagagtgggttttgtccattattaataattaattaattaacatcaaacacggcttctcatgctatttctacctcactttggttttggggtgttcctgataattgtgcacacctgagttcacagcttcaccacttgtccattgcgttattttctttttcctttataattctttctttttccttcataattttcaaaagaaaacccaaagctctaaggtaacaaattaccaaattacatgaagatttggtttttgtcttgcatttttttcctttatgtgacgctggaccttttctttacccaaggatttttaaaactcagatttaaaacaaggggttactttacatcctactaagaagtttaagtaagtaagtttcattctaaaatcagaggtaaatagagtgcataaataattttgttttaatctttttgtttttcttttagacacattagctctggagtgagtctgtcataatatttgaacaaaaattgagagctttattgctgcattttaagcataattaatttggacattatttcgtgttgtgttctttataaccaccgagtattaaactgtaaatcataatgtaactgaagcataaacatcacatggcatgttttgtcattgttttcaggtactgagttcttacttgagtatcataatatattgtgttttaacaccaacactgtaacatttacgaattatttttttaaacttcagttttactgcattttcacaacatatcagacttcaccaaatatatgccttactattgtattatagtactgctttactgtgtatctcaataaagcacgcagttatgttac

SEQ ID NO: 2058 - DNA, 547 bp, Homo Sapiens
tctattaggccagaaattgcttgaggagattattagcttttttgtattttttaatcaacctgcccctactcctaacctctaataaacagtgcttggtattcactgtgtttagtaaataaaggacaatagtaaaggctgcagaataacaataagaactcctaacaccaaattcacaaaggaagcagagttttcaaaccaaaaaggcctcggcaatcaacactaaggagctgctgctgtcttgtaactcacaaagtactgcttaaaaaaaaaagttttttttcctttatgttttgaaattcttacattaaaggcttgaactgcctgagcattcctaagtccccctgtcttttaaacttgttttaaacatgaaaggaaccttacaattgggaaagttaaagccaaaaaaggcaatgacagtaatggttcccattggtgcctattatgacaccagaccctgcatgctaaaggcctttgagtctgaaatgatgtgcaactttacagagagacaactcaggcccagtggggttaactccaagccctgcagtca

SEQ ID NO: 2059 - DNA, 281 bp, Homo Sapiens
  misc_feature (45)..(45): n is a, c, g, or t
  misc_feature (170)..(170): n is a, c, g, or t
  misc_feature (191)..(191): n is a, c, g, or t
  misc_feature (228)..(228): n is a, c, g, or t
  misc_feature (244)..(244): n is a, c, g, or t
attccccctagggttgatatgtgtctaattcattttataaaaatnattcttgtcttcattttaaagctttggctatatagtcagaaatgtcctaaataacaaactattttgtatttaatttagggaagactaaagggaagaaaaatgaaaactcagtctttatgtaagcnccaaggatattagggcttaangggcttttctagttttatgaggaatttgtactactgnttttgaatatatcccngtttttgaggatgaacagatctctgggggaaattgtt

SEQ ID NO: 2060 - DNA, 496 bp, Homo Sapiens
ttttctaatgctagtcttaaaattgcctctggtattttctaaatgtgctcagaagtcctagggctctggtagttttttaactaataaaataaacatagcaatagagtacctgcagttctgctaacaatattgtttatattataagtccaatccacaaaggctacagagaaaaatatccagtataaacaaacattacttagataccagtggcatcttaaagcagcacacccaagtctcaaaatgcaaaagggaaaaattttccactcccacgatgccaggcacaactccctggtaaagcacttgtcaggtaaaagatagtgacattgcctctgttactgtgaagttggagaggaggtgtgggtgtgaagcacatcagtaattctctctcttcattttttcatcctctttttttcccctcaatttatctcttcttttccacaatgtctctcctttctccatatttcccactttgagctgctctcccatccccaattcc

SEQ ID NO: 2061 - DNA, 309 bp, Homo Sapiens
tttttttttgagtttttaaatagtcaagctctcacttttcaaatgttggcaaatatttttaaaaatttaaatgtgcaggccaaacaagaggcacagggaaacaggcaggccacagctctgcagcccttggaaacgctctgagtgatggtgtacaggctatgcagtggggaaggaagaactcagcacagcctccaaggacaacttggcagtattctatgaaattttacattcaatagccttcgacccagcaattcatgtctaggagttgattcttttgaataatcacttgtggacaaaacacaggtacaa

SEQ ID NO: 2062 - DNA, 561 bp, Homo Sapiens
  misc_feature (558)..(558): n is a, c, g, or t
tccgactggggcaggagcagaagtaaccaccaatgaaattgttgcagaagtggctacaagggacatctacaaaatctgtgcattcatttatgtctgtggcaacatagtatgcagcaaaccccgtaaaacgctcttcattggaaaagtctgacttaaagatcacctggagtttgttgtatgggacttggaactcttccacaattggagagtggggattgttactgctcctctgtccacagagcctcccttcttcagtgacccctgagattatctgcactgagtcatacgcacagttctctgacagctcaatgtccagatgggtgaagtagaggtgaatcccatacccttcaggaacttctatgtcccaagatttctctacctcactgggatatgcctgaggatagttaggggacaggatctccccatacatggtaggctcagcataaacccatgccaaaagtgaaaacaggacaatgcaccacatctctggcgatttgtccaccctggtgagctgcctgtctcttggtcctggctttctgcacctccggactttggagncct

SEQ ID NO: 2063 - DNA, 548 bp, Homo Sapiens
ccaactaaatccataccagccacctccgggagagtactcctggctcccagtaggaggcggagagccaaggggcgtgcaagagagagggggctgggctcccgggtggcaggaggccgcggctgcggagcggccgccctcgatccgggcgatggaggaggaagcaagcgagggggctggttcctgagcttcgcaattcctgtgtcgccttctgggctcccagcctgccgggtcgcatgatccctccggccggagctggttttttttgccagccaccgcgaggccggctgagttaccggcatccccgcagccacctccctctcccgacctgtgatacaaaagatcttccgggggctgcacctgcctgcctttgcctaaggcggatttgaataatcttatcttggctttggatcttagaagagaatcactaaccagagacgagactcagtgagtgagcaggtgttttggacaatggactggttgagcccatccctattataaaaatgtctcagagcaaccgggagctggtggttgactttctctcctacaag

SEQ ID NO: 2064 - DNA, 2284 bp, Homo Sapiens
gaatggaatgaaaagccttgtacaagaggcttcgtgccatgttcagcctgccccttagccttccactgtgtgaggacacagcattccttccttccaagtgctgcagctctcacaagacaatcaaacaagcccgcaccttgatcatgatcttcctagcctccggaacgcactttcagaccatgctgaagtctaaattgaatgtcttaacactgaaaaaggaacctctcccagcggtcatcttccatgagccggaggccattgagctgtgcacgaccacaccgctgatgaagacaaggactcacagtggctgcaagcactttcagaccatgctgaagtctaaattgaatgtcttaacactgaaaaaggaacctctcccagcggtcatcttccatgagccggaggccattgagctgtgcacgaccacaccgctgatgaagacaaggactcacagtggctgcaaggttacctacctgggcaaagtctccaccactggcatgcagtttttgtcaggctgcacagaaaagccagtcattgagctctggaagaagcacacgctagcccgagaggatgtctttccggccaatgccctcctggaaatccggccattccaagtttggctccatcatctcgaccacaaaggggaggccacagtgcacatggataccttccaggtggcccgcatcgcctactgcaccgccgaccacaacgtgagccccaacatcttcgcctgggtctacagggagatcaatgatgacctgtcctaccagatggactgccacgccgtggagtgcgagagcaagctcgaggccaagaaactggcccacgccatgatggaggccttcaggaagactttccacagtatgaagagcgacgggcggatccacagcaacagctcctccgaagaggtttcccaggaattggaatccgatgatggctgaatgaacttgagacgcttcagcaaaggcagcattggtcacggagttcaagggaatagatgagtaagcaacgtttcaaatttgggatgaaaagactgccaaactattggctgaccaaggtttttaaattcagaagagcaattctaaatctaaagaaatgtatcattaaagtaattacgttacattgaaacctgctgctgctgtgactgtgaggagggtgggagtgtggatggggaggaaggttctaggctctcttcttatttttctcatttcccaatgcctctctgtgggagagcttcatgccagttttcaccacgctcaggcaaatactctgcagctgttattggatgggccattccgatctgccttatgaaattccacaagaatgttaggggcaccctctttccccttctaacatccttagagggatgaaatctcagcatatgttgcaggacaccaaaaggaagaaaacaatcaagcaaataaaataaacagtcaaacaaaccaggagtttaaaacaacaaccccaacaacagaagccttggcaaagaggaataagtgatcagcaagtgaacacactctatgtcaactctccttttatccagctgagatttatggtaacttatttaattaatggtcctgtctgatgcatccttgatggcaagcttcaaatctgatttggtatcaccgaggaaaccttgcccccatcactcagcattgcacttagatacagaatgagttagataaacttggcttgtctagagacccatgtcatcttaacctaaagggaaatcttattgcgttatcataaaattgatgatatcttagggtcagaattgcccttttttttattttgaatgggaagctctcactaaaacaatcctgagatttcttaatttcatggttctttaaatattataaacacagagtcaacatagaatgaaattgtatttgttaaaatacacacattggaggacaagagcagatgactacttttcgaagtaatgctgctccttcctaaaagtctgttttcaatcctggtaatattaggggcactgcggcacctaagaagccttaaatgagagctaatccaatttagagagcgatggtgtcagcatttcggtctgcatatctgtgtgtccgtatctgcgtttgtgtgcgtgtacgtgtgcccctgtgtgtgggcccagttttcaggcatgtagaataagcatggagtcatattgaggaggactcacttcttgaagatatgcttgttgctttacaacatatgtaagctattctttagcataaatgcattcattctttaataaaaatatgtttgcattaaaaaaaaaaaaaaaaaaaaa

SEQ ID NO: 2065 - DNA, 3866 bp, Homo Sapiens
ggaattcctttttttttttttttgagatggagtttcactcttgttggccaggctggagtgcaatggcacaatctcagcttactgcaacctccgcctcccgggttcaagcgattctcctgcctcagcctctcaagtagctgggattacaggcatgtgccaccacccctggctaactaatttcttttctatttagtagagatggggtttcaccatgttggtcaggctggtcttgaactcctgacctcaggtgatccacttgccttggcctcccaaagtgctaggattacagccgtgaaactgtgcctggctgattctttttttgttgttggatttttgaaacagggtctcccttggtcgcccaggctggagtgcagtggtgcgatcttggctcactataacctccacctcctggtttcaagtgatcctcccactttagcctcctgagtagctgtgattacaggcgtgcaccaccacacccggctaatttttgtatttttattagagacagggtttcaccatgttggccaggctgttctcaaactcctggactcaagggatccgcctgcctccacttcccaaagtcccgagattacaggtgtgagtcaccatgcctgaccttataattcttaagtcattttttctggtccatttcttccttagggtcctcacaacaaatctgcattaggcggtacaataatccttaacttcatgattcacaaaaggaagatgaagtgattcatgatttagaaaggggaagtagtaagcccactgcacactcctggatgatgatcctaaatccagatacagtaaaaatggggtatgggaaggtagaatacaaaatttggtttaaattaattatctaaatatctaaaaacatttttggatacattgttgatgtgaatgtaagactgtacagacttcctagaaaacagtttgggttccatcttttcatttccccagtgcagttttctgtagaaatggaatccgaggatttaagtggcagagaattgacaattgattccataatgaacaaagtgagagacattaaaaataagtttaaaaatgaagaccttactgatgaactaagcttgaataaaatttctgctgatactacagataactcgggaactgttaaccaaattatgatgatggcaaacaacccagaggactggttgagtttgttgctcaaactagagaaaaacagtgttccgctaagtgatgctcttttaaataaattgattggtcgttacagtcaagcaattgaagcgcttcccccagataaatatggccaaaatgagagttttgctagaattcaagtgagatttgctgaattaaaagctattcaagagccagatgatgcacgtgactactttcaaatggccagagcaaactgcaagaaatttgcttttgttcatatatcttttgcacaatttgaactgtcacaaggtaatgtcaaaaaaagtaaacaacttcttcaaaaagctgtagaacgtggagcagtaccactagaaatgctggaaattgccctgcggaatttaaacctccaaaaaaagcagctgctttcagaggaggaaaagaagaatttatcagcatctacggtattaactgcccaagaatcattttccggttcacttgggcatttacagaataggaacaacagttgtgattccagaggacagactactaaagccaggtttttatatggagagaacatgccaccacaagatgcagaaataggttaccggaattcattgagacaaactaacaaaactaaacagtcatgcccatttggaagagtcccagttaaccttctaaatagcccagattgtgatgtgaagacagatgattcagttgtaccttgttttatgaaaagacaaacctctagatcagaatgccgagatttggttgtgcctggatctaaaccaagtggaaatgattcctgtgaattaagaaatttaaagtctgttcaaaatagtcatttcaaggaacctctggtgtcagatgaaaagagttctgaacttattattactgattcaataaccctgaagaataaaacggaatcaagtcttctagctaaattagaagaaactaaagagtatcaagaaccagaggttccagagagtaaccagaaacagtggcaagctaagagaaagtcagagtgtattaaccagaatcctgctgcatcttcaaatcactggcagattccggagttagcccgaaaagttaatacagagcagaaacataccacttttgagcaacctgtcttttcagtttcaaaacagtcaccaccaatatcaacatctaaatggtttgacccaaaatctatttgtaagacaccaagcagcaataccttggatgattacatgagctgttttagaactccagttgtaaagaatgactttccacctgcttgtcagttgtcaacaccttatggccaacctgcctgtttccagcagcaacagcatcaaatacttgccactccacttcaaaatttacaggttttagcatcttcttcagcaaatgaatgcatttcggttaaaggaagaatttattccatattaaagcagataggaagtggaggttcaagcaaggtatttcaggtgttaaatgaaaagaaacagatatatgctataaaatatgtgaacttagaagaagcagataaccaaactcttgatagttaccggaacgaaatagcttatttgaataaactacaacaacacagtgataagatcatccgactttatgattatgaaatcacggaccagtacatctacatggtaatggagtgtggaaatattgatcttaatagttggcttaaaaagaaaaaatccattgatccatgggaacgcaagagttactggaaaaatatgttagaggcagttcacacaatccatcaacatggcattgttcacagtgatcttaaaccagctaactttctgatagttgatggaatgctaaagctaattgattttgggattgcaaaccaaatgcaaccagatacaacaagtgttgttaaagattctcaggttggcacagttaattatatgccaccagaagcaatcaaagatatgtcttcctccagagagaatgggaaatctaagtcaaagataagccccaaaagtgatgtttggtccttaggatgtattttgtactatatgacttacgggaaaacaccatttcagcagataattaatcagatttctaaattacatgccataattgatcctaatcatgaaattgaatttcccgatattccagagaaagatcttcaagatgtgttaaagtgttgtttaaaaagggacccaaaacagaggatatccattcctgagctcctggctcatccatatgttcaaattcaaactcatccagttaaccaaatggccaagggaaccactgaagaaatgaaatatgttctgggccaacttgttggtctgaattctcctaactccattttgaaagctgctaaaactttatatgaacactatagtggtggtgaaagtcataattcttcatcctccaagacttttgaaaaaaaaaggggaaaaaaatgatttgcagttattcgtaatgtcagataggaggtataaaatatattggactgttatactcttgaatccctgtggaaatctacatttgaagacaacatcactctgaagtgttatcagcaaaaaaaattcagtgagattatctttaaaagaaaactgtaaaaatagcaaccacttatggcactgtatatattgtagacttgttttctctgttttatgctcttgtgtaatctacttgacatcattttactcttggaatagtgggtggatagcaagtatattctaaaaaactttgtaaataaagttttgtggctaaaatga

SEQ ID NO: 2066 - DNA, 468 bp, Homo Sapiens
agggagtgctcgtcttttgctttcggtggggggatgggaaggctgggaagcaaaggtgagcaaaggagaaggttttttaaaaattatcttggaggggtcgtttagcaaagagaagaaggggaagacaaaaatccaaaaactgggtacggcagaataaaacgggaccaggttgtaaaaaggggcgacgactctgcaattctgcgagccaggctcctctgcaccggggtcctcagccgctcggaggcggagtccctcctcgggtcacctgggtagcgaagagcagagaggaggaggaggcggcggcgtacgacctgctcggtcagattgcgttgctcgctctgtctcgctctccctccgtctctctctcttcttctctctctctctccctctctcagtatttttttttttttttttacagggaacactgagctgcctggcgccgtcttgatactttcaaaagacgagcac

SEQ ID NO: 2067 - DNA, 1411 bp, Homo Sapiens
cgggaaacggcaaacagcgagatatccgagcgagagtcccgccctgcatcagtttgcggaaccgccttggtagaaggagagaaggggagtggaggaagcacgggactggagggaccaaagttccccgatggcggcccaggggtgcgcggcatcgcggctgctccagctgctgctgcagcttctgcttctactgttgctgctggcggcgggcggggcgcgcgcgcggtggcgcgcggagggcaccagcgcacacttgcgggacatcttcctgggccgctgcgccgagtaccgcgcactgctgagtcccgagcagcggaacaagaactgcacagccatctgggaagcctttaaagtggcgctggacaaggatccctgctccgtgctgccctcagactatgacctttttattaacttgtccaggcactctattcccagagataagtccctgttctgggaaaatagccacctccttgttaacagctttgcagacaacacccgtcgttttatgcccctgagcgatgttctgtatggcagggttgcagatttcttgagctggtgtcgacagaaaaatgactctggactcgattaccaatcctgccctacatcagaagactgtgaaaataatcctgtggattccttttggaaaagggcatccatccagtattccaaggatagttctggggtgatccacgtcatgctgaatggttcagagccaacaggagcctatcccatcaaaggtttttttgcagattatgaaattccaaacctccagaaggaaaaaattacacgaatcgagatctgggttatgcatgaaattgggggacccaatgtggaatcctgcggggaaggcagcatgaaagtcctggaaaagaggctgaaggacatggggttccagtacagctgtattaatgattaccgaccagtgaagctcttacagtgcgtggaccacagcacccatcctgactgtgccttaaagtcggcagcagccgctactcaaagaaaagccccaagtctttatacagaacaaagggcgggtcttatcattcccctctttctggtgctggcttcccggactcaactgtaactggaaactgtgttgctctaaccctcctccagccctgcagcctccccttgcagtcatcattcgtgttctgtgtataccaaatgattctgttatctaaagaagctttttgctgggaaaacgatgtcctgaaaatggtatttcaatgaggcatatgttcaggatttcagaaacaagaagttagttctatttagcaggttaaaaaatgctgcattagaattaaagcaagttattttcttatttgtataatgacacaaagcattgggagtcagactgcttgtatattatcaaacattttaagagaattctaataaagctgtattttacatc

SEQ ID NO: 2068 - DNA, 1314 bp, Homo Sapiens
gagctccgggtacctggagaacatgaatctcccgggtgtactgtccccatgagggtcaccgaggaacctatggatcttccactcttcgcccagaatgtcttccctctatcccctccacctccccaaattccagcaccaggggccacctcagagccacaaatcctgaaaggaccacccaggtgactcgggcccacacacccctctttcggggtacacttggtggcaggctaggagcttttggcctcagctggtggtgccacacaccagattcgtcacagagacccattttttatcagtcccaggccagaagtacgaagactgatcttaacgatgtggcctgcctgggaggtaaggcggcaggcgttgcagaattgatgggaactgtggcacaggtgggaaacctggtttaacaaattcttcattgattcaggggaccactttccttgagccaagtcttggcaagcggccggcgaaactcacaggtccctttcctggctgcgtccccagcctccagccttccccgccccagagatgccccaggagcggcccctcggtgtaggtaacgggtgcccgggcggctccgtccgccgcctagagcctggaagccgccactgcggcccaggacaatccggctacgcggccggcgccgaccccgcacgctggagtccgctgccgcacggcgctggcagtcgggggtggtgtctgaagtcaggcgcttcctgccttttcgtcggcccgggtgcccggctcgcgccgccaggctctgggatcccaggtcgccccgcccagcagcccgcgccctgctcggtgcgctcagcgtccccgccccttaccccaaacccccaccctctgtgccctcaggggggcacccccatcggggcgggaggggggggtcagctgtgccccggtcgccgagtggcgaggaggtgacggtagccgccttcctatttccgcccggcgggcagcgctgcggggcgagtgccagcagagaggcgctcggtcctccctccgccctcccgcgccgggggcaggccctgcctagtctgcgtctttttcccccgcaccgcggcgccgctccgccactcgggcaccgcaggtagggcaggaggctggagagcctgctgcccgcccgcccgtaaaatggtcccctcggctggacagctcgccctgttcgctctgggtattgtgttggctgcgtgccaggccttggagaacagcacgtccccgctgagtgcagacccgcccgtggctgcagcagtggtgtcccattttaatgactgcccagattcccacactcagttctgcttccatgga

SEQ ID NO: 2069 - DNA, 1502 bp, Homo Sapiens
cctgcgtccccgccccgcgcagccgccgcgctcctgcgctccgaggtccgaggttcccgagatgaaggtctggctgctgcttggtcttctgctggtgcacgaagcgctggaggatgttactggccaacaccttcccaagaacaagcgtccaaaagaaccaggagagaatagaatcaaacctaccaacaagaaggtgaagcccaaaattcctaaaatgaaggacagggactcagccaattcagcaccaaagacgcagtctatcatgatgcaagtgctggataaaggtcgcttccagaaacccgccgctaccctgagtctgctggcggggcaaactgtagagcttcgatgtaaagggagtagaattgggtggagctaccctgcgtatctggacacctttaaggattctcgcctcagcgtcaagcagaatgagcgctacggccagttgactctggtcaactccacctcggcagacacaggtgaattcagctgctgggtgcagctctgcagcggctacatctgcaggaaggacgaggccaaaacgggctccacctacatcttttttacagagaaaggagaactctttgtaccttctcccagctacttcgatgttgtctacttgaacccggacagacaggctgtggttccttgtcgggtgaccgtgctgtcggccaaagtcacgctccacagggaattcccagccaaggagatcccagccaatggaacggacattgtttatgacatgaagcggggctttgtgtatctgcaacctcattccgagcaccagggtgtggtttactgcagggcggaggccgggggcagatctcagatctccgtcaagtaccagctgctctacgtggcggttcccagtggccctccctcaacaaccatcttggcttcttcaaacaaagtgaaaagtggggacgacatcagtgtgctctgcactgtcctgggggagcccgatgtggaggtggagttcacctggatcttcccagggcagaaggatgaaaggcctgtgacgatccaagacacttggaggttgatccacagaggactgggacacaccacgagaatctcccagagtgtcattacagtggaagacttcgagacgattgatgcaggatattacatttgcactgctcagaatcttcaaggacagaccacagtagctaccactgttgagttttcctgacttggaaaaggaaatgtaatgaacttatggaaagcccatttgtgtacacagtcagctttggggttccttttattagtgctttgccagaggctgatgtcaagcaccacaccccaaccccagcgtctcgtgagtccgacccagacatccaaactaaaaggaagtcatccagtctattcacagaagtgttaacttttctaacagaaagcatgattttgattgcttacctacatacgtgttcctagtttttatacatgtgtaaacaattttatataatcaatcatttctattaaatgagcacgtttttgtaaaaaat

SEQ ID NO: 2070 - DNA, 703 bp, Homo Sapiens
tgacactaaggaagacagggcatctacccaagtcaacagttcagtgacatctgttatttgaaccacacaccaatgcaaccgaagtaaatgctgaaagggtgagaagaaggaatagattactatgcatttttgagaggatgaagaaggcttcttggagaaggtttctgaaaagagatacggaattaagagaaatagaaaagagcactgacgaagcactcaggatggctattcaaggaattggggatccacagcagctgtgcacaaccatccctaatgccagaaaaatggggtaagggtgaagggaactgggtctagagctttgcatgttttttctggttaacccttagagtcaccctgaaggtgtggatcccatcttataataaggtgaggacactgagtcaggaaactaacttgctaaaatcaagtcctcccagtcctcccatcaggtccttccagatctggaggagccaggatttgaactcacatttgtctgacttcaaaatccatgctttttcttgtgttccaaattgcacaatggagtcactgccagttcaagctcctatgacaagggatggctgtgacaagtcatttgttgattccacagatttttagtaggtaccatgtctcctgcctttatcactatcctactcctcggctaaacttctctgctacggcccccatgcagttcttgattgggttaatg

SEQ ID NO: 2071 - DNA, 2532 bp, Homo Sapiens
agtgcactcaagcagagaagaaatccacaaagactcaccagtctgctggtgggcagagaagacagaaacgacatgagcacagcaggaaaagtaatcaaatgcaaagcagctgtgctatgggaggtaaagaaacccttttccattgaggatgtggaggttgcacctcctaaggcttatgaagttcgcattaagatggtggctgtaggaatctgtcgcacagatgaccacgtggttagtggcaacctggtgaccccccttcctgtgattttaggccatgaggcagccggcatcgtggagagtgttggagaaggggtgactacagtcaaaccaggtgataaagtcatcccgctctttactcctcagtgtggaaaatgcagagtttgtaaaaacccggagagcaactactgcttgaaaaatgatctaggcaatcctcgggggaccctgcaggatggcaccaggaggttcacctgcagggggaagcccattcaccacttccttggcaccagcaccttctcccagtacacggtggtggatgagaatgcagtggccaaaattgatgcagcctcgcccctggagaaagtctgcctcattggctgtggattctcgactggttatgggtctgcagttaacgttgccaaggtcaccccaggctctacctgtgctgtgtttggcctgggaggggtcggcctatctgctgttatgggctgtaaagcagctggagcagccagaatcattgcggtggacatcaacaaggacaaatttgcaaaggccaaagagttgggtgccactgaatgcatcaaccctcaagactacaagaaacccatccaggaagtgctaaaggaaatgactgatggaggtgtggatttttcgtttgaagtcatcggtcggcttgacaccatgatggcttccctgttatgttgtcatgaggcatgtggcacaagcgtcatcgtaggggtacctcctgcttcccagaacctctcaataaaccctatgctgctactgactggacgcacctggaagggggctgtttatggtggctttaagagtaaagaaggtatcccaaaacttgtggctgattttatggctaagaagttttcactggatgcgttaataacccatgttttaccttttgaaaaaataaatgaaggatttgacctgcttcactctgggaaaagtatccgtaccgtcctgacgttttgaggcaatagagatgccttcccctgtagcagtcttcagcctcctctaccctacgagatctggagcaacagctaggaaatatcattaattcagctcttcagagatgttatcaataaattacacatgggggctttccaaagaaatggaaattgatgggaaattatttttcaggaaaatttaaaattcaagtcagaagtaaataaagtgttgaacatcagctggggaattgaagccaacaaaccttccttcttaaccattctactgtgtcacctttgccattgaggaaaaatattcctgtgacttcttgcatttttggtatcttcataatctttagtcatcgaatcccagtggaggggacccttttacttgccctgaacatacacatgctgggccattgtgattgaagtcttctaactctgtctcagttttcactgtcgacattttcctttttctaataaaaatgtaccaaatccctggggtaaaagctagggtaaggtaaaggatagactcacatttacaagtagtgaaggtccaagagttctaaatacaggaaatttcttaggaactcaaataaaatgcccacattttactacagtaaatggcagtgtttttatgacttttatactatttctttatggtcgatatacaattgattttttaaaataatagcagatttcttgcttcatatgacaaagcctcaattactaattgtaaaaactgaactattcccagaatcatgttcaaaaaatctgtaattttgctgatgaaagtgcttcattgactaaacagtattagtttgtggctataaatgattatttaggatgatgactgaaaatgtgtataagtaattaaaagtaatatggtggctttaagtgtagagatgggatggcaaatgctgtgaatgcagaatgtaaaattggtaactaagaaatggcacaaacaccttaagcaatatattttcctagtagatatatatatacacatacatatatacacatatacaaatgtatatttttgcaaaattgttttcaatctagaacttttctattaactaccatgtcttaaaatcaagtctataatcctagcattagtttaatattttgaatatgtaaagacctgtgttaatgctttgttaatgcttttcccactctcatttgttaatgctttcccactctcaggggaaggatttgcattttgagctttatctctaaatgtgacatgcaaagattattcctggtaaaggaggtagctgtctccaaaaatgctattgttgcaatatctacattctatttcatattatgaaagaccttagacataaagtaaaatagtttatca

SEQ ID NO: 2072 - DNA, 498 bp, Homo Sapiens
agaatgaaactgcaaatttattagaaagtataaaaaaaaaaaaaaaaaaccaagcctaaccaaaacacaaaaagcaacgacacacaacctttccagtttacattaactttgagcgtcacacactattaaccacttagttgcattttttaaaaatgtcaatttcaaggtagagggagctgagtcaggtaataggccagtcatcacagtgtaactaatttaatgctaaaataaaacacggatctcatttgagaaaaaaagagatgagactattttctggttggcgtagatttaggcaatgtataaaaaagcttcctggttggaatgagttaaaaaatattgctggccactaatgtgccatcttgagttggaaaaaaaaccccctccccccaaaaaaaaccctgccgctttggtgtcctatttatatatttttaaaaacattcattaaaaaaatcaaatctataataaaaatgtccctgtttgttttaaaaaagcattagt

SEQ ID NO: 2073 - DNA, 884 bp, Homo Sapiens
aactaggctaggtcgaggcctggtgtttaatcggccgaggcgaggcggctctggtgcgatcaggcgcacaaggctgggagagcgccccggggccctgctatccgcgccggaggttggaagagggtgggttgccgccgccgagggcgagagcgccagaggagcgggaagaaggagcgctcgcccgcccgcctgcctcctcgctgcctccccggcgttggctctctggactcctaggcttgctggctgctcctcccacccgcgcccgcctcctcactcgccttttcgttcgccggggctgctttccaagccctgcggtgcgcccgggcgagtgcggggcgaggggcccggggccagcaccgagcagggggcgggggtccgggcagagcgcggcggcggggaggggccatgtctggcgcgggcgcagcggggccgtctgcagcaagtgaccgagcggctgcggacggccgcctgccccctctgccacctgggggcggtgcgggcccggagcccggagcccgggtagcgcgtagagccggcgcgatgcacgtgcgctcactgcgagctgcggcgccgcacagcttcgtggcgctctgggcacccctgttcctgctgcgctccgcctggcgacttcagcctggacaacgaggtgcactcgagcttcaatccacgcggcgcctccgcaagccaggagcgggcgggagatgcagcggagatcctctccatatgttgggtcttgcccccaacgccgcgcccgacctccagggcaagcacaactcggacccatgttcatgctggacctgtacaaacgccactggcgggtggatgagggccgggggccggcggcagggggtttcctcctaaccctaaaaggcggttccaggacc

SEQ ID NO: 2074 - DNA, 714 bp, Homo Sapiens
aaacttacggctaggtacgaggccgggtgttaatcggccgaggcttgagccggttccctgtgttgtgtgtgcgctcgccctctgctccgtcctgcggctgcccatcgtgccctcctacgtgtccaccatggccctgctgcactccggccgcgtcctccctcgggatcgccgcgcgacttccacctcgggcctcgccgccgcggtgctcttgctcagagtcgctagacttccttggttggatcccatggtggagaatgggacctccagtatcccaattctgggagtcactgaacgcctttaagagggacaccaagtagctaagagaagatgaatctggtagttggtgcctaccgggtatgataacgcgaaagccttatcgctgctagccgtatgcgtctcgacaacgggcagaggcccagatttgccgcaaaaacatttgtgacaaggaatacctgcccattgggggactggctgaattttgcaaggcatctgcagaactagccctgggtgagaacagcgaagtcttgaagagtggccggtttgtcactgtgcagaccatttctggaactggagccttaacggatcggagccagtttactgcaaagattttgtaagttcagccgagatgtctttctgcccaaagcaacctggggaaaccacagacccatcttcagggcatgctggcatgcagctacaaggtatcggtattatgaa

SEQ ID NO: 2075 - DNA, 864 bp, Homo Sapiens
gacttgactgagagatagtatgcttctttctattggtcacattcacagccaacatttcctctgtgccaggtcataaagacagtggtcaccttcgtgaataatttccttggagcaaagctgctctcagccttgaccaagagcagcctttccaggagctggtctatacccatgatctctcttctctgggcacacagaaagtgaatggtcagactcatctcttgaatggcaagccacgtgtttattacatttcttgtgcacctagacccactttattaaaaagcgaaatgacaatcagaaaggttaagtgacttagccaaggtcacacaacttggaagcagcagatcaggacgaaaaatccaggtctgctaggtaggccagtcttctgtccaagggtgtcctagcgaccaggtcatctcagccatgtggggttgccagatgtttctgcatgtggataaagatagataggccaagggctatgacgggggcagacataagctagaaattcccagaactttggtcctagaagggcccttcacgaatcatccaggctggttgtggctgcctcacgtctgtaactcccagtcactttgggagcccgaggcggctggatcaccacgaggtcaggagtccaagaccagcttgcgccaacatggcgaaactccatactctaatacaaacctcagagacacatatccaggagtaatggtgcacactgttcgtcccagagtacttggcgaacgctgcacgactgagaatcagttgaacgctaggtggcgccggttgcggtgagccaagatcgcgactcctgcgctaccacctgggtgacatgccagaatccagcccattcacacaacaattccccct

SEQ ID NO: 2076 - DNA, 5493 bp, Homo Sapiens
atggcagaaggtgtgaatgagccttgtttcccgggggactgtggcatatttgtcactaaagtggacaaaggaagcattgctgatggccgcttaagggtcaatgactggctgctgagaatcaacgatgtggacctcatcaacaaggacaagaagcaggccatcaaggcgctcctcaatggggagggggccatcaacatggtcgtgcggcggaggaagtccctgggtgggaaggtggtcacgccgctgcacatcaacctcagtggacagaaagacagtggcatcagtctggagaatggagtgtatgctgccgctgtgctgcctggaagccctgccgctaaagaagggtcccttgctgtgggagacaggatcgttgcgatcaatggcattgcactggacaacaagtctctgaatgaatgtgaatctctgctgcggagctgccaggactccctgaccctgtccctcctgaaggtattccctcagagctcctcgtggagtggccagaacatttttgaaaatatcaaagactctgataagatgctgagttttcgagcccatggcccggaggtccaggctcataacaaacggaacttgatacagcacaataactccacgcagacagacatcttctacacggacaggctggaagacaggaaggagccaggccccccaggaggcagcagctcctttctgcataagccattccctgggggacccttgcaggtctgcccccaggcctgtcccagtgcctctgagcgtagcctgagctccttccgctcagatgcctctggggaccgtggctttgggctggtggacgtgcgtggccggcggccactgctgccctttgagaccgaggtgggcccctgtggggttggggaggcctccctggacaaggcagactctgaaggctccaacagcggcgggacctggcccaaggccatgctcagctccacggcagtgcctgagaagctctctgtttataaaaagccaaagcaaagaaagtccatctttgaccctaacactttcaaacgcccccagacaccccccaaaatagactacctgcttccaggtcctgggcctgctcactctccccagccctccaagagggcggggcctctgacacccccaaaacctcccagaaggagcgactccattaagttccagcacaggctggagactagctccgagtcagaagccactctggtgggcagctccccatccactagtcccccgagcgccctgccccctgacgtggaccccggggagcccatgcacgcatcaccccctcgcaaggccagggtccgcattgcttccagctactaccctgaaggagatggggactcctcccacctgccggccaagaaatcctgtgatgaggacctcacctcccagaaggtggatgagctggggcagaagcgtcgccggccaaaatctgctcccagttttcggccgaagcttgctccagtagtgattcctgctcagttcctggaggaacagaagtgtgtcccggccagtggagaactctccccggagctccaggagtgggcaccttactcgcctgggcattccagccggcacagcaaccccccgctataccctagcaggccgtctgtgggtactgttccccggagtttgacccccagcaccactgtgagctccatcctgcggaaccccatctacactgtgcgcagtcacagggtcggcccctgcagctctccacctgcggcccgagatgctggcccccagggtttgcatcccagtgtccagcaccagggacgcctgagcctggacctgagccacaggacctgcagcgactactccgagatgagagccacccatgggtccaactcactgccctccagcgcccgcctgggttcttcgagtaacttgcagttcaaggcggaacgcattaaaatcccatcaacaccaagatatccgcggagtgtcgtgggctccgagagaggttcagtgtcacattctgaatgcagcactcctccacagtcacccctgaacatcgacaccctgtcctcttgtagccagtcccagacctcagcctccacattgcccagaatcgctgtcaaccccgcgtccctcggggagcggagaaaggacaggccttatgtggaggagccacgccacgtgaaggtgcagaagggctcagagccgctgggcatctccatcgtgagtggagagaagggcggcatctacgtctccaaggtgaccgtggggagcatcgctcaccaggctggcctcgagtatggggatcagttactggagttcaacggcataaacctgcggagcgccacggagcagcaggcgcggctcatcatcgggcagcagtgtgataccatcaccatcctggcccagtacaacccccacgtgcaccagctcagcagccactcccggtccagctcacacctggaccctgccggtacccactccactctccagggcagtggcaccaccaccccggagcatccatctgtcatcgacccactgatggagcaggacgaggggcctagcacccccccagccaagcagagcagctccaggattgcgggagatgccaacaagaagaccctggagccacgcgttgtcttcatcaaaaagtcccagctggagcttggggtgcacttgtgtggtgggaacctgcatggggtgtttgtggccgaggtggaggatgacagtcctgccaagggtcctgacggcctcgtgccaggggacctcatcctggagtatggcagcctggacgtgcggaacaagacagtggaggaagtctatgtggagatgctgaagcccagggatggcgtccgcctgaaggtgcagtaccgccctgaggagttcacgaaggccaagggcctgcctggtgacagcttctacatcagggccctgtacgaccggctggcagatgtggagcaagagttgagctttaagaaggacgacatcctctacgtggatgacaccttaccccagggcacgttcgggtcctggatggcttggcagctggacgagaatgcccagaagatccagcgcgggcagattcccagcaaatatgtgatggaccaagaattctccaggaggctcagcatgtctgaagtcaaagatgacaatagcgccacaaagacgctgtcagcggctgcacgccggtccttttttcggaggaaacacaagcacaaacgcagcgggtccaaggacgggaaagacctgctcgccttggatgccttttccagtgactccattccactctttgaagattcggtgagcctggcctatcagcgggtccagaaggtggactgcaccgctctgaggcctgtcctgattctggggcctttgctggacgtggtgaaggagatgctggtgaatgaggctcctggcaagttctgcagatgtccccttgaggtgatgaaggcctcccagcaggccattgagcggggtgtcaaagattgcctgtttgtcgactataagcggagaagcggccatttcgatgtgaccactgtggcgtcaataaaggagatcacagaaaagaaccgacactgcctcctggacattgctccgcacgctattgagcggctccaccacatgcacatctaccccattgtcatcttcatccactacaagagcgccaagcacatcaaggagcagagagaccccatctacctgagggacaaggtgactcagaggcattccaaagagcagtttgaggcggcgcagaagcttgagcaggagtacagcaggtacttcacaggggtcatccagggaggagccctgtcaagcatttgcactcagatcttggcaatggtcaatcaagaacaaaataaagtcctgtggattccagcctgcccgctctaggagaatgctgtgctgtggatgactgcagctggccgcctgaggggacgccagactcagctcttttctagcgactgaaagtagaagtctgtctgtctatgaacatgcgggggaaggatccggaaccaggacccagaagcacctcctttgtagacagagggccacggctgcgtgcgatccaggcccaggcccacacactctgcccgtgtcacacgtgtgctttaacacaaaacagataacactaaagacgggttcagcacccacctttctttagccagctgatcagagatgctgcaaagagaacctttcggatcactcgtttacaagccttttctaagtatttggtggtttatgtttacttgaacggctccatgttgccggtgcccagcccctgtcccctctgtcaaccccctgtcgctttggtgttggtttcgttcccgtcttcagcaaaacgaccttggaacctcaatgggggctgctttgctttgggaggttcttgttggtgggaccagagctttgacaaacctcctgctccttggtggcacctctcctggaaggacatcacaactccaggtgctcagactgcctgtggcagcagaaccagtgcctttggcattttcctcccacaatggggaaggtgactttggcattcttacaaactcgtctctcggcctttctctcctgccttccacagcctctcgtttctcctccatctgtgcttattacttgaggactgtgtctgctccgtgagagctgcgtgggcagggctgcagtggggtccaggtggtgttcagctgtgctgatgcctgccattgggtcctccttaggctctgtaagtcgtgacagccttcatcagtgcaatgtttgcagggtaattcttaaactttttagagggtggcaggtacatcagttctttttgatatgaaaacattcatgtttcagacattgaattgagagcttttaggggaagcataatggttattgtcactatcaacagtctaaaaagaaaaactgaggtctttttaatcttgattacagcactcacggcatgcaccctactcagtgtgggtgtcttcgtttgggggctttttttttttttgcacttctgaggctagatatgtctggctgaagatttgatgtggttcctccttaagctatgcgtcctgttaataataggtactgtactgggctctgtgtaagtgtcgttggggtaggacctatattttaatactgttcctaacatttcattttactagcgagaaatctttgatttcattttattctttgtaattctagacactagattgtagtttagccataactgatgttttttaaaaagggatatattttcttgcacagttgttcaaaaaagagacaagtttcagtcctcaatgctgtcctttgttttacaggtacaagttttctagctcagacaaactatgaaaaactgtagactattctcaaggtattaactcgcagaccctctgggggtaggggctgttttctaagttacaggcagagtgggactgagatggtacagtgtgcacagacaggtactgagctgacagactgggattttctgtactaaaatgttactttgtatcaaaagttaaacaggctttagtacaacaaataaaggtcaatttctgt

SEQ ID NO: 2077 - DNA, 243 bp, Homo Sapiens
ggcgtgggtggtggctgggaactgtggcccaggcttagcggccgcccggaggctttttttcccggagactgaggtgggcggctcagcgttggccccacacattcgaggctcacaggtgattgtcgctcacacagttagggtcgtcagttggtctgaaactgcatttggcccactcctccatcctccctgtccgtcgtagctgccacccccagaggcggcgcttcttcccgtgttcaggcggct

SEQ ID NO: 2078 - DNA, 8811 bp, Homo Sapiens
  misc_feature (1452)..(1452): n is a, c, g, or t
  misc_feature (1788)..(1788): n is a, c, g, or t
  misc_feature (3357)..(3357): n is a, c, g, or t
  misc_feature (3474)..(3474): n is a, c, g, or t
  misc_feature (3870)..(3870): n is a, c, g, or t
  misc_feature (3897)..(3897): n is a, c, g, or t
  misc_feature (4441)..(4441): n is a, c, g, or t
  misc_feature (5139)..(5139): n is a, c, g, or t
  misc_feature (5883)..(5883): n is a, c, g, or t
  misc_feature (6326)..(6326): n is a, c, g, or t
  misc_feature (8187)..(8187): n is a, c, g, or t
  misc_feature (8211)..(8211): n is a, c, g, or t
  misc_feature (8249)..(8249): n is a, c, g, or t
  misc_feature (8575)..(8575): n is a, c, g, or t
  misc_feature (8635)..(8635): n is a, c, g, or t
ggtacccctgatctcacaaggccctgaagcaggcctggggcatggtcttctgccagccatccctgatacctgcttcttttcctgtgtctctcagggccaggcagagaagagtgcattcactgtgcgaaaaacttccacttccacgactggaagtgtgtgccagcctgtggtgagggcttctacccagaagagatgccgggcttgccccacaaagtgtgtcgaaggtacggtcctcctggcggggaacggcaagcaactgtgtccagcaaaggagtgcctggagggcagagtctggcagcatcttccccaggggccggggagggcatgttgcatcaccccactgtggacaggagcccatttacagagctgctgaggggccttcgtccctttgttcactggatgcatatttgttgggtccctgctgtgggcagacaccgtgcagcagcgggataagatgggaagcagaatagcaaggtgctcacaccccattggtggactacgcgggacgtccctgcccatgtcgcgctcagcatgcatcctttgcactgtcgataatcagagaaaccatgttttgggttaaaaaaaattttttttggagacacactctcactctgtcgcccaggctggagtgcactggtgtgacctcagctcactgcaacctctgcctctgggattcaaacaactctcatgcctcagcctcccgagtagctgggactacaggcgtgcaccacaatgcccagctaatttttgttttttgttttcggtttttttgagatggagtctcgcttgtcgcccaggctggagcgcagtgggcgatctcggctcattgcaagctccacctcccagattcacaccattctcctgcctcaacctgccgagtagctgggactacaggcacccgccaccactccccactaattgtttgtatttttaatagagaccggtttcaccacgttggccaggctggtctcgaactcctggcctcaagtgatccacccacctcagcctcccaaagtgctgggattacgggtgtgagccaccacacctggcctaaaatattttttttagttagatactttagagaaattaaaaagatcctgacaatttcctcattctaaagctgttctctgcacagtccacgtacatctattttcaccctccatatcctcctcttgtgcttcctcccatgtgtccctccacagagtcaccattcttatttgatggccctggacccttctgttgttggacatgagctgttaaaggaggagctgtttgctctggtctcctcttttctggctgaatattgccctatgttgggagatcatgaactcaggacccagaacagggcagggcaacctgtcttattcagggtgggagcaacattgaggagtttgaagggacctgtgagggtgtgacgatggggtgagctgtgaggggtgacgatggggtganctgtgaggggtgatgatggggtggcctgtgaggggtgacgatggggtgggctgtgaggggtgatgatggggtgggctgtgaggggtgacgatggggtgggctgtgagggtgtgacgatggggtgggctgtgaggggtgatgatggggtgggctgtgagggtgtgatgatggggtgagctgtgagggtgtgatgatgcggtgggctgtgagggaagtaccaggcgttagcctgctttcacagtgctaaaaagaaatacctgaggttgggtgatttataaagaaaagaggttgaattggctcacagttctgtaggcttcataggaaacatggcgccanattctgcccagcgtcttcactcctgatggaaggtgaagcaagggcagcacatcacatggcaatagcaggagcaagagagggaaggaggccgggcacggtggctcacgcctgtaatcccagcactttgggagccaaggtgggtggatcacctgagccaggagttcaagaccagcctggccaacatggcaaaaccccttctctactaaaaaaaaaaaaaaaaaaaaatgcaaaaattagttggacgtggatagtgtgtgcctgtaatcccagtctacaggaggctgaggcaggagaatcgcttgaaccaaggaggcagaggttgcagtgagctatgatcgcgccatgcactccagcatgagcgacagagcaagactccatctcaaaagaaaaaaaaaagtcaggagttgccacacacctttaaacaagcagctctcacatgaactcactcatcaccaaggggatggtgtgaggccatttatgagggatcaccccatgatccaaacacctcccaccaggccccacctccaacactggggatcacatctcatcatgacacttggaggggacaaatgttcaaaccatatcggggggcttccgtctgaaaaagactgaaaatgagggagccctcaaaggcttgtgtcagagcaggggaggggtgcccatggctggctgccagctgggtaccatagatggttgcagaaccagaagcatcttaaaagccaccctgcccaaagctggtgctgcccacgaggacccgctgctgggcacggtaatcctgacggaaagcaggagctacacagggtctcccagggagagccgtttgcactggcctaacggggacgggagcatcacccatctccctgagcagcatggtgatggattatttccccagacctccagaggagagcccagcctggccaccaccttgccctgaacctcgtgagaccctaggtggagagcccagctgcacctgcctggacttctgcctgcatagcggggagccgctgagtgggtgttattttcagctgctgagtgtgtggcaacctggttagagcaatggaaaaccgaggcccctgccatcctgctgagctgggtgaggttgtatttgaagaagcaagcaagccgtaacctcctggctgtccaccgcagcgggctcctcaccacagttcttcactgatgaagcagccctcagccgtggcctgggggcactgggcccctgggtcctccagaccactgacatctctttaaatgactcagctcggccctggttctcgtctcaccagtggcattgtctgtaagagaaaccagagggtctgtggggaaagtaataacctgtactggggcataagggtttggtggctgggccacagaaatgtgcaagggcaggtgtggggagggggcagcatgatgggggcagacccctctggcaagtcctctaaccccatcctttcctctggggcggcctggatgggaatattagaaaggctcgtgggtgtgagtttgcctgtggggtttacacatttacaattacagaccaagggcttgagctctaggctcagcatcctcagncacactaggaataaaacccacctcccacccaggctgaagcgatgctgcacctggggctccagagcagcggagtccgtggtgagaccagaccccatcagagggctgctctgcaaagancccacgaggaggcctggtgtctgagcatgggaaggcttcacacagcagggaggggacatctgtataaagcaaagaactgccccccagggaggcccaggcatgagcacaacaaagctccaagccctgcctatggggcctgttccacccttaactggcaacaatggggaggtgggcagctgatgcaagcactgtggagaccgagtcaccgggctctggactcaggacaggcagcagcatagccggggtgcactcacggccccaggatgggaaacgtgctccttcaagacactcagcccgcatcggcaagtgctttctgtagagggcacaatggtcagtcgttcaggcttttggggccacactgcctctgtcacagctactcagctcagccactgctanacaaaagattgtcaatgaatgagtgtnactgtggtccaggataaatgctggatgtggcccttgggctgtagtgcaccaaccgtcccctgaggtcacgtttaccctgcattagaaatagccctggctggttgtccatctctgcgcaggctgggccaggaccgtccgagaggggcaggaattgtggggcatctctcccactccccgagggtaagcaggcatggccacatataggtgacagcagccttctggtcagctcgagtcaggtgtgtcacatccctgggtggagtctggcctggaccccaagcctacagccatcgcagcccggcagccgctggagagagaagactgacacagctctgggagccgtgtggtggggtgggggctgggtgccagggcccaggagggtgtccaggtgagctgcgggaagccttggaggcctggcccctgatcctgggcttgctcctgccaactggccatggctgtctctgccctcccagggcaatagtgaggtcagacaggagaaaagacatgcagacactcagcccctgtgtcagggaatggtgggcgacanagcctctccacagaggaccgaggctgagggggtgggaaggaggtgcagggaggtgagggttctgggaagggagcccggagtggtggagcctcttccccagacttcagcaggaacggtatcttcccacaggtgtgacgagaactgcttgagctgtgcaggctccagcaggaactgtagcaggtgtaagacgggcttcacacagctggggacctcctgcatcaccaaccacacgtgcagcaacggtgagcagcagctgggttaccctggggctgcctgtggaggagctcagctggccagctcgtgctccaaagagaaaagcaaagccacataggcatggcggctccacagacaggcgttcgtgcccctgatccgattgactgtctgggattcctctagctgatatggaagacagctgccctgtctcccagcttccctctaggcctctcacatcgatcagagaggcatcccagccactgctgatctgtttattgagtgactcctaaaaatgattttgtccttgtactggtcccactgccatgccataggccgcggtggcccggatgtgacaacataccataaaagaagcctgacctggggggtcaaagccaggaagcctggagggtctctgctcaggacgagggggacagagcccagagtagagcacacgctcagcagcagcaatcccagctctgcagganagccctgctctgccataggatgggggacaaggacaagttgtaaaaacagaaacttaaaagggcaccaaagctaagtgcccagtttgggaattccaggcaccaaggagggttggcaggactcgggcctggaggtgcagtgcaggagtcattgtagacacacgggcagggaagggggctctggcccagcaagcagcagggtggagccacattctgacagccaggagaggaaggctctctgctccagtgtccagggtcagggcaggtggtccttgggtatgaagctggcactggccctgtccaggcagagcatggagcttgtggagggccctgggatgcctccttgccttgttactggttattatttttggggggtggcgggagggttgtctaattatgtcccttcaaaggcccagaaactacttctttgggaagtcacctgcccaggttatgtatctagcccaaaaaagtgtggttgccactggagggcctcccaggtccacggatgatgcatcctcaaaggcctcttccccttgctgcagcggtgtcctcagcaagtcctgtccacggcggctcccttccccccatccccactcctccctgtccgccccctccaccctggaagcagcttccattccctcctgcctccaggcccgtcctccggcctcccctacagtcttcctcctaagctccactgccagcagttgtccagaaagacaggtgcacatgtgccccacaggcccaggntgggtgttctcctgagatcctcccacaccacccccacatcctgctcatgaatccccttgtcactgagactcagcaagagccccatataccagtgccctcccaccacacagggctcccagagtcaagtgcattgcaggagaggggcttcaagggctgccatcctgctgcccacctctgtctgtgtccctcttgcccagggcaccactgatgcccagcatatgtggaatgattgaaacaatatttatttatgtatttatttatttatttttgagacggagttttgttcttcttgcccaggctggagtgcagtggcatgatctcagctcactgcaacctccgcctcctgggttcaggtggttctcctgctttagcctcccgagtagcttggattacaggtgcccaccaccatgcccagctaatttttatattattagtagagacgnggtttcaccatgttggttagactggtctcaagctcctgacctcaggtgatccacccacctcggcctcccaaagtgctgggattacaggcatgaggcaccgcgcccggccttgaaacaatcttcacaggcaccgaagactgacctttccctcttttgcctttcctgatgcggggccccagctgacgagacattctgcgagatggtgaagtccaaccggctgtgcgaacggaagctcttcattcagttctgctgccgcacgtgcctcctggccgggtaagggtgcctagctgcccacagagggcaggcactcccatccatccatccgtccaccttcctccagactgtcggccagagtctgtttcaggagcggcgccctgcacctgacagctttatctccccaggagcagcatctctgagcacccaagccaggtgggtggtggctcttaaggaggtgttcctaaaatggtgatatcctctcaaatgctgcttgttggctccagtcttccgacaaactaacaggaacaaaatgaattctgggaatccacagctctggctttggagcagcttctgggaccataagtttactgaatcttcaagaccaaagcagaaaagaaaggcgcttggcatcacacatcactcttctccccgtgcttttctgcggctgtgtagtaaatctccccggcccagctggcgaaccctgggccatcctcacatgtgacaaagggccagcagtctacctgctcgttgcctgccactgagcagtctggggacggtttggtcagactataaataagataggtttgagggcataaaatgtatgaccactggggccggagtatctatttctacatagtcagctacttctgaaactgcagcagtggcttagaaagtccaattccaaagccagaccagaagattctatcccccgcagcgctctcctttgagcaagccgagctctccttgttaccgtgttctgtctgtgtcttcaggagtctcatggcctgaacgaccacctcgacctgatgcagagccttctgaggagaggcaacaggaggcattctgtggccagccaaaaggtaccccgatggccaagcaattcctctgaacaaaatgtaaagccagccatgcattgttaatcatccatcacttcccattttatggaattgcttttaaaatacatttggcctctgcccttcagaagactcgtttttaaggtggaaactcctgtgtctgtgtatattacaagcctacatgacacagttggatttattctgccaaacctgtgtaggcattttataagctacatgttctaatttttaccgatgttaattattttgacaaatatttcatatattttcattgaaatgcacagatctgcttgatcaattcccttgaatagggaagtaacatttgccttaaattttttcgacctcgtctttctccatattgtcctgctcccctgtttgacgacagtgcatttgccttgtcacctgtgagctggagagaacccagatgttgtttattgaatctacaactctgaaagagaaatcaatgaagcaagtacaatgttaaccctaaattaataaaagagttaacatcccatggcacaggagcctgtatttctttccacggcacacaaaatgaaacatgagtgctgaccaagtgttaagtggacgttactttaactgtggtttcagatctgtttgatgtcattacgtggaaggtcttcttttgagctttagcaaatgttgatgtaaggaagcaatggaggaaatcccagatcccaaccccagaatgtcactgggcaaagagaccccttcagaccacgttagcctcactgggaggaggttctagagcctcnccagatgtaggggccccttccatntgtcacgggggagctccccagagcccaaactgcctctncaccggttgctgccaagtgtgattgaattaggttacagcttgtcttctatgcagtggctgaaatccctgaacccatggctgatgcactccttgggatgtttaccatggcctctctgtgaagtcagaagcttgtacttgctaggaatcctttggctgcaagtaaaggaacgcaccaactagaaatgacttaggtgaaaacaagagtgggtgaggggcgttgttttgagaatccagagtggattcagaatttcagggaagggtgcagcagagccttgggaaagctggagccggcattaaatgtcacctggaccctctctgtacggcancactgcccttctctccatggcgccttctccagttgatgggacaaatgacaagacctccancatcttccaggtaaaactggtacaaatccaacccctcaggccaactttctgggtctgtttcttggctcttcttttcccagggacaggacttggtcagcctgccttacatgggtactctccctgtgtcatcagctgtggctacaaggacaggcttgtgcagcagaatatggctgcag

SEQ ID NO: 2079 - DNA, 3842 bp, Homo Sapiens
ggggattgaaagtgattggcaaggcttgttggtaggagaggagaagagaagtaaacccatcaaggcatattccacagaaaactatagcctggaatctcaaaagaagaggaagaagtctcggggccagaccagtgcagctaatggtctgagagctgagtctttggatgaccaaatgctctcccgggagtcatcatctcaggcaccttacaagtctgttacaagcctctgtgcaccggagtatgaaaatatacgccattatgaggaaataccagagtacgagaacttgccatttattatggctatacggaaaactcaagagttggaatggcagaattccagcagcatggaggacgctgatgcaaatgtgtatgaggtagaagagccgtatgaagctccagatggccagctgcagcttggacccagacatcagcattccagttcaggagcatcccaggaggaacagaatgatcttggtcttggtgaccttccctctgatgaggaggaaatcatcaacagttctgatgaagatgatgtcagctctgagtcaagtaaaggagagcctgacccactggaagataaacaggatgaagataatggaatgaaaagtaaagttcatcatattgccaaggagatcatgagctcagagaaagtgtttgtggatgtgttaaaacttttgcatattgatttccgggatgcagtagctcatgcttccaggcaacttgggaaaccagtgattgaggaccggattctaaatcagatcctatactacttgcctcagctgtatgagctcaaccgggatctcttgaaggaactggaggaaagaatgttgcactggactgaacaacaaagaattgctgatatctttgtaaagaagggaccatatctaaaaatgtattccacatacatcaaagaatttgataagaatatagccttgctggatgaacagtgcaagaaaaatccaggttttgctgctgttgttagagaatttgagatgagcccttgctgtgctaatctggccctcaagcactacctgctcaagccggttcagaggatcccccagtacaggctgttgctgacagattatttgaagaatctcatagaagatgctggagattacagagacactcaagatgcccttgctgttgttatagaggtagccaaccacgccaatgacaccatgaagcaaggagacaactttcagaaacttatgcaaattcagtacagcttaaatggacaccatgaaattgtgcagcctggtcgggtttttctcaaagaaggaattctgatgaagctgtctcggaaagtgatgcaacctcgaatgtttttcctgtttaatgatgccctgctgtatacaacaccagtgcagtctgggatgtataaactgaacaacatgctctcactggctggaatgaaggtcagaaaacctacccaagaagcctatcagaatgaattaaagattgaaagtgtagaacgttccttcattctctcagccagttctgccacagaaagggatgaatggctagaagcgatttccagggcaatagaagagtatgccaagaaaagaatcaccttctgtcctagtaggagtcttgatgaggcagactcagaaaataaagaagaagttagtcctcttggatcgaaggctcccatctggattcctgataccagagccacaatgtgtatgatctgcacaagcgaattcactctcacctggagacgacaccactgccgggcctgtggaaagattgtatgccaagcttgttcgtctaataagtatggcttagattacctgaaaaatcaaccagcaagagtatgtgaacattgtttccaagaactgcagaaattagatcaccagcactcccctaggattggatctcctggaaatcacaaatctccttcaagtgccttatcatcagtcttacatagcattccatcagggaggaaacagaaaaaaatcccagctgctctcaaagaagtatcagcaaacacagaggattcttctatgagtggctacttgtacagatcaaagggcaataaaaaaccctggaaacacttttggtttgtcataaaaaataaagtactatatacatgctgcaagtgaggacgtggccgctttggagagtcagcctttattaggattcactgttattcaagttaaagatgagaattccgagtctaaagtatttcagttactgcacaaaaacatgttattttatgtattcaaagcagaggatgctcattcggctcagaagtggatagaagcatttcaggaaggcacaatattgtagcagtattggtttcatctcttctgtgattccaaagaggtggaatttcatcagaatggagtaaatgcaattcaaaaattgtataaaaatgaacactgccaagataaagccaaccagacccttcatcaaagaaattgttttgttaggtataagcaatttttaaaaggtgtttgttttttcatttatgttatttattaaaattttgatgtttacttaatggtcagaattatttctgagacacactgaattctaaagtaccatttctttagagaccagaaaaactatcttaatactgtatactgtattaactattcgtgacatagttcacactgttttcttaccttacattgtaacaatcttactggtggaaagtctttgtaaggaaaaaacacatagcaaggagcaaatttccacaaagtgcttggtttaggaattgtgattattataaaactgctgatgaaaaaaatgcatgtctttgaatcaataaacttgggtgaatatttgtatcttttagtggaaaaacatggccagcttctacctcagtaactgtgaactgaaatttcagtaaattatctaaagtatttctgttgttaggtacctctttggcaggagttaatattacatcatcaaagaattatagcaaagagatagaatctgaattttttaaaactgtgagtaggaatgaagatgtttttatttgcagaataccacaaataaccaactcttccggcttttaagtccaatcttttaaaaaatctaccacttcgaaacaaacataaatgtatcattttttaaaatagcaaaatatagcaagcattatgtcacataatattccctgctattataagagttctgagcccaagtcaatgatgatatttgtatctataagtaatgttacatttccaaaaatattgtgcattacaaatggaactggaattactatatcagaaaagcataattataagccagtaataactgaaattctatagtattcattttcaaaaggtctttttctgccagtttgtgatatcctccctcctaattaaaaaaaaaaaaaacaacaaatcctttctctataagcagctatcagcacacctccttaggaaagatttagattcataattctggtgcacttactgtttaacatatgaactaccttgcacatacaattgttgattagcagaagaaaatgaaataacactgtgataaaagccatccctgatgttcacaatacacaatttattaactaagtttaaactataaattatcttaactgccatgagcggtggctcacacctacaatctcagcattttgggaggccgaggccgttggaccacctgaggtcaggagatcgagaccagcctggccaatatggtgaaaccccatctctattaaaaatacaagaattagccggtcgtggtggtacatggctgtagtcctagctattcagcaggctgaggcaggagcatcgcttgaacccaggaggcagaggttgcagtgagccgagatggtgccactgcactccagcctgggatgacagagcgagactccatctc

SEQ ID NO: 2080 - DNA, 2996 bp, Homo Sapiens
atcacatcgaacatgtggtgctgaaccagaagaatatgacactgagcaatcggtgccaggtgtttgatcgtttccaggacaccgtttcgcagcatgtcgtcaaagtggacttcctgaaccgaatccacaagaagcacccccctaaccggcgtgtgctccagtcggtcaaaagaagaagcttgaaggttcctgatgctataaaatctcagtaccagtttccaccccctctcattgcacccgcggccattcgggacggggagctgatctgcaatgggatccctgaggaatcacagatgcaccttttgaactctgagcacttagccacccaagcagagcagcaagagtggctctgtagtgttgttgcgctccagtgcagcatattgaaacatttatctgctaagcagatgccttcgcattgggactctgaacagacagagaaggctgatattaagcctgttattgtgactgacagctcagtcaccacctccctgcaaacagctgacaagacacctacaccttcccactaccccttgtcctgcccctcagggattagcacccagaattccctgagctgctctccaccccaccagtccccagccctagaggacatcggctgcagttcttgtgcggaaaaatccaagaaaaccccttgtgggactgccaatgggccagtgaacacagaggtgaaagctaatggcccacacctctacagcagccctactgattccacggacccccggcgacttccaggcgctaacaccccactaccaggcctctcacaccggcaaggctggccccggcccctcacgccaccagcggctgggggccttcagaaccacaccgtcggcatcattgtgaagacagagaatgccactggccccagctcttgcccccagaggagtttggttcctgtcccaagcctgcccccttccattcccagctcttgtgccagcatcgagaacaccagcactttgcaaagaaagactgtccaatcacagataggacctccgttgacagattcaaggccactgggctcacccccaaacgccacccgggtgctcactcccccgcaagcagcaggagatggtatcttggccacaacagccaaccaacgattcagctcaccagcgccatcgtcagatggcaaggtcagccccggcacgttatccataggaagcgctttaaccgtaccctctttcccagccaactctactgccatggtggacctcaccaactcacttcgagcatttatggatgtcaatggagaaatcgagataaatatgctggacgagaagctgatcaagtttctggccttgcagagaatacatcagcttttcccctcccgggtccaaccttcaccgggcagtgtcgggacacatcagctggcttctggagggcaccacatagaagtgcaaagaaaggaggtacaggcccgagctgtgttctaccccctcttagggttgggaggagctgtgaacatgtgctatcgaaccctctacatcgggacaggagctgacatggatgtgtgccttacaaactatggtcactgtaactacgtgtccgggaaacatgcctgcatattctacgatgagaataccaaacattatgagctgttaaactacagtgagcatgggacaacggtggacaatgtgctgtattcatgtgacttctcggagaagaccccgccaacccccccaagcagtattgttgccaaagtgcagagtgtcatcaggcgccgccggcaccagaaacaggacgaagagccaagtgaggaggcagccatgatgagttcccaggcccaggggccgcagcggagaccctgcaattgcaaagccagcagctcgagcttgattgggggcagtggggccggctgggagggcacagccttactgcaccatggcagctacatcaagctgggctgcctgcagtttgtcttcagcatcactgagtttgcgaccaaacagcccaaaggcgatgccagcctgctgcaggatggggtcttggccgagaagctctctctcaagccccaccagggccctgtgctgcgctccaactctgttccttaggactggcggctaccccgccactggcctgtacacccacccaagactcctgcaatgcaaaaatgtacacaaaccaagcccgggtgttttctatactctaccagaaacccttcaactacaatctttgcatgaaatgaagaaaaccttttgactgttttttaaaaatcctttttcttttctcaagttctagggggcatttgcacatatatttgtactcaacatttcatgggaaagcggcagacctgagctgaggaacagcgtgggcagggagggaaagacccagggtctggacacttcctccaacacaaaacccttccccacccacctcctgctccctccccctcgcccaccattgtaaaataatcagaaacttgttctattttgtggcagtgacaatagttttatattaaaagaaaaaatacagttttcatacagcaaaatctatacaatatcattgttttatttaatataaagatcgctacccaccttccttccatggttcccaccctccacgttattttccctttctgcagcggttgcactacaggtagctactgtgtattatggacaaatgagaaatgaattctttttctggctgtccatctattttatttcaaataaggaaaagtgtatttggattttgtgtaaatacatctagtgatgacattttttcaatgtttttaaaaaccgtgtacagtactacatgtggtagagcgttttctcaaattgtctattgtagcaaaaatgtttttgtcgtaaacctgttttgtctcctttttttgttctcttgccacttctctcctcttcctcctgcccctggttccctcctctcctcccacccccacaaccagtaccaatgtacatagtaattgtaatgttttagactttacagaaactttcctgtattctgtatataaaaaacaaaaatacttc

SEQ ID NO: 2081 - DNA, 2545 bp, Homo Sapiens
ccagcgtgctgaagccggagcgagctagccgcccggagccgcgccgacccagctgagcccagcccacgggacgccagacctcgaccgtcgctcctaccccggccaccgctcggagccgaggcggacgcgtcccgatcttcccctgtccccaccctgccccgaccctcctctccacctctcgcgtcgtgacaccagcgtctccggcagcctcttggtcatgaaagccctcagattgtcggcttccgccctcttctgccttctgctgatcaacgggttaggggcagcaccccctggtcgccctgaggcgcagcctcctcctctcagctctgagcataaagagccggtagccggggacgcagtgcccgggccaaaggatggcagcgccccagaggtccgaggcgctcggaattccgagccgcaggacgagggagagcttttccagggcgtggatccccgggcgctggccgcggtgctgctgcaggcactcgaccgtcccgcctcacccccggcaccaagcggctcccagcaggggccggaggaagaagcagctgaagctctgctgaccgagaccgtgcgcagccagacccacagcctcccggcgccggagagcccggagcccgcggctccgcctcgccctcagactccggagaatgggcccgaggcgagcgatccctccgaggagctcgaggcgctagcgtccctgctccaggaactgcgagatttcagtccaagtagcgccaagcgccagcaggagacggcggcagcagagacggaaacccgcacgcacacgctgacccgagtgaatctggagagcccggggccagagcgcgtatggcgcgcttcctggggagagttccaggcgcgtgtcccggagcgcgcgcccctgccgcccccggccccctctcaattccaggcgcgtatgcccgacagcgggccccttcccgaaacccacaagttcggggaaggagtgtcctcccccaaaacacacctaggcgaggcattggcacccctgtccaaggcgtaccaaggcgtggccgccccgttccccaaggcgcgccggccggagagcgcactcctgggcggctccgaggcgggcgagcgccttctccagcaagggctggcgcaggtggaggccgggcggcggcaggcggaggccacgcggcaggccgcggcgcaggaagagcggctggccgacctcgcctcggacctgctgctccagtatttgctgcagggcggggcccggcagcgcggcctcgggggtcgggggctgcaggaggcggcggaggagcgagagagtgcaagggaggaggaggaggcggagcaggagagacgcggcggggaggagagggtgggggaagaggatgaggaggcggccgaggcggaggcagaggcggaggaggcggagagggcgcggcagaacgcgctcctgttcgcggaggaggaggacggggaagccggcgccgaggacaagcgctcccaggaggagacgccgggccaccggcggaaggaggccgaggggacagaggagggcggggaggaggaggacgacgaggagatggatccgcagacgatcgacagcctcattgagctgtccaccaaactccacctgccagcggacgacgtggtcagcatcatcgaggaggtggaggagaagcggaagcggaagaagaacgcccctcccgagcccgtgccgcccccccgtgccgcccccgcccccacccacgtccgctccccgcagcccccgccccccgcccccgctcccgcacgagacgagctgccggactggaacgaggtgctcccgccctgggatcgggaggaggacgaggtgtacccgccagggccgtaccaccctttccccaactacatccggccgcggacactgcagccgccctcggccttgcgccgccgccactaccaccacgccttgccgccttcgcgccactatcccggccgggaggcccaggcgcggcgcgcgcaggaggaggcggaggcggaggagcgccggctgcaggagcaggaggagctggagaattacatcgagcacgtgctgctccggcgcccgtgactgcccttcccggtcccgcccccgcgcgcccccgccgcgcgcgcgcgccggcgcccccctccgtgttgcccgctccccctcggtgtttgcatgcgccccggccctgccccttggccctgcccctgtccccgggctgcgtcgggacctgccagacccccctcccgggtcctgagcccgaactcccagagctcacccgcgggtgaccgggggccagcccaggagggcgggtggtttgtgcgagttcccttgccacgcggggccccggccccatcaagtccctctggggacgtccccgtcggaaaccggaaaaagcagttccagttaattgtgtgaagtgtgtctgtctccagcccttcgggcctcccacgagcccctccagcctctccaagtcgctgtgaattgaccccttctttcctttctctgttgtaaatacccctcacggaggaaatagttttgctaagaaataaaagtgactatttt

SEQ ID NO: 2082 - DNA, 157 bp, Homo Sapiens
gacattagaaagaaaaagcctcacagatttgaagaactggacccccaaatcaactcacctgcctggaagcaactgggaaacccttccaataagtcctgataataaagcacttcagggtcccatgtcttgaaaaaaaaaaaaaaaaaaaaaaaaaaag

SEQ ID NO: 2083 - DNA, 990 bp, Homo Sapiens
cccatcccgtgggtggccggcgacaagatggcagcagcgtgtcggagcgtgaagggcctggtggcggtaataaccggaggagcctcgggcctgggcctggccacggcggagcgacttgtggggcagggagcctctgctgtgcttctggacctgcccaactcgggtggggaggcccaagccaagaagttaggaaacaactgcgttttcgccccagccgacgtgacctctgagaaggatgtgcaaacagctctggctctagcaaaaggaaagtttggccgtgtggatgtagctgtcaactgtgcaggcatcgcggtggctagcaagacgtacaacttaaagaagggccagacccataccttggaagacttccagcgagttcttgatgtgaatctcatgggcaccttcaatgtgatccgcctggtggctggtgagatgggccagaatgaaccagaccagggaggccaacgtggggtcatcatcaacactgccagtgtggctgccttcgagggtcaggttggacaagctgcatactctgcttccaaggggggaatagtgggcatgacactgcccattgctcgggatctggctcccataggtatccgggtgatgaccattgccccaggtctgtttggcaccccactgctgaccagcctcccagagaaagtgtgcaacttcttggccagccaagtgcccttccctagccgactgggtgaccctgctgagtatgctcacctcgtacaggccatcatcgagaacccattcctcaatggagaggtcatccggctggatggggccattcgtatgcagccttgaagggagaaggcagagaaaacacacgctcctctgcccttcctttccctggggtactactctccagcttgggaggaagcccagtagccattttgtaactgcctaccagtcgccctctgtgcctaataaagtctctttttctcacaaaaaaaaaaaaaaaaaaaaaaaaaaaaaaaaaaa

SEQ ID NO: 2084 - DNA, 398 bp, Homo Sapiens
aggatcccccccctatggaatccaaccttctttcacaatggtagcatcgctcatgatgactcccctctgagcccccaacttggagaaatggtactttgtgatatcagctttggggtttggattctctgctgccgcccttcccactctctagtgatgactcagcctttttatcatatacatcttgccagtttactccagagaagaaactgtgtctcataatttcttttgcatcatctggtcctccaccaaggcgtttatttggatcctttatcaagagccctgaaagcaatgattttgcatctgaagagagtgttcgaggaaatttaatgtcttccattaatattaattcaaaaagtttctcatggtcctggttgtagaaaggtaacctcccacacatc

SEQ ID NO: 2085 - DNA, 275 bp, Homo Sapiens
tcctccctcgtcgccgccgccgccgccgccgcctcagccttcgcctcagccgccgcccgctcccgcccgcgcgcgcgattagtgacgatcaatccaggatgctgcagactctggccggggtgaaccttgctgggcaattcgttgcaggggggcatggcctgccgcctcccccgcacggccacgaagggcgggacggcgacggcaggaagcaggacatcggcgacatcctccaccagatcatgacaatcaccgaccagagctttgacgaggcgcac

SEQ ID NO: 2086 - DNA, 399 bp, Homo Sapiens
gctggagtgaccctgaatgttctggaaatgacttctgaagatttagaaaatgctctaaaagcagtcatcaatgacaaaagttacaaggagaacatcatgcgcctctccagccttcacaaggaccgcccggtggagccgctggacctggccgtgttctgggtggagtttgtgatgaggcacaagggcgcgccacacctgcgccccgcagcccacgacctcacctggtaccagtaccattccttggacgtgattggtttcctcttggccgtcgtgctgacagtggccttcatcacctttaaatgttgtgcttatggctaccggaaatgcttggggaaaaaagggcgagttaagaaagcccacaaatccaagacccattgagaagtgggtgggaaataaggt

SEQ ID NO: 2087 - DNA, 309 bp, Homo Sapiens
gcggccgctcggcaagctgggtctctggaagaggcggcagaggcgcgcggggtggggcgggggtgggtctggagcggagacccgcagggctgcggccgtccggagggcgggcggaagggcggtgcaggcggtggccggcgcgctcggccgcggtagctcgatcccgggctcgccgcccccgcaccagcagagctgccgccgaccagccgctgccgcccccgggaagggaacccgcttataaggcggcgctgcccgacgggaggggcttcccaggggtggggcaggcgggagcggggaggagaggagagg

SEQ ID NO: 2088 - DNA, 3131 bp, Homo Sapiens
gcggagcgcggcgcgcgcggcggttgggccgttggctgttcggccctgggatccgccgccactccgcgatcagaccgctctgtgccgcgagccgccgtgagcactcggattcaagccggcgccaacgagtccgggggcatcgcccgcagcggccaagctcatggccggctgagcgggacgccgcctccgcctcagccaccgccgccgccgccgcctcctcctcctcagccggcggcggcccgggcccagcaaccatggctgaagactactgggacgggcgcctgcggcgaacaggaggagaaggaggtcgcgcggcctcatcccgggccgccgccccaggcgccgccgcgccggccccgcggctctgaggttgctcgcgcgcccccgccgatcgccatggatcggatgaagaagatcaaacggcagctgtcaatgacactccgaggtggccgaggcatagacaagaccaatggtgcccctgagcagataggcctggatgagagtggtggtggtggcggcagtgaccctggagaggcccccacacgtgctgctcctggggaacttcgttctgcacggggcccactcagctctgcaccagagattgtgcacgaggacttgaagatggggtctgatggggagagtgaccaggcttcagccacgtcctcggatgaggtgcagtctccagtgagagtgcgtatgcgcaaccatcccccacgcaagatctccactgaggacatcaacaagcgcctatcactaccagctgacatccggctgcctgagggctacctggagaagctgaccctcaatagccccatctttgacaagcccctcagccgccgcctccgtcgtgtcagcctatctgagattggctttgggaaactggagacctacattaagctggacaaactgggcgagggtacctatgccaccgtctacaaaggcaaaagcaagctcacagacaaccttgtggcactcaaggagatcagactggaacatgaagagggggcaccctgcaccgccatccgggaagtgtccctgctcaaggacctcaaacacgccaacatcgttacgctacatgacattatccacacggagaagtccctcacccttgtctttgagtacctggacaaggacctgaagcagtacctggatgactgtgggaacatcatcaacatgcacaacgtgaaactgttcctgttccagctgctccgtggcctggcctactgccaccggcagaaggtgctacaccgagacctcaagccccagaacctgctcatcaacgagaggggagagctcaagctggctgactttggcctggcccgagccaagtcaatcccaacaaagacatactccaatgaggtggtgacactgtggtaccggccccctgacatcctgcttgggtccacggactactccactcagattgacatgtggggtgtgggctgcatcttctatgagatggccacaggccgtcccctctttccgggctccacggtggaggaacagctacacttcatcttccgtatcttaggaaccccaactgaggagacgtggccaggcatcctgtccaacgaggagttcaagacatacaactaccccaagtaccgagccgaggcccttttgagccacgcaccccgacttgatagcgacggggccgacctcctcaccaagctgttgcagtttgagggtcgaaatcggatctccgcagaggatgccatgaaacatccattcttcctcagtctgggggagcggatccacaaacttcctgacactacttccatatttgcactaaaggagattcagctacaaaaggaggccagccttcggtcttcgtcgatgcctgactcaggcaggccagctttccgcgtggtggacaccgagttctaagccacagaccgaggccccagcaggcagcggctggagggatgccacacccctcacagggcagcccccaactacatcttccctgcttactctctgcctacctgcctgagccatgttcacctgcccacttgtcccctgctgcctgcccaaacaccccaccattggcctgtcaacccacccattggcctgtctgctgggtgctaacaaagctctcatcactccttcacttggtctgtctgtctctgtcttggtagttgccggtggacagcatggccgtgccagcctcccacactgaggccaggtctaccccccatcataccagcccccaggaccactaccccacggccagccaggggtccagagctagcccaggctggggatctcgactcagacaagatggtgacaatgccttgagtctgaggcatcctctgcctgctttcctgcctgccccacctgcctcatattgtgtgggcctttttttgtttgtttcattcattgttttttttttttttaattattttaaatgagatttttgttttttttaaatgcaatatctctgtatacagactggctgggccccaccccctgcgtgtggccctcccacagtattttgtgcaatgaagccctgctcccagcctttcagagacagggacacagcccctatttggaaccctgatcatcaccagaccctgggattggctatgggaaagcatgccacagccactcgccttcctacccccgcccgccatccccagttgcagggggatctggggactaccagagactctgggaaatggacaaggtggggggccccactctttctctcctgcagtcccgtagctggggcctccttccttctcagggtctccccagcccagtccccttgctcccatcccactcggtgctgttgggtaggggccctgccaggaactgaccagctcagcgaggagccataatgtgcatatgtgcacaagcagggttgggggaggggggtgtgaggggttgtgcccaggtgttgccccctatctcctggggagggtgaggcagggcagggacagtctccagggtcagtccctggatgggtggttacctccccttcctccaccctaagccctggggccctgaaatggggtgggagggcaggggtgggagccctcctagtgggtttggggggttgggttcctgaatgcaccataatcgctgtatgaaatattaaaaagtctaaagtgaaaaaaaaaaaaaaaaaa

SEQ ID NO: 2089 - DNA, 342 bp, Homo Sapiens
  misc_feature (218)..(218): n is a, c, g, or t
tgacgttggagagccagccagactcctcggaggagaagtcagcatttttgaagccctccacaccgttccggaagagctggcaaaaggagcctcacacccccaaggaggggacggtgccacttccagacaagacccacaaatctcaggtggagactctgccaccaagtctggaagaatcgtccacgtccacgagcgagcagcctatggaggtggagctntggcccgcggagaagcagtcatcatcatccatggagtggctgctggtgcccggggaggagcagctatccttgcccccagaggagcagtcattgccctctgcggaggggaccagggttcagcagt

SEQ ID NO: 2090 - DNA, 5189 bp, Homo Sapiens
ggactgcgaaaggagcagggttgcggagctagggctccagcctgcggccgcgcattcttgcgtctggccagccgcgagctctaagggtcggccccgcccggtccgcccccgcggctccctgccaggctctcgcgggcgcgctcggggtggggcctcgcggctggcggagatgcggccggggctgcgcggtggtgatgcgagcctgctgggcggcgcgccggggcagccggagccgcgcgccgcggcgctgtaatcggacaccaagagcgctcgcccccggcctccggccactttccattcactccgaggtgcttgattgagcgacgcggagaagagctccgggtgccgcggcactgcagcgctgagattcctttacaaagaaactcagaggaccgggaagaaagaatttcacctttgcgacgtgctagaaaataaggtcgtctgggaaaaggactggagacacaagcgcatccaaccccggtagcaaactgatgacttttccgtgctgatttctttcaacctcggtattttcccttggatattaacttgcatatctgaagaaatggcattccggacaatttgcgtgttggttggagtatttatttgttctatctgtgtgaaaggatcttcccagccccaagcaagagtttatttaacatttgatgaacttcgagaaaccaagacctctgaatacttcagcctttcccaccatcctttagactacaggattttattaatggatgaagatcaggaccggatatatgtgggaagcaaagatcacattctttccctgaatattaacaatataagtcaagaagctttgagtgttttctggccagcatctacaatcaaagttgaagaatgcaaaatggctggcaaagatcccacacacggctgtgggaactttgtccgtgtaattcagactttcaatcgcacacatttgtatgtctgtgggagtggcgctttcagtcctgtctgtacttacttgaacagagggaggagatcagaggaccaagttttcatgattgactccaagtgtgaatctggaaaaggacgctgctctttcaaccccaacgtgaacacggtgtctgttatgatcaatgaggagcttttctctggaatgtatatagatttcatggggacagatgctgctatttttcgaagtttaaccaagaggaatgcggtcagaactgatcaacataattccaaatggctaagtgaacctatgtttgtagatgcacatgtcatcccagatggtactgatccaaatgatgctaaggtgtacttcttcttcaaagaaaaactgactgacaataacaggagcacgaaacagattcattccatgattgctcgaatatgtcctaatgacactggtggactgcgtagccttgtcaacaagtggaccactttcttaaaggcgaggctggtgtgctcggtaacagatgaagacggcccagaaacacactttgatgaattagaggatgtgtttctgctggaaactgataacccgaggacaacactagtgtatggcatttttacaacatcaagctcagttttcaaaggatcagccgtgtgtgtgtatcatttatctgatatacagactgtgtttaatgggccttttgcccacaaagaagggcccaatcatcagctgatttcctatcagggcagaattccatatcctcgccctggaacttgtccaggaggagcatttacacccaatatgcgaaccaccaaggagttcccagatgatgttgtcacttttattcggaaccatcctctcatgtacaattccatctacccaatccacaaaaggcctttgattgttcgtattggcactgactacaagtatacaaagatagctgtggatcgagtgaacgctgctgatgggagataccatgtcctgtttctcggaacagatcggggtactgtgcaaaaagtggttgttcttcctactaacaactctgtcagtggcgagctcattctggaggagctggaagtctttaagaatcatgctcctataacaacaatgaaaatttcatctaaaaagcaacagttgtatgtgagttccaatgaaggggtttcccaggtatctctgcaccgctgccacatctatggtacagcctgtgctgactgctgcctggcgcgggacccttattgcgcctgggatggccattcctgttccagattctacccaactgggaaacggaggagccgaagacaagatgtgagacatggaaacccactgactcaatgcagaggatttaatctaaaagcatacagaaatgcagctgaaattgtgcagtatggagtaaaaaataacaccacttttctggagtgtgcccccaagtctccgcaggcatctatcaagtggctgttacagaaagacaaagacaggaggaaagaggttaagctgaatgaacgaataatagccacttcacagggactcctgatccgctctgttcagggttctgaccaaggactttatcactgcattgctacagaaaatagtttcaagcagaccatagccaagatcaacttcaaagttttagattcagaaatggtggctgttgtgacggacaaatggtccccatggacctgggccagctctgtgagggctttacccttccacccgaaggacatcatgggggcattcagccactcagaaatgcagatgattaaccaatattgcaaagacactcggcagcaacatcagcagggagatgaatcacagaaaatgagaggggactatggcaagttaaaggccctcatcaatagtcggaaaagtagaaacaggaggaatcagttgccagagtcataatattttcttatgtgggtcttatgcttccattaacaaatgctctgtcttcaatgatcaaattttgagcaaagaaacttgtgctttaccaaggggaattactgaaaaaggtgattactcctgaagtgagttttacacgaactgaaatgagcatgcattttcttgtatgatagtgactagcactagacatgtcatggtcctcatggtgcatataaatatatttaacttaacccagattttatttatatctttattcaccttttcttcaaaatcgatatggtggctgcaaaactagaattgttgcatccctcaattgaatgagggccatatccctgtggtattcctttcctgctttggggctttagaattctaattgtcagtgattttgtatatgaaaacaagttccaaatccacagcttttacgtagtaaaagtcataaatgcatatgacagaatggctatcaaaagaaatagaaaaggaagacggcatttaaagttgtataaaaacacgagttattcataaagagaaaatgatgagtttttatggttccaatgaaatatgttggggtttttttaagattgtaaaaataatcagttactggtatctgtcactgacctttgtttccttattcaggaagataaaaatcagtaacctaccccatgaagatatttggtgggagttatatcagtgaagcagtttggtttatattcttatgttatcaccttccaaacaaaagcacttactttttttggaagttatttattttagactcaaagaatataatcttgcactactcagttattactgtttgttctcttattccctagtctgtgtggcaaattaaacaatataagaaggaaaaatttgaagtattagacttctaaataaggggtgaaatcatcagaaagaaaaatcaaagtagaaactactaattttttaagaggaatttataacaaatatggctagttttcaacttcagtactcaaattcaatgattcttccttttattaaaaccagtctcagatatcatactgatttttaagtcaacactatatattttatgatcttttcagtgtgatggcaaggtgcttgttatgtctagaaagtaagaaaacaatatgaggagacattctgtctttcaaaaggtaatggtacatacgttcactggtctctaagtgtaaaagtagtaaattttgtgatgaataaaataattatctcctaattgtatgttagaataattttattagaataatttcatactgaaattattttctccaaataaaaattagatggaaaaatgtgaaaaaaattattcatgctctcatatatattttaaaaacactacttttgcttttttatttaccttttaagacattttcatgcttccaggtaaaaacagatattgtaccatgtacctaatccaaatatcatataaacattttatttatagttaataatctatgatgaaggtaattaaagtagattatggcctttttaagtattgcagtctaaaacttcaaaaactaaaatcattgtcaaaattaatatgattattaatcagaatatcagaatatgattcactatttaaactatgataaattatgataatatatgaggaggcctcgctatagcaaaaatagttaaaatgctgacataacaccaaacttcattttttaaaaaatctgttgttccaaatgtgtataattttaaagtaatttctaaagcagtttattataatggtttgcctgcttaaaaggtataattaaacttcttttctcttctacattgacacacagaaatgtgtcaatgtaaagccaaaaccatcttctgtgtttatggccaatctattctcaaagttaaaagtaaaattgtttcagagtcacagttccctttatttcacataagcccaaactgatagacagtaacggtgtttagttttatactatatttgtgctatttaattctttctattttcacaattattaaattgtgtacactttcattacttttaaaaatgtagaaattcttcatgaacataactctgctgaatgtaaaagaaaattttttttcaaaaatgctgttaatgtatactactggtggttgattggttttattttatgtagcttgacaattcagtgacttaatatctattccatttgtattgtacataaaattttctagaaatacacttttttccaaagtgtaagtttgtgaatagattttagcatgatgaaactgtcataatggtgaatgttcaatctgtgtaagaaaacaaactaaatgtagttgtcacactaaaatttaattggatattgatgaaatcattggcctggcaaaataaaacatgttgaattccccaaaaaaaaaaaaaaaa

SEQ ID NO: 2091 - DNA, 2312 bp, Homo Sapiens
gcctctctccatcagacaccccaaggttccatccgaagcaggcggagcaccgaacgcaccccggggtggtcagggacccccatccgtgctgccccctaggagcccgcgcctctcctctgcgccccgcctctcgggccgcaacatcgcgcggttcctttaacagcgcgctggcagggtgtgggaagcaggaccgcgtcctcccgccccctcccatccgagtttcaggtgaattggtcaccgagggaggaggccgacacaccacacctacactcccgcgtccacctctccctccctgcttcctcttggcggaggcggcaggaaccgagagccaggtccagagcgccgaggagccggtctaggacgcagcagattggtttatcttggaagctaaagggcattgctcatcctgaagatcagctgaccattgacaatcagccatgtcatccaggcctcttgaaagtccacctccttacaggcctgatgaattcaaaccgaatcattatgcaccaagcaatgacatatatggtggagagatgcatgttcgaccaatgctctctcagccagcctactctttttacccagaagatgaaattcttcacttctacaaatggacctctcctccaggagtgattcggatcctgtctatgctcattattgtgatgtgcattgccatctttgcctgtgtggcctccacgcttgcctgggacagaggctatggaacttcccttttaggaggtagtgtaggctacccttatggaggaagtggctttggtagctacggaagtggctatggctatggctatggttatggctatggctacggaggctatacagacccaagagcagcaaagggcttcatgttggccatggctgccttttgtttcattgccgcgttggtgatctttgttaccagtgttataagatctgaaatgtccagaacaagaagatactacttaagtgtgataatagtgagtgctatcctgggcatcatggtgtttattgccacaattgtctatataatgggagtgaacccaactgctcagtcttctggatctctatatggttcacaaatatatgccctctgcaaccaattttatacacctgcagctactggactctacgtggatcagtatttgtatcactactgtgttgtggatccccaggaggccattgccattgtactggggttcatgattattgtggcttttgctttaataattttctttgctgtgaaaactcgaagaaagatggacaggtatgacaagtccaatattttgtgggacaaggaacacatttatgatgagcagccccccaatgtcgaggagtgggttaaaaatgtgtctgcaggcacacaggacgtgccttcacccccatctgactatgtggaaagagttgacagtcccatggcatactcttccaatggcaaagtgaatgacaagcggttttatccagagtcttcctataaatccacgccggttcctgaagtggttcaggagcttccattaacttcgcctgtggatgacttcaggcagcctcgttacagcagcggtggtaactttgagacaccttcaaaaagagcacctgcaaagggaagagcaggaaggtcaaagagaacagagcaagatcactatgagacagactacacaactggcggcgagtcctgtgatgagctggaggaggactggatcagggaatatccacctatcacttcagatcaacaaagacaactgtacaagaggaattttgacactggcctacaggaatacaagagcttacaatcagaacttgatgagatcaataaagaactctcccgtttggataaagaattggatgactatagagaagaaagtgaagagtacatggctgctgctgatgaatacaatagactgaagcaagtgaagggatctgcagattacaaaagtaagaagaatcattgcaagcagttaaagagcaaattgtcacacatcaagaagatggttggagactatgatagacagaaaacatagaaggctgatgccaagttgtttgagaaattaagtatctgacatctctgcaatcttctcagaaggcaaatgactttggaccataaccccggaagccaaacctctgtgagcatcacaaagttttgggttgctttaacatcatcagtattgaagcattttataaatcgcttttgataatcaactgggctgaacaactccaattaaggattttatgctttaaacattggttcttgtattaagaatgaaatactgtttgaggtttttaagccttaaaggaaggttctggtgtgaactaaactttcacacccc

SEQ ID NO: 2092 - DNA, 2244 bp, Homo Sapiens
ctgcagacgaggcagggagaggcgggacttcgcgggcgagacgtcatcggggcgccggacgccggggcgcctgggagtttgaagcaaacaggcagcgcgcgacaatggcggtcgctcgtgcagctttggggccattggtgacgggtctgtacgacgtgcaggctttcaagtttggggacttcgtgctgaagagcgggctttcctcccccatctacatcgatctgcggggcatcgtgtctcgaccgcgtcttctgagtcaggttgcagatattttattccaaactgcccaaaatgcaggcatcagttttgacaccgtgtgtggagtgccttatacagctttgccattggctacagttatctgttcaaccaatcaaattccaatgcttattagaaggaaagaaacaaaggattatggaactaagcgtcttgtagaaggaactattaatccaggagaaacctgtttaatcattgaagatgttgtcaccagtggatctagtgttttggaaactgttgaggttcttcagaaggagggcttgaaggtcactgatgccatagtgctgttggacagagagcagggaggcaaggacaagttgcaggcgcacgggatccgcctccactcagtgtgtacattgtccaaaatgctggagattctcgagcagcagaaaaaagttgatgctgagacagttgggagagtgaagaggtttattcaggagaatgtctttgtggcagcgaatcataatggttctcccctttctataaaggaagcacccaaagaactcagcttcggtgcacgtgcagagctgcccaggatccacccagttgcatcgaagcttctcaggcttatgcaaaagaaggagaccaatctgtgtctatctgctgatgtttcactggccagagagctgttgcagctagcagatgctttaggacctagtatctgcatgctgaagactcatgtagatattttgaatgattttactctggatgtgatgaaggagttgataactctggcaaaatgccatgagttcttgatatttgaagaccggaagtttgcagatataggaaacacagtgaaaaagcagtatgaaggaggtatctttaaaatagcttcctgggcagatctagtaaatgctcacgtggtgccaggctcaggagttgtgaaaggcctgcaagaagtgggcctgcctttgcatcgggggtgcctccttattgcggaaatgagctccaccggctccctggccactggggactacactagagcagcggttagaatggctgaggagcactctgaatttgttgttggttttatttctggctcccgagtaagcatgaaaccagaatttcttcacttgactccaggagttcagttggaagcaggaggagataatcttggccaacagtacaatagcccacaagaagttattggcaaacgaggttccgatatcatcattgtaggtcgtggcataatctcagcagctgatcgtctggaagcagcagagatgtacagaaaagctgcttgggaagcgtatttgagtagacttggtgtttgagtgcttcagatacatttttcagatacaatgtgaagacattgaagatatgtggtcctcctgaaagtcactggctggaaataatccaattattcctgcttggattcttccacagggcctgtgtaagaatgggttctggagttctcatggtctttaggaaatattgagtaatttgtaatcaccgcattgatactataataagttcattcttaagcttgctttttttgagactggtgtttgttagacagccacagtcctgtctgggttagggtcttccacatttgaggatccttcctatctctccatgggactagactgctttgttattctatttattttttaatttttttcgagacaggatctcactctgttgcccaggatggagtgcagtggtgagatcacggctcattgcagcctcgacctcccaggtgatcctcccacctcagcttccagattagctggtgctataggcatgcaccaccacgtccatctaaatttctttattatttgtagagatgaggtcttgccatgttacccaggctggtctcaactcctgggctcaagcgatcctcctgcctcagtctctcaaagtgctgggattacaggtgtgagccactgtgcccagcctaattgcagtaagacaaaaattctagggcaccaagaggctaaagtcagcacagcttttcttgtgtcctgtatt

SEQ ID NO: 2093 - DNA, 14985 bp, Homo Sapiens
cctaattacatagttgaaaagcgtgaatcgggtacaacagcttggcagcttgtcaattccagtgtcaagcgcactcaaattaaagtcactcatctcacaaaatacatggaatattctttccgtgtcagttcagagaacagatttggtgtcagcaaacctctagaatcagcaccaataattgctgaacatccatttgtcccaccaagcgctcctaccagacctgaggtctaccatgtgtctgccaatgccatgtctattcgttgggaagaaccctaccacgatggtggcagtaaaatcattggctactgggttgagaagaaagaacgtaatacaattctttgggtgaaagaaaacaaagtgccatgcttagagtgcaactacaaagtaactggtttagtagaaggactggaatatcagttcagaacttatgcactcaatgctgcaggtgttagcaaggccagcgaagcttcaagacctataatggctcaaaatccagttgatgcaccaggcagaccaggggtgacagatgtccaaagatcaacagtatcactgatttggtctgccccagcgtatgatggaggcagcaaggttgtgggctacatcatagagcgtaagccagtcagtgaggtaggagatggtcgctggctgaagtgcaactacaccattgtatctgacaatttcttcaccgtgactgctctcagtgaaggagacacttatgagttccgtgtgttagccaagaatgcagcaggcgtaattagcaaagggtctgaatctacaggccctgtcacttgccgagatgaatacgctccacccaaagccgaactggatgcccgattacacggtgatctggttaccatcagagcaggttctgatcttgttctggatgctgcagttggtggcaaacctgaacccaaaattatctggaccaaaggagacaaggagctagatctctgtgaaaaagtctctttgcagtatactggcaaacgagcaactgctgtgatcaagttctgtgacagaagtgacagtggaaaatacactttaacagtgaaaaatgccagcgggaccaaggccgtgtctgtcatggtcaaagtgcttgattcccctggcccatgtggaaagctcaccgtcagcagagtaacacaggagaagtgcactttagcctggagccttccgcaggaagacggaggagcagaaatcactcactacatcgtggaaagacgcgagactagcaggctcaactgggtgattgttgaaggcgaatgcccaaccctatcctatgtcgttaccaggctcatcaagaacaatgagtacatattccgagtgagggcagtaaacaaatatggccctggtgtgcctgttgaatcagagccaattgtagccagaaactcattcactattccatcaccacccggcatacctgaagaagttgggactggcaaagagcatatcatcattcagtggacaaaacctgaatctgatggtggcaatgaaatcagcaactacctagtagacaaacgtgagaaggagagcctgcgctggacacgtgtcaacaaagactatgtggtgtatgataccaggctgaaggtgaccagcctgatggagggttgtgattaccagttccgggtgaccgcagtgaatgcagctggtaacagtgagcccagcgaacgttccaacttcatctcatgcagagaaccatcatatacccctggaccaccttctgctccaagagttgtggataccaccaaacacagcattagtttggcatggaccaaacccatgtacgatggtggtactgacattgtaggatatgttctggaaatgcaagagaaggacactgatcagtggtaccgagtgcataccaatgccacaataagaaatactgaattcactgtgccagaccttaaaatgggccagaaatattccttcagagttgctgccgtgaacgtgaagggtatgagcgaatacagcgaatcaattgctgaaattgagcccgtggaaagaatagaaataccagatcttgagcttgcagatgatctaaagaagactgtgaccatcagggctggggcctccttgcgcttgatggtgtctgtatctggaagaccacctcctgtcataacgtggagcaagcagggcattgaccttgcaagccgggcaattattgacaccactgagagctactcattgctaatagtggacaaagttaatcggtacgatgctggaaaatacacaattgaagctgaaaaccaatctggcaagaaatcagcaacagtccttgttaaagtctatgatactcctggtccctgtccttcagtgaaagttaaggaagtatcaagagattctgtgactataacttgggaaattcccacgattgatggtggagctccaatcaacaattacatcgttgagaagcgtgaagctgctatgagagcattcaaaacagtaactaccaaatgcagcaagacactttacagaatttctggacttgtagaaggaaccatgcactatttcagagtgctgccagaaaatatttatggcattggagaaccttgtgaaacatctgatgcagtactggtctcagaagtgcctttggtgcctgcaaagctagaagtggtcgatgtcaccaaatccactgttacccttgcctgggaaaaaccactctacgatggtggtagccgactcactggatatgttctcgaggcctgcaaagctggcacagagagatggatgaaggttgtcaccttaaaacccacagtcctagagcacactgttacttccttaaatgaaggtgaacaatacttatttagaataagggcacaaaatgagaaaggtgtgtcagaaccaagagagactgtcacagccgtgactgtacaagacctcagagtgttgccaacaatcgatctttctacaatgcctcagaagaccatccatgtcccagctggcagaccagtagagctggtgatacctattgctggccgtccacctcctgctgcttcctggttctttgctggttctaaactgagagaatcagagcgtgtcacagttgaaactcacactaaagtagctaaattaaccatccgtgaaaccactatcagagatactggagaatacacacttgaattgaagaatgttaccggaactactttagaaaccattaaagttatcattcttgacaagcctggtccaccaacaggacctattaagattgatgaaattgatgctacatcaattaccatttcctgggaaccacctgaattggacggtggtgctccactgagtggttatgtggtagaacaacgtgacgctcatcgtccaggatggctgcccgtttctgaatcagtgactaggtccacgtttaagtttaccagactcaccgaaggaaatgagtatgtgttccgtgtggctgcaacaaaccgcttcgggattggctcttacttgcagtctgaggtcatagagtgtcgcagcagcatccgtattcctggacccccagaaacattacagatatttgatgtttcccgtgatggcatgacacttacttggtacccaccagaggatgacggtggctcccaagtgactggatatattgtggagcgcaaagaagtgagagcagatcgatgggtccgtgtaaataaagtacctgtgacaatgacacggtaccgctccactggccttactgaaggcttagaatatgaacaccgtgtcacagccattaatgcaagagggtctgggaaaccaagtcgtccttccaaacccatcgttgccatggatccaattgctcctccaggaaagccacaaaacccaagagttactgatacaacaaggacatcagtctccctggcctggagtgttccagaagatgaaggaggatctaaagtcacaggctacttgattgaaatgcaaaaagtagatcaacatgaatggaccaagtgtaacaccactccaaccaagattcgagagtatactctaacacacctacctcagggtgcagaatacaggttccgcgtcctagcttgtaatgctggtggacctggtgagcctgctgaggtaccaggaacagtcaaagtcactgaaatgcttgaatatcctgattatgaacttgatgaaagataccaagaaggtatctttgtaaggcaaggtggcgtcatcagacttaccataccaatcaaagggaaaccattcccaatatgtaaatggaccaaggaaggccaggatattagtaagcgtgccatgattgcaacatctgaaacacacactgagcttgtgatcaaagaagcagacaggggtgattctggcacttatgacctggttctggaaaataaatgtggcaagaaggctgtctacatcaaggtcagggtgataggaagtcccaacagtccagaagggccactggaatatgatgacatccaagtccgctctgtgagggtcagctggagacctcctgctgatgatggtggtgctgacatcttaggctacatcctcgagagacgagaagtgcctaaagccgcctggtataccattgattccagagtccgaggtacatctctggtggtaaaaggcctcaaagagaatgtagaataccatttccgtgtttcagcagaaaaccagtttggcataagcaaacccttgaaatctgaggaaccagtcacaccaaaaacaccattgaatcctccagaacctccaagcaatcctccagaagtactcgatgtaaccaagagttctgttagcttgtcctggtcccggcccaaagatgatggtggttctagagtcacaggctactacatcgaacgcaaagagacatccactgacaaggtggtcagacacaacaagactcagatcaccaccacaatgtacactgtcacagggcttgttcccgatgctgagtatcagttccgcatcatcgcacagaatgatgttggcctgagtgagaccagccctgcttctgaaccagttgtttgcaaagatccatttgataaaccaagccaaccaggagaacttgagattctttcaatatccaaagatagtgtcactctacagtgggagaaacctgaatgtgatggtggtaaagaaattcttggatactgggttgaatatagacagtctggagacagtgcctggaagaagagcaataaggaacgtattaaggacaagcaattcacaataggaggtttgctggaagctactgagtatgaattcagggtttttgctgagaatgagactgggctgagcagacctcgcagaactgctatgtctataaagactaaactcacatctggagaggccccaggaatacgcaaagaaatgaaggatgttaccacaaaattgggtgaagctgctcaactctcatgccagattgttggaaggcctcttcctgacattaaatggtacagatttggtaaagagctcatacaaagccggaaatacaaaatgtcttcagatggacgcacacacactcttacagtaatgacagaggaacaggaagatgaaggtgtttatacctgcatagccaccaatgaggttggagaagtagaaaccagtagtaagcttctcctgcaagcaacaccgcagttccatcctggttacccactgaaagagaaatattatggagctgtgggttccacacttcggcttcatgttatgtacattggtcgtccagtacctgccatgacttggttccatggtcagaaacttttgcaaaactcagaaaacattactattgaaaacactgagcactatactcatcttgtcatgaagaatgtccaacgtaagactcatgctgggaaatacaaagtccagctcagcaatgtttttggaacagttgatgccatccttgatgtggaaatacaagataaaccagacaaacctacaggaccaattgtgatcgaagctctattgaagaactccgcagtgatcagctggaaaccacccgcagatgacggaggctcctggatcaccaactatgtggtggaaaaatgtgaggccaaggagggggctgaatggcaattggtgtcttcagccatctcagtgacaacctgtagaattgtgaacctcacagaaaatgctggctattacttccgggtttcagctcagaacactttcggcatcagtgaccctctagaagtgtcctcagttgtgatcattaagagtccatttgaaaagccaggtgctcctggcaaaccaactattactgctgtcacaaaagattcttgtgttgtggcctggaagccacctgccagtgatggaggtgcaaagattagaaattactaccttgagaagcgtgagaagaagcagaataaatggatttctgtgacaacagaagaaattcgagaaactgtcttttcagtgaaaaaccttattgaaggtcttgaatacgagtttcgtgtgaaatgtgaaaatctaggtggggaaagtgaatggagtgaaatatcagaacccatcactcccaaatctgatgtcccaattcaggcaccacactttaaagaggaactgagaaatctaaatgtcagatatcagagcaatgctaccttggtctgcaaagtgactggtcatccaaaacctatcgtcaaatggtacagacaaggcaaagaaatcattgcagatggattaaaatataggattcaagaatttaagggtggctaccaccagctcatcattgcaagtgtcacagatgatgatgccacagtttaccaagtcagagctaccaaccaagggggatctgtgtctggcactgcctccttggaagtggaagttccagctaagatacacttacctaaaactcttgaaggcatgggagcagttcatgctctccgaggtgaagtggtcagcatcaagattcctttcagtggcaaaccagatcctgtgatcacctggcagaaaggacaagatctcattgacaataatggccactaccaagttattgtcacaagatccttcacatcacttgttttccccaatggggtagagagaaaagatgctggtttctatgtggtctgtgctaaaaacagatttggaattgatcagaagacagttgaactggatgtggctgatgttcctgacccacccagaggagtcaaagttagtgatgcctcacgagattctgtcaacttaacatggactgagccagcctctgatggtggcagcaaaatcaccaactacattgttgaaaaatgtgcaactactgcagaaagatggctccgtgtaggacaggcccgagaaacacgttataccgtgatcaacttatttggaaaaacaagttaccagttccgggtaatagctgaaaataaatttggtctgagcaagccttcagagccttcagaaccaaccataaccaaagaagataagaccagagctatgaactatgatgaagaggtagatgaaaccagggaagtctccatgactaaagcatctcactcttcaaccaaggaactctatgagaaatatatgattgctgaagatcttgggcgtggtgagtttggaattgtccatcgttgtgttgaaacatcctcaaagaagacatacatggccaaatttgttaaagtcaaagggactgatcaggttttggtaaagaaggaaatttccattctgaatattgctaggcatagaaacatcttacacctccatgaatcatttgaaagcatggaagaattagttatgatctttgagtttatatcaggacttgacatatttgagcgcattaacacaagtgcttttgaacttaatgaaagagaaattgtaagttatgttcaccaggtctgtgaagcacttcagtttttacacagtcataatattggacactttgacattagaccagaaaatatcatttaccaaaccagaagaagctctaccattaaaatcatagaatttggtcaagcccgtcagctgaaaccaggggacaacttcaggcttctattcactgccccagaatactatgcacctgaagtccaccagcatgatgttgtcagcacagccacagacatgtggtcacttggaacactggtatatgtgctattgagtggtatcaacccattcctggctgaaactaaccaacagatcattgagaatatcatgaatgctgaatatactttcgatgaggaagcattcaaagagattagcattgaagccatggattttgttgaccggttgttagtgaaagagaggaaatctcgcatgacagcatcggaggctctccagcacccatggttgaagcagaagatagaaagagtcagtactaaagttatcagaacattaaaacaccggcgttattaccacaccctgatcaagaaagacctcaacatggttgtgtcagcagcccggatctcctgtggtggtgcaattcgatctcagaagggagtgagtgttgctaaagttaaagtggcatccattgaaattggcccagtttctgggcagataatgcatgcagttggtgaagaaggaggacatgtcaaatatgtatgcaaaattgaaaattatgatcagtctacccaagtgacttggtactttggtgtccgacagctggagaacagtgagaaatacgaaatcacctacgaagatggagtggccatcctctatgtcaaagacattaccaaattagatgatggtacctacagatgcaaagtagtcaatgactatggtgaagacagttcttatgcagagctatttgttaaaggtgtgagagaagtctatgactattactgccgtagaaccatgaagaaaattaagcgcagaacagacacaatgagactcctggaaaggccaccagaatttaccctgcctctctataataagacagcttatgtaggtgaaaatgtccggtttggagtaactataactgtccacccagagcctcatgtaacatggtataaatcaggtcagaaaatcaaaccaggtgacaatgacaagaagtacacatttgagtcagacaagggtctttaccaattaacaatcaacagtgtcactacagatgatgacgctgaatatactgttgtggcaaggaacaaatatggtgaagacagctgtaaagcaaagctgacagtaaccctacacccacctccaacagatagtaccttaagacccatgttcaaaaggttactggcaaatgcagaatgccaagaaggccaaagtgtctgctttgagatcagagtgtctggcatccccccaccaacattaaaatgggagaaagatggtcagccactgtccctcgggcctaacattgaaattatccatgaaggcttggattattatgctctgcacatcagggacactttgcctgaagacacgggttattatagagtcacagccactaacacagctgggtccaccagctgccaggctcacctacaagtggaacgcctgaggtacaagaaacaggaattcaagagtaaggaggagcatgagcgacacgtacaaaaacaaattgacaaaaccctcagaatggctgaaattctttctggaactgaaagtgtaccactgacacaggtagctaaagaggctctgagagaagctgctgtcctttataaaccggctgtaagcaccaagactgtaaaaggggaattcagacttgagatagaagaaaagaaggaggagagaaaactccggatgccttatgatgtaccagagccacgcaagtataagcagactaccatagaagaagaccaacgcatcaagcagttcgtgcccatgtctgacatgaagtggtataaaaagatacgtgatcagtatgaaatgcctgggaaacttgacagagttgtacagaaacgacccaagcgcatccgcctttcaagatgggaacagttctatgtgatgcctcttccacgcattacagatcaatacagacctaaatggcgtattcctaaactgtcccaagatgatcttgagatagtgagaccagcccgccggcgtacaccttctcctgattatgacttttactaccgacctagaagacgttctcttggggacatctctgatgaagaattactcctccccattgatgactacttagcaatgaaaagaacagaggaagagaggctgcgtcttgaagaagagcttgagttaggtttttcagcttcacccccaagtcgaagccctccacactttgagctttctagcctacgttactcttcaccacaagctcatgtcaaggtggaggaaacaagaaaaaacttcaggtattcaacctatcacatcccaacgaaggctgaagctagtacaagttatgcagaactgagggaacggcatgcccaggctgcgtacagacagccaaagcaacggcaaagaatcatggctgagagggaggatgaagagttgcttcgcccagttacgaccacccagcatctctcagaatacaaaagcgaacttgacttcatgtcaaaggaggaaaagtctagaaagaaatcaaggcgacaaagagaagtgacagaaataacagaaattgaggaagaatacgaaatctcaaaacatgctcaaagagaatcatcctcatctgcgtctagactactgagacgacggcgctccctgtctccaacttatattgagttaatgaggccagtgtctgagctgatccggtcacgtccacaaccggctgaggaatacgaagatgacacagaaagaaggtcacctactccagagagaactcgcccacgatcccccagccctgtgtctagtgagagatcactctcgagatttgagaggtctgcaagatttgatatcttttccaggtatgagtccatgaaagctgctttaaaaactcagaagacatcagaaaggaagtatgaagttttgagtcagcagcctttcacactggaccatgcccctcgaatcacactgagaatgcgctcgcacagggtaccatgtggccaaaatacacgttttattttaaatgttcagtctaagccaactgccgaagttaaatggtaccacaatggtgtggaactccaagaaagcagtaagattcattacaccaacacgagtggagttctcaccctggaaattctggactgtcatactgatgacagtggaacctaccgtgctgtgtgcaccaactacaagggcgaacgttctgactatgcaacgttggacgtgacaggaggggattataccacctatgcttcccaacgcagagatgaagaggtccccagatctgttttccctgagctgacaagaacagaggcgtatgctgttccatcatttaagaaaacatctgagatggaagcttcgtcttctgtcagggaagtgaaatcacagatgacggagacaagggaaagtctctcctcatatgaacactctgcatctgcagaaatgaaaagtgctgcattagaagaaaagtcactggaagaaaaatccacaaccagaaagatcaagacgactttggcggcaagaattctaacaaagccacggtccatgaccgtctacgagggcgagtctgcaaggttttcttgtgacaccgatggtgagccggtaccaactgtgacctggctgcgtaaaggacgagtgctaagtacttctgcccgccaccaagtgaccaccacaaagtacaaatcaacctttgagatctcttcagtccaggcttccgatgagggcaattacagcgtggtggtagaaaacagtgaagggaaacaagaagcagagttcactctgactattcaaaaggccagggtaactgaaaaggctgtgacatcaccaccaagagtcaaatccccagagcctcgggtgaaatccccagaagcagttaagtctccaaaacgagtgaaatctccagaaccttctcacccgaaagccgtatcacccacagagacaaaaccaacaccaatagagaaagttcagcacctcccagtctctgccccaccaaagattactcagttcctgaaagcagaagcttctaaagagattgcaaaactgacctgtgtggttgaaagcagtgtattaagggcaaaagaggtcacctggtataaagatggcaagaaactgaaggaaaatgggcatttccagtttcattattcagcagatggtacctatgagctcaaaatcaataacctcactgaatctgatcaaggagaatatgtttgtgagatttctggtgaaggtggaacgtctaaaaccaacttacaatttatggggcaagcctttaagagtatccatgagaaggtatcaaaaatatcagaaactaagaaatcagatcagaaaaccactgagtcaacagtaaccagaaaaactgaaccaaaagctcctgaaccaatttcctcaaaaccagtaattgttactgggttgcaggatacaactgtttcttcagacagtgttgctaaatttgcagttaaggctactggagaaccccggccaactgccatctggacaaaagatggaaaggccattacacaaggaggtaaatataaactctctgaagacaagggagggttcttcttagaaattcataagactgatacttctgacagtggactttatacttgtacagtaaaaaattcagctggatctgtgtcctctagctgcaaattaacaataaaagctataaaagatactgaggcacagaaagtctctacacaaaagacttctgaaattacacctcagaagaaagctgttgtccaagaggaaatttcccaaaaagccctaaggtctgaagaaattaagatgtcagaggcaaaatctcaagaaaagttagccctcaaagaggaagcttcaaaggttctgatttctgaagaagtcaagaaatcagcagcaacctccctggaaaaatccattgtccatgaggaaatcactaaaacatcacaggcatcagaagaagtcagaactcatgctgagattaaagcattttctactcagatgagcataaacgaaggtcaaagactggttttaaaagccaacattgctggtgccactgatgtgaaatgggtactgaatggcgtagagcttaccaactctgaggagtaccgatatggtgtctcaggcagcgatcagaccctaaccatcaagcaagccagtcacagagatgaaggaatcctcacctgcataagcaaaaccaaggaaggaatcgtcaagtgtcagtatgatttgacactgagcaaagaactctcagatgctccagccttcatctcacagcctagatctcaaaatattaatgaaggacaaaatgttctctttactcgtgaaatcagtggcgagccatcccctgaaatcgaatggtttaaaaacaacctgccaatttctatttcttcaaatgtcagcataagccgctccagaaatgtatactcccttgaaatccgaaatgcatcagtcagcgacagtggaaagtacacaattaaggccaaaaatttccgtggccagtgttcagctacagcttccttaatggtccttcctctagttgaagaaccttccagagaggtagtattgagaacaagtggtgacacaagcttgcaaggaagcttctcgtctcagtcagtccaaatgtctgcctccaagcaggaggcctccttcagcagtttcagcagcagcagtgctagcagcatgactgagatgaaatttgcaagcatgtctgcccaaagcatgtcctccatgcaagagtcctttgtagaaatgagttccagcagctttatgggaatatctaatatgacacaactggaaagctcaactagtaaaatgcttaaagcaggcataagaggaattccgcctaaaattgaagctcttccatctgatatcagcattgatgaaggcaaagttctaacagtagcctgtgctttcacgggtgagcctaccccagaagtaacatggtcctgtggtggaagaaaaatccacagtcaagaacaggggaggttccacattgaaaacacagatgacctgacaaccctgatcatcatggacgtacagaaacaagatggtggactttataccctgagtttagggaatgaatttggatctgactctgccactgtgaatatacatattcgatccatttaagagggcctgtgccttatactctacactcattcttaacttttcgcaaacgtttcacacggactaatctttctgaactgtaaatatttaaagaaaaaaagtagttttgtatcaacctaaatgagtcaaagttcaaaaatattcatttcaatcttttcataattgttgacctaagaatataatacatttgctagtgacatgtacatactgtatatagccggattaacggttataaagttttgtaccatttattttatgacattttacaatgtaagttttgaaactaactgttggtaggagaaagtttcttatggaacgaataccctgctcaacatttaatcaatctttgtgcctcaacatactgttgatgtctaagtatgcctcagtgggttgagaaaatccccattgaagatgtcctgtccacctaaaagagaatgatgctgtgcatatcacttgatatgtgcaccaatacctactgaatcagaaatgtaaggcattggtgatgtttgcatttaccctcctgtaagcaacactttaacgtcttacattttctctgatgatgtcacacaaaattatcatgacaaatattaccagagcaaagtgtaacggccaacactttgttcgctcattttacgctgtctctgacataaggagtgcctgaatagcttggaaaagtaacatctcctggccatcccttcatttaaccaagctattcaagtattcctatgccagagcagtgccaactcttggaggtcccagagtgcagccaatgcctttgtgtggtagttctaaattttaattgcacctgaaaaacctgggcacctaagcaatgagccacagcaaaaagtaaagaacaacaacaaaataaagctgttgttaaattttaaacaatattactaattgcccaaaatgtcaatttgatgtagttcttttcatgcaagtataaattcaattgttagttataattgttggacctccttgagatagtaacaacaaaataaagcaagctatctgcacctcaaaaaaaaaaaaaaa

SEQ ID NO: 2094 - DNA, 1039 bp, Homo Sapiens
  misc_feature (313)..(313): n is a, c, g, or t
  misc_feature (481)..(481): n is a, c, g, or t
  misc_feature (1005)..(1005): n is a, c, g, or t
  misc_feature (1027)..(1027): n is a, c, g, or t
  misc_feature (1029)..(1029): n is a, c, g, or t
tttttttttttttttttttatatccatatctttatttaaacaagtttccataatagctaggagaatacagcattaatgacacacatttactaagcacaacaatggacaactacaaatttagagcataaatgtaattctgatattgttttggtttttatcttagcactaggtgatatctagtgaaaacccatgtttcaaaggcttttgttgatatgagatgaattattaacttatttttaaaaattgcacgtgagatatgctagaatgggttctagagtctagagttagttgataatgcctttcatgtctcagnatttctgcttcctttttaatgggtaaatgtttcacctaagaactttcaaaaaattgtatcaaaattttctatgcagatcaaagtagaattccttttccagacccaacaaggaaaaatatttgaaaactgcaatgttcaattccattttagttaaaaaggtgtccattncatagtaaattaatacagttaataattaaaataccatatgttaaatgcatgaactcatttttgcgcacactgttagcgcattttaaattcccaagacacaaaaagtcattttacctgagatcccacaaaataccatacccggatctaatttccacattttttcccatttaagaaaaaattcccatggtgggaaaaataaggctcaatgattaggggcctaaatgggctaaatttttacatgataccataaatttgaacggtgctttgaaaggctaaatttctacctcgcaggcctatttatatccgttcactaaaaaactttttttttaaattaaagcttacatggggagaggttttttgatccacgccctttgtagctaacttttagccacatcacaaaaagttaagctttgagattttaaattttgccccggggcggatcggatagccggcaccgctttttatattttttgtaaaaaaaaaatgtatgtttttgaaattttccccccccccaaccggggggngccggttttttaaaaagggggngnccagcacata

SEQ ID NO: 2095 - DNA, 383 bp, Homo Sapiens
tttttttttttttttttttttttttttttttttttttaaaagcttttggatgatttttattgatttcatgccattattaaggttaataccctcaaaatctccataggcagtagtagcccaacccaggccctgcagggcccagtcttggcgactttcacattccaagaaacttggtttaaaaatcaaaggtaatttaaaagttatttgaatctttactggcattgcttgaaaaatattaaaaagaattcaacttgtaacctataatggtagtcttaaatcctccttggccccattcttcttcttttttccccccttttcttttttcccttcattcctcttgcttcagtatgtccatggctgacttaaagcccccctttcaaaat

SEQ ID NO: 2096 - DNA, 175 bp, Homo Sapiens
tcagtgcaggtcgggctggcctcacgcatttcgcttggatgcctaaatctgtctccacgtggggccggtcgataaaacaacacttcccagaatacgctgcgatccattcgcggtctgcacccggaaagtacacctcccaggggtctgtgcgcgcctccagggaacgggtcttgtg

SEQ ID NO: 2097 - DNA, 160 bp, Homo Sapiens
  misc_feature (41)..(41): n is a, c, g, or t
  misc_feature (68)..(68): n is a, c, g, or t
cagctacgagactgagagaaaggaatgaaaggatggaaganttacaagatcaggcactgctgtctgtntgttccacggatgtaaccacagcacacgcgtggctcacggtactagtgtgataaatgcttgttacatgaagggggcaggagtaaagtggaca

SEQ ID NO: 2098 - DNA, 778 bp, Homo Sapiens
tctctcctaggaccaggagctggagagcctgtcggccattgaggcagagctggagaaagtggcccaccagctgcaggcactacggcggggctgagacaccggctggcagggctggccccagggcaccctgtggccctggctctgctgtccccttggcaggtcctggccagatggcccggacgctgcttccggtagggaggcagcctccagcctgcccaagcccaggccaccctatcgccccctacgcgccttgtctcctactcctgactcctacctgccctggaacatcctttgcagggcagccccacaactttaaacattgacgattccttctctgaacacaggcagctttctagaagtttcccttcctccatcctatccactgggcacaactgcaataacttctgaccttttggtgaaagctgagaactcctgactgtaacatattctgtatgaactttatctaaagaaaaataaatctgttctgggctctttcctctgaattttttcgcctctcaagagtggagtgagatgcactggatttgggcgaagggacaaagggaggttcagtcctcctggggacctcctttctgggccacttcctggctgtgggatcttgagcaagtgactttgttagctctgagcctcagtttcctcatctgtaaaacgggaatgctgacctgcctcaaagagtgtgtgcagggattaaagcacacttgctgagggcctccaggttccttcctctcccgtcccagccacacctgagctgggccatgca

SEQ ID NO: 2099 - DNA, 5190 bp, Homo Sapiens
ggaattcccgcgaggccggggtgggccaggctgtggggacgacgggctgcgacgatggccgcagcggcgggcggcggcgggccggggacagcggtaggcgccacgggcttcggggattcggcggcagccgcaggcctagctgtttatcgacggaaggatgggggcccggccaccaagttttgggagagcccggagacggtgtcccagctggattcggtgcgggtctggctgggcaagcactacaagaagtatgttcatgcggatgctcctaccaataaaacactggctgggctggtggtgcagcttcttcagttccaggaagatgcctttgggaagcatgtcaccaacccggccttcaccaaactccctgcaaagtgtttcatggatttcaaagctggaggcgccttatgtcacattcttggggctgcttacaagtataaaaatgaacagggatggcggaggtttgacctacagaacccatctcgaatggatcgtaatgtggaaatgtttatgaacattgaaaaaacattggtgcagaacaattgtttgaccagacccaacatctacctcattccagacattgatctgaagttggctaacaaattgaaagatatcatcaaacgacatcagggaacatttacggatgagaagtcaaaagcttcccaccacatttacccatattcttcctcacaagacgatgaagaatggttgagaccggtgatgagaaaagagaagcaagtgttagtgcattggggcttttacccagacagctatgatacttgggtccatagtaatgatgttgatgctgaaattgaagatccaccaattccagaaaaaccatggaaggttcatgtgaaatggattttggacactgatattttcaatgaatggatgaatgaggaggattatgaggtggatgaaaataggaagcctgtgagttttcgtcagcggatttcaaccaagaatgaagagccagtcagaagtccagaaagaagagatagaaaagcatcagctaatgctcgaaagaggaaacattcgccttcgcctccccctccgacaccaacagaatcacggaagaagagtgggaagaaaggccaagctagcctttatgggaagcgcagaagtcagaaagaggaagatgagcaagaagatctaaccaaggatatggaagacccaacacctgtacccaatatagaagaagtagtacttcccaaaaatgtgaacctaaagaaagatagtgaaaatacacctgttaaaggaggaactgtagcggatctagatgagcaggatgaagaaacagtcacagcaggaggaaaggaagatgaagatcctgccaaaggtgatcagagtcgatcagttgaccttggggaagataatgtgacagagcagaccaatcacattattattcctagttatgcatcatggtttgattataactgtattcatgtgattgaacggcgtgctcttcctgagttcttcaatggaaaaaacaaatccaagactccagaaatatacttggcatatcgaaattttatgattgacagctatcgtctaaacccccaagagtatttaactagcactgcttgtcggaggaacttgactggagatgtgtgtgctgtgatgagggtccatgccgggggagagcagtggggactcgttaattaccaagttgacccggaaagtagacccatggcaatgggacctcctcctactcctcattttaatgtattagctgatacccctctggcttgtgcctctgatcttcgatcacctcaggttcctgctgctcaacagatgctaaattttcctgagaaaaacaaggaaaaaccagttgatttgcagaactttggtctccgtactgacatttactccaagaaaacattagcaaagagtaaaggtgctagtgctggaagaggatggactgaacaggagacccttctactcctggaggccctggagatgtacaaggatgattggaacaaagtgtcggaacatgttggaagtcgtactcaggatgaatgcatcctccactttttgagacttcccattgaggacccataccttgagaattcagatgcttcccttgggcctttggcctaccagcctgtccccttcagtcagtcaggaaatccagttatgagtactgttgcttttttggcatctgtggtggaccctcgcgtggcatctgctgcagcaaaagcggctttggaggagttttctcgggtccgggaggaggtaccactggaattggttgaagctcatgtcaagaaagtacaagaagcagcacgagcctctgggaaagtggatcccacctacggtctggagagcagctgcattgcaggcacagggcccgatgagccagagaagcttgaaggagctgaagaggaaaaaatggaagccgaccctgatggtcagcagcctgaaaaggcagaaaataaagtggaaaatgaaacggatgaaggtgataaagcacaagatggagaaaatgaaaaaaatagtgaaaaggaacaggatagtgaagtgagtgaggataccaaatcagaagaaaaggagactgaagagaacaaagaactcagtagtacatgtaaagaaagagaaagtgatactgggaagaagaaagtagaacatgaaatttccgaaggaaatgttgccacagccgcagcagctgctcttgcctcagcggctaccaaagccaagcacctggctgcagtggaagaaagaaagatcaagtccctggtagctctcttggttgagacacaaatgaagaaactagagatcaaacttcgacattttgaagggctggaaactatcatggacagagagaaagaagctctagaacaacagaggcagcagttgcttactgaacgccaaaacttccacatggaacagctgaagtatgctgaattacgagcacgacagcaaatggaacagcagcagcatggccagaaccctcaacaggcacaccagcactcaggaggacctggcctggccccacttggagcagcagggcaccctggcatgatgcctcatcaacagccccctccctaccctctgatgcaccaccagatgccaccacctcatccaccccagccaggtcagataccaggcccaggttccatgatgcccgggcagcacatgccaggccgcatgattcccactgttgcagccaacatccacccctctgggagtggccctacccctcctggcatgccaccaatgccaggaaacatcttaggaccccgggtacccctgacagcacctaacggcatgtatccccctccaccacagcagcagccaccgccaccaccacctgcagatggggtccctccgcctcctgctcctggcccgccagcctcagctgctccttagcctggaagatgcagggaacctccacgcccaccaccatgagctggagtggggatgacaagacttgtgttcctcaactttcttgggtttctttcaggatttttcttctcacagctccaagcacgtgtcccgtgcctccccactcctcttaccacccctctctctgacactttttgtgttgggtcctcagccaacactcaaggggaaacctgtagtgacagtgtgccctggtcatccttaaaataacctgcatctcccctgtcctggtgtgggagtaagctgacagtttctctgcaggtcctgtcaactttagcatgctatgtctttaccattttctctcttccagttttttgctttgtcttatgcttctatggataatgctatataatcattatctttttatctttctgttattattgttttaaaggagagcatcctaagttaataggaaccaaaaaataatgatgggcagaagggggggaatagccacaggggacaaaccttaaggcattataagtgaccttatttctgcttttctgagctaagaatggtgctgatggtaaagtttgagacttttgccacacacaaatttgtgaaaattaaacgagatgtggaaggagaacctcagtgattttattccctagtgaggcctctgagggcctccacactgcctggcagaacataccactgaactagtatgtgctagaggagggcacaaacatccgctccttccctaggcctgctggctctggttttctatgcagatgattcattggattgggggtgagtgttttgtttttctgggggcagtgtgagctttgagggttggaatattgggaggcattccttagtttcctcaactagcctggaaagttaggagtctagggtaattaccccccaatgagtctagcctactattcactgctttgtgtgcatttttttctccctctttaaaaaaccctttaaaagaaaaaaaaaagtagatagtgctaaatatttagctcatgaaacttggttaggatggctgggggtacaagtccccaaactacctcttgttacagtagccagggagtggaatttcgtcaaccggtacttttaaggttaggatgggacgggaaaagtgaagcaggatattagctccttataccttctcccttccatttctgagatctcacattccatctatcacagggttttcaaagagatgctgagggtaacaaggaactcacttggcagtcagagcatcatgctttgaggtttggggtgctcaggctgggagggtagaatgccattccagaggacaagccacaaaaatgccttaatttgagctcgtatttacccctgctgataagtgacttgagagttcccggttttttcctcttgtccttccctcccttctgtccttccatgtgtggggaaagggtgtttttggtagagcttggtttccaaagcgcctggctttctcacttcacattctcaagtggcagtttcattatttagaatgcaaggtggacatcttttggatatctttttctatatatttctaaagctttacatatgagagggtatagggaggtgtttataaaacacttgagaacttttttccttaatatcagaaagcaaaaaaataaaaccacaattgagatttgcctttcaaaccctcaggtttgcctctaaccaggtgtccctggtcaccatcagagtactggaatacgggaaccgaggaggaccttggtccttttgtttttgttctggactcttgggagtggaaatgggatgagtttatccactggagcttaagtcccatgcatttgctccagaaag

SEQ ID NO: 2100 - DNA, 4018 bp, Homo Sapiens
  misc_feature (3525)..(3525): n is a, c, g, or t
  misc_feature (3668)..(3668): n is a, c, g, or t
  misc_feature (3681)..(3681): n is a, c, g, or t
gatgcggctgtggtggcggcggcggcggccgagcgcgggtggcggctgtggcggcggaggggggcgcgggccggcgatggcgcggcggccctgagggcgcggggcgggcggcggccggagggcgggcggcgcgggaggaagcggcggcggtggctccatggcccgggcgcgctgagggacccggcgctcgcctcagcccggcggcggcggcggccgaacaatgaagctcctgaagccgacctgggtcaaccacaatggcaagccgattttttcagttgatattcaccctgacgggaccaagttcgcaactggaggacaagggcaggattctgggaaggttgtgatctggaatatgtctccagtcctccaggaggatgacgagaaggatgaaaatattcccaagatgctttgccagatggacaatcacttagcatgtgtgaactgtgtgcggtggtcaaacagtgggatgtatttagcttctgggggagatgacaaactgattatggtgtggaagcgggctacgtacatcggccccagcaccgtgttcggctccagtggtaagcttgccaatgtggagcagtggcggtgtgtctctatcctccggaatcattcaggcgatgtgatggatgtagcatggtctccccacgatgcctggctagcctcatgcagcgtggataacactgtcgtcatctggaatgctgtaaagttcccagaaattctagctactctgagaggtcattctggcttggtcaaagggttgacatgggaccctgttggtaaatacatagcttctcaagctgatgaccgcagcctaaaggtgtggaggacgctggactggcagttggagaccagcatcaccaagccttttgatgagtgtggaggaacgacccatgtgttgcggctcagctggtcacctgatgggcattacctggtgtctgcccatgccatgaacaactcaggccccactgcccagatcatcgaacgggagggatggaagaccaacatggactttgttgggcaccggaaagctgtgactgtcgtgaaattcaacccaaaaatcttcaaaaagaagcagaagaatgggagttctgcgaagcctagctgcccgtactgctgctgtgctgttggcagcaaggaccgctcgctttctgtctggctcacatgtctgaaacggccgctggtggtcatccatgaactgtttgacaaatccatcatggatatttcctggactctgaatgggctgggcatcttggtatgctctatggacggctctgtggcattcctcgacttctcccaggatgagcttggcgatcccctgagcgaggaggagaagagccgcattcaccagtccacctatggcaagagcctagccatcatgaccgaggcccagctctccacagccgtcattgagaaccctgagatgctcaagtaccagcgaaggcagcagcagcagcagctggaccagaagagtgctgcgaccagggagatgggctcagccacctcagtcgcaggcgttgtcaacggggagagtcttgaagatatcaggaagaatcttttgaagaaacaagttgagactcggacagcagatggccggagaagaatcacgcctctctgcatagcacagctggacactggggacttctccacggcattctttaacagcatccccctctcgggctccctggcgggcaccatgctctcttctcatagcagtccacagctactgccactggactccagtacccctaactccttcggcgcctcgaagccttgcacagagcctgtggtggctgccagtgccagacctgcaggcgattctgtcaataaagacagtatgaatgctacctctactcctgctgcattgtcaccttctgtgttaacgaccccgtccaagatcgaacccatgaaagcgtttgactcccggttcacagagcggtccaaagccacaccaggtgctcctgccctgaccagcatgactccgacagctgtggaaaggttaaaagagcagaaccttgtgaaagagctgaggccccgagacctcctggagagcagcagtgacagcgatgagaaagtccctttggctaaggcttcctcactgtccaagcgaaaacttgagcttgaggtagagacagtagagaagaagaagaaagggcggcctcggaaggactctcgtctcatgcctgtgtctctgtctgtccagtctccagctgccctaaccgcagagaaggaggccatgtgtctgtctgcaccagcacttgcactgaagctgccaattccaagcccccagagagcattcaccctccaggtcagctccgatccttccatgtacattgaggtggagaatgaagtgacagtggtggggggcgtgaagctgagccgcctgaagtgcaaccgggaagggaaggagtgggagacggtactcaccagccggatcctcactgctgcgggcagctgtgacgtggtgtgtgtcgcctgtgaaaaaaggatgctgtcagtgttctccacctgtggtcgccgtctcctctctcccatcctcctgccatccccgatctctactttgcattgcacaggctcctacgtcatggcgctcaccgctgcagccacactctctgtctgggatgttcacagacaggtggttgtggtgaaagaagagtctctgcactccatcctggcaggaagtgatatgacggtatcacagatcttgctgacgcagcatggaatcccagtaatgaacctgtccgatgggaaggcgtactgctttaatccgtcactttccacatggaacctggtttctgacaagcaggactcactggctcagtgtgcagactttaggagcagcctgccatcccaggacgccatgctgtgctcaggaccgttagccataaaccagggccgcacctccaactcgggaaggcaggctgcccggctcttctccgtgcctcatgtggtgcagcaagagaccaccctggcctacctagagaaccaggtggcagcagcactcaccctgcagtccagccacgagtaccgccattggctcctcgtctacgcacggtacctcgtaaacgaagggtttgaataccgacttcgagaaatatgcaaggacttactgggtccggttcactactccactggaagccagtgggagtcaacagtagtgggtctgcggaagagggagctgctgaaggagctgctaccagtcatcgggcagaacctccgattccagcgcctcttcaccgagtgtcaggaacagctcgacatcctgagggacaagtagcctgccccagcctgccctggctgcagcaagggcagggccacactctcgccgctgatgacatgcaggaccgcctctcacctgaccaggctgtagggggaggagacactggcaggagatgtgctgtcctgcaccagcgccagcccagctccctgggcagatgtgccctgtgtcctgggtctgacattgcctcaggagggggaagctcatccctccctccaagcccccgatgcggagctagggctggagctctngccaggtgccctggggccagcaaggcagtcccaggcctgccgtctccagcacggccccaaggtggacactagcccctgctgctgcaggcgccatgctgcttcagcagtgacgattgagccatttgtgagacagaatccggaancgttaaggtattnacagcagactgacctaagacctatgtaacaaggaaaagctgttccaacacacggactatttttgtactaagaatttgctaacttgtaatattgaatttcctttggccgataatcaggatttccctataagtcacttggacattggtcacttgtaggaaatttaaactctaattatgacagctacactgaaaaataattgtactgaaattaacttgtctatcttcatttggttttaatttttaaatgtttgtaaaaagagactgttttgggggaatggggcaaaggggtgggcgatttcttttgtaagtgtaaaataaatgaacacgcattgaatacc

SEQ ID NO: 2101 - DNA, 353 bp, Homo Sapiens
taatgttttacttatatatgatttgttaatgtatgtcttttcccactagaaaccgaattctatgacagcaagggtttttgttttcattattgtcatattacctgtgcctggcatgtgataagccctaagtacttgttgactgaattaacatatgagatctgtgagtctgaaaaaagaagtacatcattccttcacatgtcattttgagccactgttaacagattacataactgttattggaagtgcctcactactccatttggaaagtattcctgggaatacacggtgaatgactcagtagaagttctggctatgggggagtgccatcaataaataaaaattattaccatgcc

SEQ ID NO: 2102 - DNA, 1403 bp, Homo Sapiens
ctaaagccgcaggcgccgcggtaccctggctgtggccctcggcgctttcttcctagggtcacaggacccatacgagtgggagctccctgggagcagaactgcgtcttgtatcacctggcgcggtgaacgtgggggttgaaacgctccacgcggaaggtagagggcaggggccaagggggcgatcctggtggctgcgctttttgctatttgctgccgacggcatgcagacgagatgcaaataagcttatgaaactgtccgtcctaccccatcgctccctcctcgcccccaacaccgtgttgtgctgcccaccagactcggagaagccgcggctgtctccggaaccctccgagcggcgccctcaggccgccgccaaaaagctccgcaagccgaggaccatctactccagcctgcagctgcagcacctaaaccagcgtttccagcacacgcagtacctggcgctgcccgagagggcccagctggcagcgcagctcggcctcacccagacccaggtaaagatctggtttcagaacaaacgctccaagtataagaagctcctgaagcagaattctgggggccaggaaggggacttccctgggaggaccttctctgtgtctccctgctccccacccctcccctacctctgggatctacccaaggcagggaccctgcccaccagtggctatggcaacagctttggaccctggtatcagcatcactcctcagatgtcctgtcgcctcagatgatgtgaatctggggaagggcgggtcaggcccacagccttcctgcaaagcccaggacccaggcagtccacctgcaccccttctgggctgggaggaaaccagctccagatgggttttctctggaggacaagcagttagaggagaaaaggggaatggagcagagcctgtacccctaaccctagcagctaaatcaaggacctcagccttatataatcattgtccccaccactaccatggactggacaccttcactccagctggacaaagactctggagagagagccattggctggagttgagactgtccccagaacccttggtcttgccactcccccactccttcttccctctctccctttctcctctccctgctttcttgaaaaggactgaatcgccactacagcctgggtgcaaaatcagcaagaaacattgagtatttttttttctttgtatgcctttggccttgcacaacccatttgtgagcaaaagcagaagtggaccaccatcagctcccacccacccagcgatttttccttggaggtcagcccgttacccccataactgatttacctacttaccatactgggaggtagaagagatgcagagaaatgtggaatttgtggacctatgggtaatttatgctttcctcctaaaaaaaaaa

SEQ ID NO: 2103 - DNA, 305 bp, Homo Sapiens
  misc_feature (224)..(224): n is a, c, g, or t
  misc_feature (241)..(241): n is a, c, g, or t
  misc_feature (246)..(246): n is a, c, g, or t
  misc_feature (255)..(255): n is a, c, g, or t
  misc_feature (275)..(275): n is a, c, g, or t
aaatgaaagcaccataaaaattaactttgtcatttaaaatatattgtatttcagtttagtttaacaattattgtatgaatttacttttaggatctctgatttggatatgtctcatatatttttatacctaaacacttgcttttcatttcccacccattgcacagtatttagaaaatataggtaagcaaatttaagtagtaattcccaaaacaataataaccaangacaagtcagaattaangtttngacgtgtanctttccagtctttcatctangcctatttttggggcttacccgctttttat

SEQ ID NO: 2104 - DNA, 450 bp, Homo Sapiens
  misc_feature (433)..(433): n is a, c, g, or t
ggcacgagtgcggagggagtggaacctcgatattggtggtgtccatcgtgggcagcggactaataaaggccatggcgccagcagaaatcctgaacgggaaggagatctccgcgcaaataagggcgagactgaaaaatcaagtcactcagttgaaggagcaagtacctggtttcacaccacgcctggcaatattacaggttggcaacagagatgattccaatctttatataaatgtgaagctgaaggctgctgaagagattgggatcaaagccactcacattaagttaccaagaacaaccacagaatctgaggtgatgaagtacattacatctttgaatgaagactctactgtacatgggttcttagtgcagctacctttagattcagagaattccattaacactgaagaagtgatcaatgctattgccccganaaggatgtggatggatt

SEQ ID NO: 2105 - DNA, 1970 bp, Homo Sapiens
aggaaacggtttattaggagggagtggtggagctgggccaggcaggaagacgctggaataagaaacatttttgctccagcccccatcccagtcccgggaggctgccgcgccagctgcgccgagcgagcccctccccggctccagcccggtccggggccgcgccggaccccagcccgccgtccagcgctggcggtgcaactgcggccgcgcggtggaggggaggtggccccggtccgccgaaggctagcgccccgccacccgcagagcgggcccagagggaccatgaccttgggctcccccaggaaaggccttctgatgctgctgatggccttggtgacccagggagaccctgtgaagccgtctcggggcccgctggtgacctgcacgtgtgagagcccacattgcaaggggcctacctgccggggggcctggtgcacagtagtgctggtgcgggaggaggggaggcacccccaggaacatcggggctgcgggaacttgcacagggagctctgcagggggcgccccaccgagttcgtcaaccactactgctgcgacagccacctctgcaaccacaacgtgtccctggtgctggaggccacccaacctccttcggagcagccgggaacagatggccagctggccctgatcctgggccccgtgctggccttgctggccctggtggccctgggtgtcctgggcctgtggcatgtccgacggaggcaggagaagcagcgtggcctgcacagcgagctgggagagtccagtctcatcctgaaagcatctgagcagggcgacacgatgttgggggacctcctggacagtgactgcaccacagggagtggctcagggctccccttcctggtgcagaggacagtggcacggcaggttgccttggtggagtgtgtgggaaaaggccgctatggcgaagtgtggcggggcttgtggcacggtgagagtgtggccgtcaagatcttctcctcgagggatgaacagtcctggttccgggagactgagatctataacacagtattgctcagacacgacaacatcctaggcttcatcgcctcagacatgacctcccgcaactcgagcacgcagctgtggctcatcacgcactaccacgagcacggctccctctacgactttctgcagagacagacgctggagccccatctggctctgaggctagctgtgtccgcggcatgcggcctggcgcacctgcacgtggagatcttcggtacacagggcaaaccagccattgcccaccgcgacttcaagagccgcaatgtgctggtcaagagcaacctgcagtgttgcatcgccgacctgggcctggctgtgatgcactcacagggcagcgattacctggacatcggcaacaacccgagagtgggcaccaagcggtacatggcacccgaggtgctggacgagcagatccgcacggactgctttgagtcctacaagtggactgacatctgggcctttggcctggtgctgtgggagattgcccgccggaccatcgtgaatggcatcgtggaggactatagaccacccttctatgatgtggtgcccaatgaccccagctttgaggacatgaagaaggtggtgtgtgtggatcagcagacccccaccatccctaaccggctggctgcagacccggtcctctcaggcctagctcagatgatgcgggagtgctggtacccaaacccctctgcccgactcaccgcgctgcggatcaagaagacactacaaaaaattagcaacagtccagagaagcctaaagtgattcaatagcccaggagcacctgattcctttctgcctgcagggggctgggggggtggggggcagtggatggtgccctatctgggtagaggtagtgtgagtgtggtgtgtgctggggatgggcagctgcgcctgcctgctcggcccccagcccacccagccaaaaatacagctgggctgaaacctg

SEQ ID NO: 2106 - DNA, 4011 bp, Homo Sapiens
ggcgggcacccgcgcgcgcacactcgcacaccgcacctcagctcctgcccggcctcgcccccacccgcgagcgccgaacctcctggggccggatgccatgggtaacaacttctccagtatcccctcgctgccccgaggaaacccgagccgcgcgccgcggggccacccccagaacctcaaagactctatcgggggccccttccccgtcacttctcaccgatgccaccacaagcagaagcactgtccggcagtgctgcccagcggggggctcccagccgcgccgctgctcttccacccgcacaccaagggctcccagatcctcatggacctcagccacaaggctgtcaagaggcaggccagcttctgcaacgccatcaccttcagcaaccgcccggtcctcatctacgagcaagtcaggctgaagatcaccaagaagcagtgctgctggagcggggccctgcggctgggcttcaccagcaaggacccgtcccgcatccaccctgactcgctgcccaagtacgcctgccccgacctggtgtcccagagtggcttctgggccaaggcgctgcctgaggagtttgccaatgagggcaacatcatcgcattctgggtggacaagaagggccgtgtcttccaccgcatcaacgactcggctgttatgctgttcttcagcggggtccgcacggccgacccgctctgggccctggtggacgtctacggcctcacgcggggcgtccagctgcttgatagcgagctggtgctcccggactgtctgcggccgcgctccttcaccgccctgcggcggccgtcgctgcggcgcgaggcggacgacgcgcgcctctcggtgagcctatgcgacctcaacgtgccgggcgcggacggcgacgaggccgcgccggccgccagctgccccatcccgcagaactcactcaactcgcagcacagccgcgcgctgccggcgcagctcgacggcgacctgcgtttccacgccctgcgcgccggcgcgcacgtccgcatcctcgacgagcagacggtggcgcgcgtggagcacgggcgcgacgagcgcgcgctcgtcttcaccagccggcccgtgcgcgtggccgagaccatcttcgtcaaggtcacgcgctcgggtggcgcgcggcccggcgcgctgtcgttcggcgtcaccacgtgcgaccccggcacgctgcggccggccgacctgcccttcagccctgaggccctggtggaccgcaaggaattctgggccgtgtgccgcgtgcccgggcccctgcacagcggcgacatcctgggcctggtggtcaacgccgacggcgagctgcacctcagccacaatggcgcggccgccggcatgcagctgtgcgtggacgcctcgcagccgctttggatgctcttcggcctgcacgggaccatcacgcagatccgcatcctcggctccactatcctggccgagcggggtatcccatcactcccctgctcccctgcctccacgccaacctcgcccagtgccctgggcagcggcctgtctgaccccttgctcagcacgtgcagctctggccctctgggtagctctgctggtgggacagcccccaattcgccagtgagcctgcccgagtcgccagtgaccccaggtctgggccagtggagcgatgagtgcaccatttgctatgaacacgcggtggacacggtcatctacacatgtggccacatgtgcctctgctacgcctgtggcctgcgcctcaagaaggctctgcacgcctgctgccccatctgccgccgccccatcaagggcatcatcaagacctaccgcagctcctagcccgttgcggtggcccatcccgcatacccatcttctcgggcttcagcccagtcccagctgaggaacaagccagtggggccccttctcttcctcattttggaaacttttcctcctctattaaacatgggaaactgaagcccttgaaggtttggggagaggggggtatcaggcagggagggggcagaggcaaatcaccgggcagagggaggggaggagaggaggccgcactctccctgtctctcccgtctctgcacccagctcctctctgcatgctgagggctaaattgggatctcagcctgccctaatctttccccatttgaggcaggtttctaggaggtgtctgtagtccatgtggcacctttgtgagaattagaaaacatgtaccttcctctgggcagctgcagccctgagccaggacatgtggcctggctagtgcagcatggagtggattttaggctcatttgccctctcagccaactgcccttgtgcagtgtacagcctgctcaacaaccgccctgggcaggccgctcctgagctgctgtctccctctctgacctatgcctaccttctctttcttcgttccctgcccactgggcatggcagctgggggtgagaggctggtggttgcctcccgtcctgggcaggctgcagcctcatgccatgtctctctcccactacctgatgggcacatggacaggctgcagagggctccaggttctgggcccctggctgagaaggggaggatcctgtcctggctgtagccttcctgccccaatcatctcgctggatgccattgcccaggggtagcccttcggtatgggctggggagaagggttggtcttctgccagggtccctaagaacaggtttgcagctaccctctctgaccttttccccatatcttgtgctgtccagggcctaggctgatagtcagagcctgtggcacacctgggatgggccagggccctgggtggggaggtgtgggttccctgggccaagaccagcctttttactcagtttaattaatttatttatttggtttgtggttttgggttttttttgtttgtttgtttgtaggtgagttcccatcctctgggcccctagaaatgctgcctttgtgtgtggggtacctgggaaagggtgtggctgaggcagtcataatgcagtatcttcccctgactccagccacaaagctcatacccagccctaccaatcatgaattggaactccataaggaggggccaaattgggaggccttttggcaaacagtgtctattttacagagaggcaaaccaagcctccttagtgccctggggctgatggtcacccagagccatagagcacccttcctcctgggccagagctgggttatcatggttggcttaggtacctcaggtggcccaggaggtcccccctccataaggacgtcaaacttctaggagggccagtgttcctagtgtgggccaggaacaggacagggagaccttgtgatggcggggcagggagcctgttcgtagggaagatgaggaggcaagggctgcctctaacacctccaggttctctaagttctggggagggagcgccccacctgctgaggtcggtcctctcagccctgcctgccctggcctgggctctcccagcctcccagccctctgccccctcagatggctttttgtttttgtttttttttgcatccatcagagactgcacctctgtgtggcaggcagggcatgggttttagtcctggccactgaccagctgtgtggccctggccgagtcgtagccccctggagcccagcttccatttctataaaatggttgtttcgggagagaggggcaggctttctgtgtgactcgggagttcttccgtgagggctgccagggggtggtgtgccaggacctcaggctgggcctttgtgctggccttgcagtgggtgtgtggggaagtcactgtcccactatgggtctccactacccagtcactgaccctgggagaccccttctgtgtgggagggagcgggggctggctagcgggccccccagccagggatcccagaggctgagggttggggggaggaagccatcatctcattacctctgtcagtgcaggggtggctgctgcttcccttgtgcacttgggtcgctgtgattgtgaataaaagtgatttcgtaccaaaaaaaaaaaaaaaa

SEQ ID NO: 2107 - DNA, 4508 bp, Homo Sapiens
cgggcagcgtggaccccggatgagttgcttttaggcttgctggcccgcggggctgtccaggcacgcgaggcccctcaggtacgccctctcttccctgcaggatccggccctcaaagacgagggtcacgcacgcgttacaaccccgaaacagtagcacaagatttaatttttaaaagagcgtgtttcttcggggcttgccgttcgttcgtttccagcctcaggaatttatggtcgcctttttgaatgagcaacaaaatgcttcaacaagttccagaaaacataaattttcctgctgaagaagagaaaatcttggagttttggactgaatttaattgttttcaggaatgcttaaagcaatcaaaacataaaccaaaatttaccttctatgatggtcctccttttgcaactggactgcctcactatggacatatacttgcgggtacaattaaagatatagttacaagatatgctcaccagagtgggtttcatgttgacagaagatttggatgggattgccatggcttacctgtggaatatgaaattgataagacactgggaatcagaggaccagaggatgtggccaaaatggggattacagagtataacaatcagtgccgagcaattgtgatgagatattctgctgagtggaagtctactgttagcagacttggccgatggattgactttgacaatgactataaaactctgtatccacaattcatggaatcagtctggtgggtcttcaaacaactctatgataaaggccttgtttatagaggtgtgaaagtcatgcccttctctacggcatgtaacactccactttccaacttcgagtcacaccagaattataaggatgttcaagatccttcagtatttgtaactttccctttggaagaagatgaaactgtatctttagttgcttggacaaccactccctggactctacctagtaaccttgctgtgtgtgttaatccagaaatgcaatatgtgaaaattaaagatgttgccagaggacgattactcattttaatggaagccagattgtcagccctctataaattggagagtgactatgagatccttgaaagatttcctggtgcctatcttaaaggcaagaagtacaggcccctgtttgactatttcctgaagtgtaaagagaatggcgctttcactgtgcttgttgacaactatgtgaaggaagaagaaggcacaggggttgtccaccaagctccttacttcggtgctgaggactatcgggtctgtatggactttaacattattcggaaagactcactccctgtttgccctgtggatgcttcaggctgcttcacaacggaggtgacagatttcgcaggacagtatgtgaaggatgctgacaaaagtatcatcaggactttgaaggaacaaggccgacttctggttgccaccaccttcactcacagctaccctttttgctggagatcagacactcctctaatttacaaagcagtgcccagctggtttgtgcgagtggagaacatggtggaccagctcctaaggaacaatgacctgtgctactgggtcccagagttggtacgagaaaaacgatttggaaattggctgaaagatgcacgtgactggacaatttccagaaacagatactggggcacccccatcccactgtgggtcagcgatgactttgaggaggtggtatgcattgggtcagtggcggaacttgaagaactgtcaggagcaaagatctcagatctccacagagagagtgttgaccacctgaccattccttcacgctgtgggaagggatccttgcaccgcatctctgaagtgtttgactgttggtttgagagtggcagcatgccctatgctcaggttcattacccgtttgaaaacaagagggagtttgaggatgcttttcctgcagatttcattgccgagggcatcgaccaaaccagaggatggttttataccctgctggtgctggccacggccctctttggacaaccgcctttcaagaacgtaattgtgaatgggcttgtcctggcaagtgatggccaaaaaatgagcaaacggaaaaagaattatccagatccagtttccatcatccagaagtatggtgctgatgccctcagattatatctgattaactcccctgtggtgagagcagaaaacctccgctttaaagaagagggtgtgcgggacgtccttaaggatgtactgctcccatggtacaatgcctatcgcttcttaatccagaacgttctgaggctccagaaggaggaagaaatagaatttctctacaatgagaacacggttagagaaagccccaacattacagaccggtggatcctgtccttcatgcagtctctcattggcttctttgagactgaaatggcagcttataggctttatactgtggtgcctcgcctggtcaagtttgtagatattctgaccaattggtatgttagaatgaaccgcagaagattaaagggtgaaaatgggatggaggattgtgtcatggccctagaaaccttgtttagtgttctgctttctctttgcagacttatagctccctacacaccttttctcactgaattgatgtaccagaatctaaaggtgctgattgaccctgtttctgttcaggacaaggacacactcagcattcactacctcatgctgccccgtgttcgagaagaattgattgacaagaaaacagagagtgcagtatctcagatgcagtctgtgattgaacttggaagagtgatcagagaccgaaaaactattcccataaagtatcctttgaaagaaattgtggttatccatcaagatccagaagctcttaaagatatcaagtctttggagaagtatatcattgaggaactcaatgttcgaaaagttacactgtctacagataaaaacaagtatggcattcggctaagggcagaaccagatcacatggtcctggggaagcgtctgaagggagcctttaaggcagtgatgacgtccatcaagcagttgagcagtgaggagctggagcagttccagaagactgggaccattgttgtggaaggccatgaattgcacgatgaagacatccgcctcatgtacacctttgatcaggccacaggtgggactgcgcaatttgaagcacactcagatgctcaggctttggtcctcttagatgtcactcctgaccagtcaatggtagatgaaggaatggctcgggaagtcatcaatcgcatacagaaacttcgcaaaaagtgcaatctggttccaactgatgaaatcacagtgtactataaagcaaagtctgaaggaacatatctgaatagtgttattgaaagccacacagagttcatatttaccaccataaaggctcccttgaaaccatatccagtttctccatcggataaagtccttattcaagaaaaaacacagttgaagggatctgaactggaaattacactcaccagaggatcttcccttcctggtcctgcttgtgcatatgtcaatcttaacatttgtgcaaatggcagtgaacaaggtggagtattgctcctggaaaatccaaaaggtgacaataggttggaccttttaaagctgaagagtgttgtcactagcatttttggtgtgaaaaatacagagctggctgtcttccatgatgaaacagaaatacaaaaccaaactgacttactgagtcttagtggaaaaacactttgtgtgactgcaggatcggctccctctctgatcaacagttctagtactcttctttgtcagtatatcaacctacagctcctgaatgcaaagccacaagagtgtttaatggggacagtgggcactctcctgcttgaaaacccacttgggcagaatggactcacccaccaaggtcttctgtatgaagcagccaaggtgtttggccttcggagcaggaagctaaagctgtttctgaatgagacccaaacgcaggaaattacagaagacatccccgtgaagactttgaatatgaagactgtgtatgtttctgtgttaccaacaacagcagacttctagcatgtacttatcaatgttgttcggtcagcccttccctaattacacctatcccctacacatacatgcacatagacacacacatgaacacactgaagatatttccttcaggtgtgtgtaaaatatgctgcttggattgaaattcaaatgggattgattagtcaagtaacttgagacctcacagtaatcttcacacttaaccttagacacctatgcagtcatgttgggagcaggttacaatgttacttcagcccacagtttatttctattcttgagttcttaagtacagaagatagaagtgatttaaatggcatagtatatatatcattttctggccttttaaaatttatttgagacctcttgatgaaatggacatattatatatttctgccacctggattttcctggataatttgatggaatattttaagtttcagtaaatcagaacaataaacaaactcagatat

SEQ ID NO: 2108 - DNA, 461 bp, Homo Sapiens
ccctaaccccatgcacaaataattggtgagccttcatttccctgacttcaagtttccatgtgaggactcatgctctctccactttcttcttgggaggagggaagatttacctaatgggtaaatttgggcaaagcacattgagtgtgcttgtttggctctgagtctctttgcaaacatgtgtctgcccacagtgacatgagtttgcgttgactgtcatgtctgcaggaagctgcctgctcctgtggccatgtcaagcaattctttctttcaactgcaactgtgtgtaagagcttagtctgagaagaaatgttcagaagctcactgtggctgcacatctgagccatgtcttcccattagttgtcatgagtcagcaataaagcgggtatgttgatgtctatcaatctaattcctatgttctgaactcagggaaagaaataggagaatcatttgcagcctacctc

SEQ ID NO: 2109 - DNA, 620 bp, Homo Sapiens
tttttttttttttgaatttctgattgattgtatttttttggcaaaacaaaaaaatcacaaacattaaaacattgtgtatattaagtacatctagaaaagtgtatgcaaaatatttcatatttaaatagaagggaccagggctcaatgctgcttggcccggggcttctctctacctctccacgtggcgggagcaggtgagggtcggcatcagccgcagcggcggaggattgtttccctgcaccccactccttaaaaacgcgaaagtcaacttctgaagtccgttcacggtgtcctgggatccacgctggacggtggcggccgactttcagcttgacctgaattttattcctaatcagctgtgtgatctcggttggtcccaaacgtctctgagcctccctttcatctgtgcagctgggcctccagaccccaacccccaggcggtgcttaatcacgtagaccttattctgcgtgcactttaccacagttcaccaaccaccgagcgctgagagctgttgaagcacctgcgtcggggtgcgagagacctggtacattttagaaatgtgcctccgctgagacacgtaggcgggcaatctcgcagggacttgctgggcgtggttact

SEQ ID NO: 2110 - DNA, 411 bp, Homo Sapiens
tttttttttttttttcaaacacattctaattctgattttttttaacagtaatttgccatgggacaggcacaccccatgtgtttgggaagacaatgggaaggttctgttttctgctccaagactgattcaaccagttggatctggaaggggataaagggctgtgtggctgtttgattttcattgtctagtggcagccaaaattggaaaatagagaagtgcaaactttaaagacaagcagcgacagctcatcagcagtctaacaacacgacagatgacaggcccagaggcacacccagggccgccagcccatcaccctgtgcaggatgtcaaagagcagttgcagcaaaggaagaagatcatccagacttaaatgtttgggccttgctaagaccatagagtctttgtgctttg

SEQ ID NO: 2111 - DNA, 728 bp, Homo Sapiens
  misc_feature (686)..(686): n is a, c, g, or t
  misc_feature (688)..(688): n is a, c, g, or t
  misc_feature (690)..(690): n is a, c, g, or t
  misc_feature (724)..(724): n is a, c, g, or t
tcatatgacacctagtgagcttttaaaatttaccaggaaatttgcagcggttggaaaatttagaaagatttatggtgtagaaaatacttttgagatctttgtatgaaaggagtagaatcaatggggggaaacactgctggtttcatttttgtaatcaccagtggagcgtctgatcatcctggttattatgtgataggtggctcacattgatttgtgattttgaaacaaataaaaaaaatttacaaaagaatatataagagcaggcaagaaatttaaattaccgagagatgggggaaaaaatctgttcttcctaaagaaatcccttcagatagagctcatggtgtttagtgatgtacttgcagtattgtttgaagaattgttttgtcttaaggaaaaaagacgttgcacatgatttgtactgcagcaaatcagcaaaagtgatctgagttggatatatttgaaggtattttgaaagttacgttcaaggctaacacctgagctttgtgtaatgtaaataagaccttgtgtttatgaacctttcagctaatttaattttttttcccttacatgccaagtgatgttcaggttttgaatgtttttgtatcagttttttcctttgtaaatggcattaacattggtacttgaggtcttgcttaatcacttttgttgtcctgaggacttgaatncncnggcattaaattggttgcaaaatttggctgtaganagcc

SEQ ID NO: 2112 - DNA, 2214 bp, Homo Sapiens
ggaggaagcgcgcggggcgccataaggaggaagcgggtagtcgaccgtgtccgcgcgcctgggagacgctgcctcggcccggacgcgcccgcgcccccgcggctggagggtggtcgccactgggacactgtgaaccaggagtgagtcggagctgccgcgctgcccaggccatggactgtgaggtcaacaacggttccagcctcagggatgagtgcatcacaaacctactggtgtttggcttcctccaaagctgttctgacaacagcttccgcagagagctggacgcactgggccacgagctgccagtgctggctccccagtgggagggctacgatgagctgcagactgatggcaaccgcagcagccactcccgcttgggaagaatagaggcagattctgaaagtcaagaagacatcatccggaatattgccaggcacctcgcccaggtcggggacagcatggaccgtagcatccctccgggcctggtgaacggcctggccctgcagctcaggaacaccagccggtcggaggaggaccggaacagggacctggccactgccctggagcagctgctgcaggcctaccctagagacatggagaaggagaagaccatgctggtgctggccctgctgctggccaagaaggtggccagtcacacgccgtccttgctccgtgatgtctttcacacaacagtgaattttattaaccagaacctacgcacctacgtgaggagcttagccagaaatgggatggactgaacggacagttccagaagtgtgactggctaaagctcgatgtggtcacagctgtatagctgcttccagtgtagacggagccctggcatgtcaacagcgttcctagagaagacaggctggaagatagctgtgacttctattttaaagacaatgttaaacttataacccactttaaaatatctacattaatatacttgaatgaaaatgtccatttacacgtatttgaatggccttcatatcatccacacatgaatctgcacatctgtaaatctacacacggtgcctttatttccactgtgcaggttcccacttaaaaattaaattggaaagcaggtttcaaggaagtagaaacaaaatacaatttttttggtaaaaaaaaattactgtttattaaagtacaaccatagaggatggtcttacagcaggcagtatcctgtttgaggaaagcaagaatcagagaaggaacataccccttacaaatgaaaaattccactcaaaatagggactatctatcttaatactaaggaaccaacaatcttcctgtttaaaaaaccacatggcacagagattctgaactaaagtgctgcactcaaatgatgggaagtccggccccagtacacaggggcttgactttttcaacttcgtttcctttgttggagtcaaaaagaaccacttgtggttctaaaaggtgtgaaggtgatttaagggcccaggtcagccactgtttgtttacaaaatcaggtaactaactgcatacactttttctctttccatgacatcaagactttgctaaagacatgaagccacgggtgccagaagctactgcgatgccccgggagttagccccctggtaatagctgtaaacttccaatttctagccatacgctcagctcatccatgcctcagaagtgcatctggagagaacaggtttctaagcataaaagatgaaagagcagttggactttttaaaaattcagcaaagtggttccctctcttagggacagtcaaaaccaagtcacttaggtagtaccaaaataaataaggaaaagcttagctttagaaacagtgcaacactggtctgctgttccagtggtaagctatgtcccaggaatcagtttaaaagcacgacagtggatgctgggtccatatcacacacattgctgtgaacaggaaactcctgtgaccacaacatgaggccactggagacgcatatgagtaagggcactgacggactcatgatttcttcttaccagatgctttcctgttctttaagagtttaaaatcatcagaaaggaaaaacaaactctatattgttcagcatgcaatacataccacgctagggctggctcaattgaaagtgggcaaaagcttacaaatactaaaaagaagtgctgccgcgcagtgtggaggccactgtttggaaataaatcttcctaacactacaaaaaaaaaaaaaaaa

SEQ ID NO: 2113 - DNA, 6330 bp, Homo Sapiens
  misc_feature (5357)..(5357): n is a, c, g, or t
  misc_feature (5448)..(5448): n is a, c, g, or t
ccaggttttccctcccttcccccactcagctgcaggaactcctttttggggtttggatctggtatttttctattcagctccgagcttggctctcctggggaatcctgggagtgaaaggaaggagctgggtttatttgcatgtactggtagtcatttgcatcacatccaaaaatggccaaaattataacccctgattcttggctgaactgggactgctgcaatggaatattattcccggaaaccacccccaactagctggagctaatctcctccctcctccaaccccccattttggcccaggcctacataaaccaaaaaaagctggaccataaggtgaaaaccctacaggtccaggctgcccaatttgccaagcaaacaggccattggatcgaaatggtgaaaaacttcaaccaggcactcaaggtgggccatactccctacctcaccaccccaatcctgggcccccattggctgcctccagtcaggttacctcaggtttaggttaaggaggaagtagggtggtcccagaaaccccatctatagccccagtgtcagaaaaggttgagaaagaaagaaaagcagttggtgggtccaagttaaagccttttccaggagatgaataaaacttattccccaatggaagccatagtctacccattctgattcctgggtcccaactcctctccccctttccaggaaattggggatgtggagaatgggcttggagcattgagctggaaatgcgcaccattgccaatgcaatggaatatgtttacaaagggcagctgcagtttgccccttcctagcccctgttccctcccccaaccctatccctcctacctcacccgcagggggaaggagggaggctgacaagccttgaataaaaaacaagcctccgtttttttgtggtgtgtttcagagaggtaatagctccagtgtcgggggtgggagtggaaggttcaaaggtggtttccctgagggacaggtaccttttggggagagggtggaaatagcttccttttactatcccaaattttttttcctccatggcccttgtgcaggtgtttgttaggcaagcagagggtgggagttcccatccctcctgagagaaggtcctagtagccctgccccaagcttcctaattcaggaattgtttcctacagaagagaaacaaggcaagtacacctggtccccagctctggctttctgcctctccacgtgctcatggcctctccccaggctaactctaagcagtgtcatgagtctgagccaggtgggagattaattcctgggggcacttcagggctgagaagggggaggaatgacaggtccagtaaccgttaccaacagagcagtgcagctgccatccttgacagctccctcctccttggagaccatgacatagatggtcaggaacccaggctgagaaagacagccaaggggtggggggagcctaggcaaatctggcctctgccaagtcctggcttcagccaggcaagctccagcctccctggctcctcctcctcctcagtcctatccccaccctgtcacacatacacttaatacgcctggcatccaagtccacccactccggactttggccttagcagtagttagtgtgggaggctgggaagactgggagcagtctcttaaacaaaagcaaaagaataagcttcgggcgctgtagtacctgccagctttcgccacaggaggtaagtggatctgggagctgggggaactgagaagactagccagatattacatgtattgccaactcaaaactttcagcttttaacatgcttcctcacacattatcccctttgatcctccacaactctgaggtggacctggtgggtcttagccccacttggtagatgagaaaataggttgagagagacagtgagatgctcagtatcacacagcaaacctcttggccctatacatcattccaaacacaagacccaggttgcatatagaaggttcagtgtccctggtttagaaggagaggtggtgtgaggcaagcaagaagatgcctctgctgcactccagcctgggcgacagagtgagactccatctcaaaaaaaaaaaaaaacgatgcctctgctccatacagcaggtctgtacacaggatctggctcatgtggttttagttaagttagccacaaatacagggtctgcccacatctttgctttgaacagatgagccatggttggccaattatctgccaaccagataatttctcaatatgctcacaccagatgcttccagctagggagggtattaggggaaagggcttgagggccacagtaaactggacaagtttttctgcccagcctaggctgccacctgtaggtcacttgggctccagctatgtggctgcctcttctgctgggtgccttactctgggcagtgctgtggttgctcagggaccggcagagcctgcccgccagcaatgcctttgtcttcatcaccggctgtgactcaggctttgggcgccttctggcactgcagctggaccagagaggcttccgagtcctggccagctgcctgaccccctccggggccgaggacctgcagcgggtggcctcctcccgcctccacaccaccctgttggatatcactgatccccagagcgtccagcaggcagccaagtgggtggagatgcacgttaaggaagcaggtaagtatggtagaccaccaggaatatggtgtggggtgtcctgatccccacagtcaccccaggagtcacctgcaagggctgtggtaagctaaagggacaatttgaggagaagcagttttcagatgctcccaggaagaagagggagctgtgggagtgcctcacctacccccagcatccttttcatctccccacagggctttttggtctggtgaataatgctggtgtggctggtatcatcggacccacaccatggctgacccgggacgatttccagcgggtgctgaatgtgaacacaatgggtcccatcggggtcacccttgccctgctgcctctgctgcagcaagcccggggccgggtgatcaacatcaccagcgtcctgggtcgcctggcagccaatggtgggggctactgtgtctccaaatttggcctggaggccttctctgacagcctgaggtgaggggtacagggctctgggttccaggactaacagcagcccactcaacaaacgtgggccagcagaggtggttaaaatacagcacattggaatagttaaaaagagacagtttagggctaaacttcatgggttcaatgaagtctacccttatgtaagctttgtgaccataagtagattacttctctttacccatttttaacgtgtttgttttttgttttttgagatggagtcttgctctgtcgccaggctggagtgcagtggcgcgatcttggctcaccacaatttccacccccggggttcaagcgattctcctgcctcagcctcccgagtagctgggactacaggcatgcgccaccatgcctggctaatttttgtatttttagtagagacagggtttcactatgttggccaggttggtctcaaactcctgacctcgtgatccgcccacctcagcctcccaaagtgctgggattacaggtgtgagccaccacgcccggccttgcctctcgtctttaaacaataaggttcaaagttccgtgggagcacaaaggagacatgatgaggacaacgggagttagggcctgagtttttttggttttttttttttaagcgttttgctcttgttgcctaggctggagtgcaatggcgagatctcagctcacagcaacccctgcctctcaggttcatgtgattctcctgcctcagcctcccgattagctgggcttacaggcacgtgccaccactcccagctaaatttttaggtagagatggagtttataccatgtggccagggtgggtttgaattcctgacctcacctgatccaccggaccggccttcccaaagtgctgggattacaggcatgagccaccacacacggcccaaggcctgagttcttagcaggagtataaggcgcctaagcttagtctaccttctaaggaagcctgcgtttgtcaccatcactcagcaaataaccggaattgtctcctgtctctcagccttaatttttcaggcagcatcatgggacacatacttttagttttgagacaaggccttgctctcacccagggtggagtgcagtggtgcagtcacggcccactgaacttcaaactcctaggctcaagcagctcaagcgatatccgcctcagcctcctgagtagctgagaccacaggcgcgtgccagcatgcctggctagtatttttttacagatggggtcttgctgtggtgaccagacttgtctccaactcccggcctcaagcgatgcttccgcctgggcctcccaaagtgttgggattataggtgtgagccactgcatactggaacacatactttatacttgaatttttttttatccccttccttcgtgctcctaacctatacttggatttctacatctgtgccagggcagtgggatgtatccccactttccccatcagcttaccctccagcaaatacgagactatacccttcaatatccagcactcagggctcaaccatgtgttttgggagcaagggaatggggttcctctaggtcaggaatcggcaaactcagtactcaagccagatttggccagctgcctacaagctgataatggttttttttatttttaaatggttacattgtaaactgttatataagtacctgataatatcattaattttgtttcttggcctgccatgcttaaaatattaactctctggccctttaagaaaaaaacgtgctgacccctgctctagatcaaagaaaacaaacctcaaaaatactttcctccctctaccccacttgacccttgtcccggggcagtaggcatctccgtcaaaactcttgtccctggtctgtggtaactttctcagctccccaacccatgtccctcaaagtcccctccctatagggcaagaacccagcaacttcgctctgccccgactctaggcgggatgtagctcattttgggatacgagtctccatcgtggagcctggcttcttccgaacccctgtgaccaacctggagagtctggagaaaaccctgcaggcctgctgggcacggctgcctcctgccacacaggcccactatgggggggccttcctcaccaagtgtgagtagccaggcccacacaggggcacatgaagggaaacaagtaccagaaaggccagtcctgcataagcctgctaggaggtgggtggggcacccagggcagggttgagggtgaacaggatgttacaanagtgcccaggccatgtggaacctgcccactccccacactgaggaggggactgagggtgacaagcccagggccccaaaaaacagtacctaanatgggctggagtgaggaagggaaactgattgcaaccacctatggggctgcagacctgaaaatgcaacagcgcatcatgaacctgatctgtgacccggacctaaccaaggtgagccgatgcctggagcatgccctgactgctcgacacccccgaacccgctacagcccaggttgggatgccaagctgctctggctgcctgcctcctacctgccagccagcctggtggatgctgtgctcacctgggtccttcccaagcctgcccaagcagtctactgaatccagccttccagcaagagattgtttttcaaggacaaggactttgatttatttctgcccccaccctggtactgcctggtgcctgccacaaaataagcactaacaaaagtgtattgtttaaaaaataaaaagaaggtgggcagaaatgtgcccagtggaaggctgaccccatttaagtgccaactactccaaaccgacatgctcacggtctctggcctgttcagtccctgcaaaacagctagcacccacagtggggcgccagggaactgcctcacatctacagctgcacgtcggggagtggccatcaaagggcactttaatacatttcccttattttctgaaggggagtaaggttgcaattcagtgtctgtactgggaatggtcttcatatttcttgggggagaagagcaggtgatgagggttctgggccaggctgggtggcttccatggaagaaaaggcaatattcacataaattctcctgctaaggacactgaccacacaggtgtgcaaggcaacttatcatacttcgaaaggagctggatcccttgaggattggccaggaagggaggtgctgggcccttagcggtgcacagaaggccaggaag

SEQ ID NO: 2114 - DNA, 2351 bp, Homo Sapiens
gcgcggcggcggacctcgggttgccctcggtccgagtgatccctggtcgcttccttagccctcccgccttcggcattggggtccccgcgtcccccgggcctccaggcgggaaagcgcgggggctttgcggggccttgagcgcctggtgtgggaggtggtcgagcccagccaccctcccccgcggcggcgcgaggtctctcggccagaacacgtggatgcccacccaccactgagcctcatggaggtggtaacatttggcgatgtggctgtgcacttctctcgggaggagtggcagtgtctggaccctggccagagggccctctacagggaagtgatgctggagaaccacagcagtgtggctggactagcaggattcctggttttcaagcctgagctgatctctcggctggagcagggagaagagccatgggtcctcgacctgcagggagcagaggggacagaggcaccaaggacctccaagacagattctacgattaggactgaaaatgagcaggcctgtgaggacatggacatcctaaaatcagaatcctatgggacagtggtcagaatctccccacaggactttcctcagaatcctggctttggagacgtttctgattctgaggtctggttagacagtcatctgggcagtcccgggctgaaagtgacaggctttaccttccaaaataactgtttgaatgaggagactgtggttcccaagaccttcaccaaggacgcaccccagggatgtaaggagctgggaagcagcggcctggattgtcagcctcttgaaagtcagggagagagtgcggaagggatgtcccagagatgcgaggagtgtggcaaaggcatcagagccacttcagatatcgctctgcattgggaaattaatacacagaaaattagcagatgtcaagaatgccaaaaaaagttatctgactgcttgcaggggaaacatacaaataactgccatggagagaagccgtacgaatgtgcagagtgtgggaaagtcttcaggctctgctcgcagcttaatcagcatcagagaatccacacgggagagaaaccctttaaatgcactgagtgtggaaaagccttccgcctgagctcaaaacttattcagcatcaaagaatccacactggggagaagccctacagatgtgaggaatgtggaaaagcttttggtcagagctcaagcctcatccaccatcagagaatccacacaggagagaggccctatggttgtcgtgagtgtgggaaagccttcagccagcagtcgcagctggttagacaccagagaactcacactggggagaggccctacccttgcaaggagtgtgggaaggccttcagccagagctccaccctagcccagcatcaaaggatgcatactggggagaaagctcaaattctaaaagcctcagacagtccaagccttgttgcacatcagagaattcacgctgtagagaaaccatttaagtgtgatgagtgtgggaaagcttttaggtggatctctcgcctgagtcagcatcagctgattcacactggagagaagccttataaatgcaacaagtgtacaaaagcctttggttgtagttcacggcttattcgccatcagagaactcacactggagaaaaaccatttaaatgtgatgagtgtggcaaaggctttgttcagggctcacaccttattcagcatcagcgaatccacactggagagaaaccctatgtgtgtaatgactgtggaaaagccttcagtcagagttccagccttatttaccatcagagaatccataaaggagagaagccctacgaatgcctccaatgcggaaaagccttcagtatgagcacacagcttacaatacatcaaagggttcacactggagagaggccctataaatgtaatgaatgtgggaaagccttcagtcaaaactcaacccttttccaacaccagataattcatgcaggggtgaagccctatgagtgcagtgagtgtggaaaagccttcagccggagctcatatcttattgaacaccagagaatacacactagggcccagtggttttacgaatatgggaatgccctggaagggtccacctttgtgagccgtaaaaaggttaatactataaagaaactgcatcagtgtgaagactgtgagaagatatttaggtggcgttcacacctaattatacaccagagaattcacaccggggagaagccttataaatgcaatgactgtggcaaagcttttaatcgtagctcaaggcttacccagcatcaaaaaattcacatgggatagaccacttacatataaatgtgtatatatgtgaataaacctatagccttaactt

SEQ ID NO: 2115 - DNA, 454 bp, Homo Sapiens
  misc_feature (451)..(451): n is a, c, g, or t
tttttttttttttttttttttttttgttctccaaatatttattgaggtcttactatatacaaaactatataacaagttatgcttgttatatatgttatatatgttatgttatatatatatatatatgttatatatgtaatataactatattacaagttatgcttgaaataatgctgttaccaaaataaagaagctccttcacccaaggaaccctggtgttaaaggcaaagattaaccaaataatcccacaagtaaactatcatggactatgtaaatgctgtgaaagaaatgtatgggaagtcgaaagaggatcccacctgggggctggacagggtctcaagacagtaggtgagggttctccatgcaagaaacatgtgagttgaattctgaaggatgaacaaaagtcacctattcaagggtagggttggaggaaggaaggtgaggagctgtncaa

SEQ ID NO: 2116 - DNA, 412 bp, Homo Sapiens
tttccattgccactgcagaatgaagccagtgcacatggtattagtcatcagccagaacttcctgttctgtgggtctggggtcaccagctgagatgtcacctgctttatttctggctttggcctgtggtctgtgatacccatcctccttgatgttctgcagaatggcacttgactgctgggcatgcatgaagttaagggcaagaaacagtatgccatgtgttctgtaccatcatgtgtctcttcttccttctgggcccttctactggtgaactttcatcaagatctgcgccatgccgtgtcactatcaagccattaagttttgtctgggttgctgtcagccccagttggcttcctggtcaacaaggacctcaagaactgcctgtggaccgaggccccctaccagtgcatgaga

SEQ ID NO: 2117 - DNA, 2449 bp, Homo Sapiens
tatatgtgacctttttaaaaaatgagctgtaagcagtctcccagacagtagctcagcctccagaactctctttctgcatagttgaagacccctcttcacacaagatggtagcaacaaatcataggtgcaattgcaccaaattcacagaagatcaattgaaaatcctcatcaataccttcactcaaaaaccttacccaggttatgctaccaaacaaaaacttgctttagcaatcaatgcagaagagtccagaatccagatttggtttcagaatcaaagagctaggcatggattccagaaaacaccagaacctgactttagatttaagccacagccatggacaagattaacctggtgtggagtttcaaaatagagaagccagatggtgttgtaccacctatagcacctttcaattacacacaatcatccatgcatttatgaaaaacccataccctgggattgattccggagaacaacttgctgaagaaattggtgcttcagagtcaagagtccaaatttggttccaaaatcaaagatctagatttcatctccagagaaaaagagaacctgttatgtccttagaatgagaagaccagagaagaccaggggcaaggtttctgagggacttcaaggtacagaagatacacaaagtggcaccagcctcactagcactctcatttctcaagagccagaacatggtgaatacagtcaagttcagtgtatttgataatatcaatttgggccccaaatctctctcacagtcttcctgggagtctattcttcttccaaaagtgcaagctaagccttctgaagatggtaaagaacttggccgggtgtggtggctcatgcctgtaatcccagcactttaggaggctgaggctggaagattgcttgagcctaggagtttgaaaccagtctgagcaacatagtaagaccctgtctctattctaaaaaacaaaataagtaaaaaggactgtaggaggccaagacaggtacaggaggcaccacactaccctgttgacacagcctggatccagagttcagcagaccttgagacaatgaaaacaaacttagtaataatcatttttcaatcattgcagtaattattgatttggacaaaaatcaattgacgtcaaaaccttaaagtgacgtttctctgcctatggagtggtcattcttttattcctttagtttcataataaattttcttttacttaaaaaaacttatagtttgatgaagagtgagatatatacctcatctcaaagaatcttcacacacacacttattaattacaaaaggaaaatcagtaattttgcagtggagacatatggccaactccaccttacccaagtggctgaaagtcactgcaccagtaatggcacaaaccaatgtgagatgattcctgatatgatacactaaaaagggcactgtctcttctgcatgttgcagacaaaaagtgggtaagctgacactgaaactaataattaggcaatgtcaagcaaatacaaattcaagttgacagtctgcaaagtaacatccatgtactcttcaacaatggatcgaccctagctactcaggaggctgaggtggaataattgtttgaggccaggagttccagatcagcctgggcaacatcatgcgaccccatctctaaaaacatctttttaaaaatgagccaggtgtggtagcatgcacccgtagtctcagctactcaggagcctgaggcaggaggatggtttcaacataggagatcgaggctgctgtgagctatgatcgtgctactgcactccagcctgggtgacacagcaagttcctgtttccaaacaacaacaagaaaacaaaacaaaacaaaacaaaaaatagatagaatagtgacaataaaaatggagaaaaagtaggctgactcaggaaatgcttagaaagtacagccatacctcaaagatattgtagatttgattcgagaccaccacaataaagcagatattgctacaaagtgagtcacacaaattgttttgtttccttgtgaatatgaagttatattggctgggtgtgatggctcatgcctataatcccagtactttaggagacggaggcgggagggtcacttgagcccaggaattgtgagatcaacctgggcatatagggagatcctgtctctatttaaaaaaagaagctatgtttacactacactatagtctatttaaagtgtgaaatggcgttatgtccttaattttaaaactcttgatgctggctgggttcggtggctcatacctgtaatcccatcactttgggaggccaagacaggttgattacttgaattcaggagttcaagaccagcctggacaacatggcaaaacacgtctttaaaaaaagaaaagaaaaaagaaaaacagaaagaaaaagaagaaaaactacttgctgcccttacttgaagctcaattatttaaaac

SEQ ID NO: 2118 - DNA, 168 bp, Homo Sapiens
gacgcccgtttacacgcaccacccctgggcgggctgtgcggttcaggccctcccccgggaccggcccgtgtcccgccccgtgtcccgcctcgtatttgtgcggcgccagctgtttctgattcctgtgttttagagaggctgggcttgctggcgcagtagctccagagg

SEQ ID NO: 2119 - DNA, 623 bp, Homo Sapiens
aagcttgcgggcgcgtgactcagtttccctcccttctccctccatccgcagccacaggggaactcgtctcttacatactctcatcttctcccccgctcccttccactccaaggagcgaggagggcaagcggcctcccagctccctggtacctcgaggcaccattccagccagggacgctgccgggtagactctccactccccctgccgcccacactgcagcagccacatccatacacacacgctcgcacagtgttctgaggaaggaaccttcgccacagactcctgtactattaacaatctgtaaccaagctaactgtctcatccatgtgttgatttcctgtttcctcctcccccgcctcttccagttcaaaggagtctgcaattggaactgctgattttcggtgggttttgtagttgatttttccaagagcgtcgaagactctctttctcttggttcaccttgcctgtcgctagcaagcatctggttcagcggaaatgggatgtgagaatgatgaaacccgacagaagtatctcagcctgcagtcagttattatggtataggaggtgagctagttaacaaacttgtaccacaaaacaatatcgttttaacttttctaaagca

SEQ ID NO: 2120 - DNA, 883 bp, Homo Sapiens
cagaaatgtttatggcattaacacatcatgagtagattgaatttctttaacacacagaaaaatcaaagcctaccaggaaatgcttccctccggagcacaggagcttagcaggccacttctgttagcaacacaggaattcacattgtctaggcacagctcaagtgaggtttgttcccaggttcaactgctcctacccccatgggaccctcctcaaaaacgacagctagccgaaaccaacaggcttcacagtaaccaggaggaaagatctcacgcgggggaaccttcacaaagaagccctgagcttgtgtttcaaaagccaagctctggggtctgtggcctgtgtcaccaactcaggtcacaccacagcacggggaagttagtgttgcagtttcacttctagtcaatcttgttaattaaattatcccaattaggaagacaatattaaacaggtattagagtccttttgcaaaactgactgtcccccttggtcaaggaaaagactttcacttggatggcaacccatcaccatcaccatgtccaagggcacagatgaatctgggctgggcaatcacaggcaatgcttgacaaggggtgggtgacatcatgtccacaaaagatgcccagaaatgaggtcgtgaggacagggtgggtattaggaagcaatgtggtgggtcctggccgaggtctaacatcccctagcagccttcctcgaggcacacgtgtgaccagtggagtggggccaccgtatcgtttcaggcaccttggctgacaagcccaacgcggcactggggttcctggcctttgcagtgccacatggcagcacctggccacaattaggtcaatggcccgtttgtgtgacccttcttgggtgtctccctcttga

SEQ ID NO: 2121 - DNA, 7758 bp, Homo Sapiens
cagaggtctagcagccgggcgccgcgggccgggggcctgaggaggccacaggacgggcgtcttcccggctagtggagcccggcgcggggcccgctgcggccgcaccgtgaggggaggaggccgaggaggacgcggcgccggctgccggcgggaggaagcgctccaccagggcccccgacggcactcgtttaaccacatccgcgcctctgctggaaacgcttgctggcgcctgtcaccggttccctccattttgaaagggaaaaaggctctccccacccattcccctgcccctaggagctggagccggaggagccgcgctcatggcgttcagcccgtggcagatcctgtcccccgtgcagtgggcgaaatggacgtggtctgcggtacgcggcggggccgccggcgaggacgaggctggcgggcccgagggcgaccccgaggaggaggattcgcaagccgagaccaaatccttgagtttcagctcggattctgaaggtaattttgagactcctgaagctgaaaccccgatccgatcacctttcaaggagtcctgtgatccatcactcggattggcaggacctggggccaaaagccaagaatcacaagaagctgatgaacagcttgtagcagaagtggttgaaaaatgttcatctaagacttgttctaaaccttcagaaaatgaagtgccacagcaggccattgactctcactcagtcaagaatttcagagaagaacctgaacatgattttagcaaaatttccatcgtgaggccattttcaatagaaacgaaggattccacggatatctcggcagtcctcggaacaaaagcagctcatggctgtgtaactgcagtctcaggcaaggctctgccttccagcccgccagacgccctccaggacgaggcgatgacagaaggcagcatgggggtcaccctcgaggcctccgcagaagctgatctaaaagctggcaactcctgtccagagcttgtgcccagcagaagaagcaagctgagaaagcccaagcctgtccccctgaggaagaaagcaattggaggagagttctcagacaccaacgctgctgtggagggcacacctctccccaaggcatcctatcacttcagtcctgaagagttggatgagaacacaagtcctttgctaggagatgccaggttccagaagtctccccctgacattaaagaaactcccggcactctcagtagtgacaccaacgactcaggggttgagctgggggaggagtcgaggagctcacctctcaagcttgagtttgatttcacagaagatacaggaaacatagaggccaggaaagcccttccaaggaagcttggcaggaaactgggtagcacactgactcccaagatacaaaaagatggcatcagtaagtcagcaggtttagaacagcctacagacccagtggcacgagacgggcctctctcccaaacatcttccaagccagatcctagtcagtgggagagccccagcttcaacccctttgggagccactctgttctgcagaactccccacccctctcttctgagggctcctaccactttgacccagataactttgacgaatccatggatccctttaaaccaactacgaccttaacaagcagtgacttttgttctcccactggtaatcacgttaatgaaatcttagaatcacccaagaaggcaaagtcgcgtttaataacgagtggctgtaaggtgaagaagcatgaaactcagtctctcgccctggatgcatgttctcgggatgaaggggcagtgatctcccagatttcagacatttctaatagggatggccatgctactgatgaggagaaactggcatccacgtcatgtggtcagaaatcagctggtgccgaggtgaaaggtgagccagaggaagacctggagtactttgaatgttccaatgttcctgtgtctaccataaatcatgcgttttcatcctcagaagcaggcatagagaaggagacgtgccagaagatggaagaagacgggtccactgtgcttgggctgctggagtcctctgcagagaaggcccctgtgtcggtgtcctgtggaggtgagagccccctggatgggatctgcctcagcgaatcagacaagacagccgtgctcaccttaataagagaagagataattactaaagagattgaagcaaatgaatggaagaagaaatacgaagagacccggcaagaagttttggagatgaggaaaattgtagctgaatatgaaaagactattgctcaaatgattgaagatgaacaaaggacaagtatgacctctcagaagagcttccagcaactgaccatggagaaggaacaggccctggctgaccttaactctgtggaaaggtccctttctgatctcttcaggagatatgagaacctgaaaggtgttctggaagggttcaagaagaatgaagaagccttgaagaaatgtgctcaggattacttagccagagttaaacaagaggagcagcgataccaggccctgaaaatccacgcagaagagaaactggacaaagccaatgaagagattgctcaggttcgaacaaaagcaaaggctgagagtgcagctctccatgctggactccgcaaagagcagatgaaggtggagtccctggaaagggccctgcagcagaagaaccaagaaattgaagaactgacaaaaatctgtgatgagctgattgcaaagctgggaaagactgactgagacactccccctgttagctcaacagatctgcatttggctgcttctcttgtgaccacaattatcttgccttatccaggaataattgcccctttgcagagaaaaaaaaaaaacttaaaaaaagcacatgcctactgctgcctgtcccgctttgctgccaatgcaacagccctggaagaaaccctagagggttgcatagtctagaaaggagtgtgacctgacagtgctggagcctcctagtttccccctatgaaggttcccttaggctgctgagtttgggtttgtgatttatctttagtttgttttaaagtcatctttactttcccaaatgtgttaaatttgtaactcctctttggggtcttctccaccacctgtctgatttttttgtgatctgtttaatcttttaattttttagtatcagtggttttatttaaggagacagtttggcctattgttacttccaatttataatcaagaaggggctctggatccccttttaaattacacacactctcacacacatacatgtatgtttatagatgctgctgctcttttccctgaagcatagtcaagtaagaactgctctacagaaggacatatttccttggatgtgagaccctattttgaaatagagtcctgactcagaacaccaacttaagaatttgggggattaaagatgtgaagaccacagtcttgggttttcatatctggagaagactatttgccatgacgttttgttgccctggtatttggacactcctcagctttaatgggtgtggcccctttagggttagtcctcagactaatgatagtgtctgctttctgcatgaacggcaatatgggactccctccaagctagggtttggcaagtctgccctagagtcatttactctcctctgcctccatttgttaatacagaatcaacatttagtcttcattatctttttttttttttttgagacagagtttcgatctattttaagtatgtgaagaaaatctacttgtaaaaggctcagatcttaattaaaaggtaattgtagcacattaccaattataaggtgaagaaatgttttttcccaagtgtgatgcattgttcttcagatgttgaaaagaaagcaaaaaataccttctaacttaagacagaatttttaacaaaatgagcagtaaaagtcacatgaaccactccaaaaatcagtgcattttgcatatttttaaacaaagacagcttgttgaatactgagaagaggagtgcaaggagaaggtctgtactaacaaagccaaattcctcaagctcttactggactcagttcagagtggtgggccattaaccccaacatggaatttttccatataaatctcaatgaattccctttcatttgaataggcaaacccaaatccatgcaagtgttttaaagcactgtcctgtcttaatcttacatgctgaaagtcttcatggtgatatgcactatattcagtatacgtatgttttcctacttctcttgtaaaactgttgcatgatccaacttcagcaatgaattgtgcctagtggagaacctctatagatcttaaaaaatgaattattctttagcagtgtattactcacatgggtgcaatctttagccccagggaggtcaataatgtcttttaaagccagaagtcacattttaccaatatgcatttatcataattggtgcttaggctgtatattcaagcctgttgtcttaacattttgtataaaaaagaacaacagaaattatctgtcatttgagaagtggcttgacaatcatttgagctttgaaagcagtcactgtggtgtaatatgaatgctgtcctagtggtcatagtaccaagggcacgtgtctccccttggtataactgatttcctttttagtcctctactgctaaataagttaattttgcattttgcagaaagaaacattgattgctaaatctttttgctgctgtgttttggtgttttcatgtttacttgttttatattgatctgttttaagtatgagaggcttatagtgccctccattgtaaatccatagtcatctttttaagcttattgtgtttaagaaagtagctatgtgttaaacagaggtgatggcagcccttccctagcacactggtggaagagaccccttaagaacctgaccccagtgaatgaagctgatgcacagggacgaccaaaggaccttcgttaagtgataattgtcctggcctctcagccatgaccgttatgaggaaatatcccccattcgaacttaacagatgcctcctctccaaagagaattaaaatcgtagcttgtacagatcaagagaatatactgggcagaatgaagtatgtttgtttatttttctttaaaaataaaggattttggaactctggagagtaagaatatagtatagagtttgcctcaacacatgtgagggccaaataacctgctagctaggcagtaataaactctgttacagaagagaaaaagggccgggcacagtggcttattcctgtaatcccaacactgtggaaggccgaggcaggaggatcacttgagtccaggagtttgaaacctacctaggcaacatggtgaaaccttgtctctaccaaaataaaaattagctgggcatggtggcacgtgcctgtggtcccagctacttgggaggctgaggtgggagcctgggaggtcaaggctgcagtgagccatgatcatgccactgcactccatcctgggtgacagcaagatcttgtctcaaaaaaaaaaaaaaaaaccaggagtgaaaaaggaaagtagaaggcagctgctggcctagatgttggtttgggaatattaggtgatcctgttgagattctggatccagagcaatttctttagcttttgactttgccaaagtgtagatagcctttatccagcagtattttaagtggggaatgcaacgtgaggccaactgaacaattccccccgtggctgcccagatagtcacagtcaaggttggagagtctccttccagccagtgacctacccaaaccttttgttctgtaaaactgctctggaaataccgggaagcccagttttctcacgtggtttctagcttcttcagactcagcccaaattaggaagtgcagaagcacatgatggtgaaaaacctaggatttggcagccttccagaatggtatggaatctgagggaagatttatgtttcgttttggaggatagctcaagttgaattttctttccagccagttaccctttcaacctacccatactttgtacaactcttacacaaatacttagatatttattagatagccctgaattcactctaattataaacagggagtgtaaactgcccccagatgttcctgggctgggtaaaagcagctggagtgaagcactcattttccataaaggtaacaaagggcagctcagtggttactcaagctcaaaagggtttttttaagagcaagcattggttaagtctgtgtatactgagttggaagtgatttcagcacattcttttttagtgggagtgaaagttctgaagcccccttttaacttcctcttggtttttcattataattggtagccatctcatgaactgtctctgactgttgtctctttgtggtcatgtgattgtgagcttgctttctgacttgcatttctgactttatcctgttgttaggaagatagaaactaggttttgaaagattacatgattcaagcgagggattttaaagtaaagatgtatttattctgaagaatctaaaagataacagattatttgcttatgaaagaacaatatagtctgggaatcccagaatgtcaagccaaaggtctaagaagtcatctccttcaaatactttaataaagaagtatttcgaggagatatctgtccaaaaaggtttgactggcctccagattccagttatttttaaaaagcaacttaccactaaatccttgagtctccatagagtaacagtaaagaaactgatgtaacagactctcctctcaaaggatctcctctggaagagactatcagcggcagatctctccagggaagacccatcccctagtgccagagcttgcatcctggagactaaagattgcacttttttgtagttttttgtccaaatgcaatcccatttctgtgcctcttagcatgcagttagatttggacaaacaagattcctaaggaatgactttattaactataatatggttacagctattatataaatatatattctggttatagttctaatatggagatgttgtgtgcaatgctggcctgtggtggtctgtgtaatgctttaacttgtatggaggaggccaggctcagagctgagatgtggcctgaaccttccctgtatcgatcctttaatttagaactgtcaagatgtcactttctccccctctgccttttagtggtatctgacatatactcaaaacagtaatttcctggtcacatcattaactgctaattctgtatttataaagaattttcagatggacatgtacaaatttgaactcaaaccatccccagtccagatacagggcagcgtgtaggtgaccacaccagagcctcagcctcggtccttctcagccgtcgggataggatccaggcatttcttttaaatctcagaggtagcagtaaacttttcagtattgctgttagcaagtgtgtgtttgccaatagatacccattatactaatgtgccaagtaaatgttcattgcacatctgcttccactgtgttcccacgggtgccatgaagtgtgtgaggagcccctcatctggagggatgagtgctgcgttgactactgctatcaggattgtgttgtgtggaatattcatctacataaattttatatgcacagtaatttccctttttatatgtcaagtaactatttgtaaaagttatactcacaaattattataatgattactaatatattttttccatgtttcattgcctgaataaaaactgtttaccactgttaaaaaaaaaaaaaaaaaaaaaaa

SEQ ID NO: 2122 - DNA, 210 bp, Homo Sapiens
gtagcctgaaagaagcaggaactccaggatcccaaaccagagcagaccctatagtaaagtatttttacatcttttcctttccccagaagagatccctaacctattgttttattgacagccttgctgttagaggctctttcccagaagttggacgaagaggctcaggcgttgctgtttcttgtcttccaagtcaagtggttactctggtaa

SEQ ID NO: 2123 - DNA, 647 bp, Homo Sapiens
aatcagttacacaaaagaaatcctttgaagtgatgctgctttttacaaagcatcgttttaaagcacatggccttttttttttaattattagtggtagtaatatatagaaggtattacataactgtcactgaagtggtgggggaaaatgtggtgacggaggtacaggaaactactaatcttgccatctggcttaaaggtgtcatggtggcacagttacggctcgccggtaaaatttcaaatgtccggttggatactacggtagaacactatttttaatacagaaaaagctccctataacgcacttcagagaaattaaaaatcacagagtatttattaccaatgcggcaggtacattaatgaactcgagatggctcggtaagcctgacgggcaataacgcacggtacggttctggaaatacctaagggctggaaattctagtcggttggtgaaagaggggtactatcatgatttcctcttctattcctatattcttttcgggattttttttcaataattagggatataagcatggtttttattgcagccatatccacttatccatcttaagatctgtagctgggattttctgacttgtaatgagcagggggattgctttctcacttggtgacactctttagagctttaa

SEQ ID NO: 2124 - DNA, 2807 bp, Homo Sapiens
cgctggccaatcggttgagagctgagctggacttggcggtgggagccggagcctgcttgttgcagctgtgggtgaggacggctctagctagttcccttttagactatggcgacatacctggagttcatccagcagaatgaagaacgggatggtgtgcgttttagttggaacgtgtggccttccagccggctggaggctacaagaatggttgtacccctggcttgtctccttactcctttgaaagaacgtccagacctacctcctgtacaatatgaacctgtgctttgcagcaggccaacttgtaaagctgttctcaacccactttgtcaggttgattatcgagcaaaactttgggcctgtaatttctgttttcaaagaaatcagtttcctccagcttatggaggcatatctgaggtgaatcaacctgccgaattgatgccccagttttctacaattgagtacgtgatacagcgaggtgctcagtcccctctgatctttctctatgtggttgacacatgcctggaggaagatgaccttcaagcactcaaagagtccctgcagatgtccctgagtcttcttcctccagatgctctggtgggtctgatcacatttggaaggatggtgcaggttcatgagctaagctgtgaaggaatctccaaaagttatgtcttccgagggaccaaggatttaactgcaaagcaaatacaggatatgttgggcctgaccaagccagccatgcccatgcagcaagcacgacctgcacaaccacaggagcacccttttgcttcaagcagatttctgcagcctgttcacaagattgatatgaacctcactgatcttcttggggagctacagagggacccatggccagtaactcaggggaagagacctttgcgatccactggtgtggctttgtccattgctgttggcttgctggagggcacttttccaaacacaggagccaggatcatgctgtttactggaggtccccctacccaagggcctggcatggtggttggagatgaattaaagattcctattcgttcttggcatgatattgagaaagataatgcacgattcatgaaaaaggcaaccaagcactatgagatgcttgctaatcgaacagctgcaaatggtcactgcattgatatttatgcttgtgcccttgatcaaactggacttttggagatgaagtgttgtgcaaatcttactggaggctacatggtaatgggagattctttcaacacttctctcttcaagcagacattccaaagaatctttactaaagattttaatggagatttccgaatggcatttggtgctactttggacgtaaagacctctcgggaactgaagattgcaggagccattggtccatgcgtatctctgaatgtgaaaggaccgtgtgtgtcagaaaatgagcttggtgttggtggcacgagtcagtggaaaatctgtggcctagatcctacatctacacttggcatctattttgaagttgtcaatcagcacaacaccccgatcccccaaggaggcagaggagccatccagtttgtcacgcattatcagcactccagcacccagagacgcatccgcgtgaccaccatcgcccgaaattgggcagatgtacagagtcagctcaggcacatagaagcagcatttgaccaggaggctgcggcagtgttgatggcacggcttggggtgttccgagcggagtcagaggaggggcccgatgtgctccggtggctggaccgacaactcatccgactgtgtcaaaagtttggacagtataacaaagaagaccccacttcttttaggttatcagattccttttctctatatcctcagtttatgttccatctgagaagatctccatttcttcaagtgtttaacaacagtcctgatgagtcgtcatattacagacatcattttgcccggcaggacctgacccagtccctcatcatgatccagcccattctctactcttactcctttcatgggccaccagagccagtactcttggatagcagcagcattctagctgacagaattttgctgatggatactttctttcaaattgtcatttatcttggtgagaccatagcccagtggcgtaaagctggctaccaggacatgcccgagtatgaaaacttcaagcaccttctgcaggcaccactggatgatgctcaagaaattctgcaagcacgcttcccgatgccacgttacatcaacacggagcatggaggcagtcaggctcgattccttttgtccaaagtgaacccatctcagacacacaataacctgtatgcttggggacaggaaactggagcacccatcctaactgatgatgttagcctgcaggtgttcatggaccatttgaagaagctggctgtctccagtgcctgttaagctgaggatacaaccaggaaatgcaacggtgtcagattgtgttcaaaatgtctagaaaggcttgataacattcctgttacttttctagcagattttaacaaataatcaaggacattttatatgtaactctttagattataatttatttgtattcctgtctttgtcctttttcttgcactataaaattataaggtcataaatgttttggtacttgtagatgtttatgtgctttttgtatcctaacttttagaatctaaataaaatcagaggtaatgtattttggcagcttgtttaggtgagaatcttaatgatcataaaaggaaataaatctagatgcagaaagtactggctaaaatattgctaatacaaatgtgatttcctgaaaaaaaaaaaaaaaa

SEQ ID NO: 2125 - DNA, 253 bp, Homo Sapiens
gacagacagcccagagcagtaatgtgacagacagctgtgtagtacaaactagtaatgacacacagtgcttaaataagtctgacaacatagatggaaaggcatctcttcagattggtgagaaaacgccagtcacagccagtgtattgtctgaggaggaacaaactcattgcttggagataggaagtaacacacgtcatggcaagagtaatttatctgaaggcaaaaagtctgctgaactcaattccccgttacg

SEQ ID NO: 2126 - DNA, 3033 bp, Homo Sapiens
cacgtgggtgcctctgacccggacgcgggtcccgggtggggcggcctcacctcccggccccgcctggtcacgccgcgctccgcccccaggggccgcgccttccagggcgccacagtgggcctggcgcccgtcgagggcatgtgccgcgccgagagctcgggaggcgtgagcacggaccactcggagctccccatcggcgccgcagccaccatggcccatgagatcggccacagcctcggcctcagccacgaccccgacggctgctgcgtggaggctgcggccgagtccggaggctgcgtcatggctgcggccaccgggtacgcgggtggggggtcggggctgcggcggggcggctagtcctggggacttcctccgctgcgtttctttggtcgtccctcagtttcctcttctgtaaaatggggataatgatcatagtgtccgcttcagggtggtttatgaggcttaaagggaagaagctcaggcaaagtggattctcaacggtatgaagattattttccgagtaacctggcgaggttactcctacaccgggaggagcaccgtcgggtcgcgattccaccttgggtcccgggctgctcactattggggcctcatcgtcccctgtcccgcttgttgtgtgactttgcgcgggttacttcccctctctgggctctgcgcgtctggcggctgtagccaagcccaggggtggggatcagagaagcgcgggggttgggggactgtccctccatgcccaatgccctccccgtgccggtaggcacccgtttccgcgcgtgttcagcgcctgcagccgccgccagctgcgcgccttcttccgcaaggggggcggcgcttgcctctccaatgccccggaccccggactcccggtgccgccggcgctctgcgggaacggcttcgtggaagcgggcgaggagtgtgactgcggccctggccaggagtgccgcgacctctgctgctttgctcacaactgctcgctgcgcccgggggcccagtgcgcccacggggactgctgcgtgcgctgcctgctgaagccggctggagcgctgtgccgccaggccatgggtgactgtgacctccctgagttttgcacgggcacctcctcccactgtcccccagacgtttacctactggacggctcaccctgtgccaggggcagtggctactgctgggatggcgcatgtcccacgctggagcagcagtgccagcagctctgggggcctggctcccacccagctcccgaggcctgtttccaggtggtgaactctgcgggagatgctcatggaaactgcggccaggacagcgagggccacttcctgccctgtgcagggagggatgccctgtgtgggaagctgcagtgccagggtggaaagcccagcctgctcgcaccgcacatggtgccagtggactctaccgttcacctagatggccaggaagtgacttgtcggggagccttggcactccccagtgcccagctggacctgcttggcctgggcctggtagagccaggcacccagtgtggacctagaatggtttgcaatagcaaccataactgccactgtgctccaggctgggctccacccttctgtgacaagccaggctttggtggcagcatggacagtggccctgtgcaggctgaaaaccatgacaccttcctgctggccatgctcctcagcgtcctgctgcctctgctcccaggggccggcctggcctggtgttgctaccgactcccaggagcccatctgcagcgatgcagctggggctgcagaagggaccctgcgtgcagtggccccaaagatggcccacacagggaccaccccctgggcggcgttcaccccatggagttgggccccacagccactggacagccctggcccctggaccctgagaactctcatgagcccagcagccaccctgagaagcctctgccagcagtctcgcctgacccccaagcagatcaagtccagatgccaagatcctgcctctggtgagaggtagctcctaaaatgaacagatttaaagacaggtggccactgacagccactccaggaacttgaactgcaggggcagagccagtgaatcaccggacctccagcacctgcaggcagcttggaagtttcttccccgagtggagcttcgacccacccactccaggaacccagagccacactagaagttcctgagggctggagaacactgctgggcacactctccagctcaataaaccatcagtcccagaagcaaaggtcacacagcccctgacctccctcaccagtggaggctgggtagtgctggccatcccaaaagggctctgtcctgggagtctggtgtgtctcctacatgcaatttccacggacccagctctgtggagggcatgactgctggccagaagctagtggtcctggggccctatggttcgactgagtccacactcccctgcagcctggctggcctctgcaaacaaacataattttggggaccttccttcctgtttcttcccaccctgtcttctcccctaggtggttcctgagcccccacccccaatcccagtgctacacctgaggttctggagctcagaatctgacagcctctcccccattctgtgtgtgtcggggggacagagggaaccatttaagaaaagataccaaagtagaagtcaaaagaaagacatgttggctataggcgtggtggctcatgcctataatcccagcactttgggaagccggggtaggaggatcaccagaggccagcaggtccacaccagcctgggcaacacagcaagacaccgcatctacaaaaaaattttaaaattagctgggcgtggtggtgtgtacctgtaggcctagctgctcaggaggctgaagcaggaggatcacttgagcctgagttcaacactgcagtgagctatggtggcaccactgcactccagcctgggtgacagagcaagaccctgtctctaaaataaattttaaaaagacatattacacttaaaaaaaaaaaaaaaaaaaaaaaaaaaaaaag

SEQ ID NO: 2127 - DNA, 3410 bp, Homo Sapiens
gcaccaggcgcccagtggagccgtttgggagaattgcctgcgccacgcagcggggccggacaggcggtaaggatctgattaggctttcgaacttgagtttgactgatgtcttctgtgtggtgtccgctaaatcccacagcatataggatcagtcgcattggttataaggtttgcttctggctgggtgcggtggctcatgcctgtaatccaacattgggaggccaaggcaggcggaccacctgaagtcgggagcttgagtccagccactgtctgggtactgccagccatcgggcccaggtctctggggttgtcttaccgcagtgagtaccacgcggtactacagagaccggctgcccgtgtgcccggcaggtggagccgccgcatcagcggcctcggggaatggaagcggagaacgcgggcagctattcccttcagcaagctcaagctttttatacgtttccatttcaacaactgatggctgaagctcctaatatggcagttgtgaatgaacagcaaatgccagaagaagttccagccccagctcctgctcaggaaccagtgcaagaggctccaaaaggaagaaaaagaaaacccagaacaacagaaccaaaacaaccagtggaacccaaaaaacctgttgagtcaaaaaaatctggcaagtctgcaaaaccaaaagaaaaacaagaaaaaattacagacacatttaaagtaaaaagaaaagtagaccgttttaatggtgtttcagaagctgaacttctgaccaagactctccccgatattttgaccttcaatctggacattgtcattattggcataaacccgggactaatggctgcttacaaagggcatcattaccctggacctggaaaccatttttggaagtgtttgtttatgtcagggctcagtgaggtccagctgaaccatatggatgatcacactctaccagggaagtatggtattggatttaccaacatggtggaaaggaccacgcccggcagcaaagatctctccagtaaagaatttcgtgaaggaggacgtattctagtacagaaattacagaaatatcagccacgaatagcagtgtttaatggaaaatgtatttatgaaatttttagtaaagaagtttttggagtaaaggttaagaacttggaatttgggcttcagccccataagattccagacacagaaactctctgctatgttatgccatcatccagtgcaagatgtgctcagtttcctcgagcccaagacaaagttcattactacataaaactgaaggacttaagagatcagttgaaaggcattgaacgaaatatggacgttcaagaggtgcaatatacatttgacctacagcttgcccaagaggatgcaaagaagatggctgttaaggaagaaaaatatgatccaggttatgaggcagcatatggtggtgcttacggagaaaatccatgcagcagtgaaccttgtggcttctcttcaaatgggctaattgagagcgtggagttaagaggagaatcagctttcagtggcattcctaatgggcagtggatgacccagtcatttacagaccaaattccttcctttagtaatcactgtggaacacaagaacaggaagaagaaagccatgcttaagaatggtgcttctcagctctgcttaaatgctgcagttttaatgcagttgtcaacaagtagaacctcagtttgctaactgaagtgttttattagtattttactctagtggtgtaattgtaatgtagaacagttgtgtggtagtgtgaaccgtatgaacctaagtagtttggaagaaaaagtagggtttttgtatactagcttttgtatttgaattaattatcattccagctttttatatactatatttcatttatgaagaaattgattttcttttgggagtcacttttaatctgtaattttaaaatacaagtctgaatatttatagttgattcttaactgtgcataaacctagatataccattatcccttttatacctaagaagggcatgctaataattaccactgtcaaagaggcaaaggtgttgatttttgtatataagttaagcctcagtggagtctcatttgttagtttttagtggtaactaagggtaaactcagggttccctgagctatatgcacactcagacctctttgctttaccagtggtgtttgtgagttgctcagtagtaaaaactggcccttacctgacagagccctggctttgacctgctcagccctgtgtgttaatcctctagtagccaattaactactctggggtggcaggttccagagaatcgagtagaccttttgccactcatctgtgttttacttgagacatgtaaatatgatagggaaggaactgaatttctccattcatatttataaccattctagttttatcttccttggctttaagagtgtgccatggaaagtgataagaaatgaacttctaggctaagcaaaaagatgctggagatatttgatactctcatttaaactggtgctttatgtacatgagatgtactaaaataagtaatatagaatttttcttgctaggtaaatccagtaagccaataattttaaagattctttatctgcatcattgctgtttgttactataaattaaatgaacctcatggaaaggttgaggtgtatacctttgtgattttctaatgagttttccatggtgctacaaataatccagactaccaggtctggtagatattaaagctgggtactaagaaatgttatttgcatcctctcagttactcctgaatattctgatttcatacgtacccagggagcatgctgttttgtcaatcaatataaaatatttatgaggtctcccccacccccaggaggttatatgattgctcttctctttataataagagaaacaaattcttattgtgaatcttaacatgctttttagctgtggctatgatggattttattttttcctaggtcaagctgtgtaaaagtcatttatgttatttaaatgatgtactgtactgctgtttacatggacgttttgtgcgggtgctttgaagtgccttgcatcagggattaggagcaattaaattattttttcacgggactgtgtaaagcatgtaactaggtattgctttggtatataactattgtagctttacaagagattgttttatttgaatggggaaaataccctttaaattatgacggacatccactagagatgggtttgaggattttccaagcgtgtaataatgatgtttttcctaacatgacagatgagtagtaaatgttgatatatcctatacatgacagtgtgagactttttcattaaataatattgaaagattttaaaattcatttgaaagtctgatggcttttacaataaaagatattaagaattgtta

SEQ ID NO: 2128 - DNA, 492 bp, Homo Sapiens
  misc_feature (450)..(450): n is a, c, g, or t
tttttgtttttgaagatttatttcagagtgagcatcagcgacctacaagaacctgggacagaagccaatgcctcccgtttccctgtgatgtgaaacaggaccctgtgcttcctgtggacttcaagaaatgtggacttgagctttgccatcccttcccctgatcctgtttcatagattttgctgttatattctctgtatctttacagggatcgggaggctgaattagtgttattcagggttagtaactgtcccttccttaacggtggtggtcctgatagttcgcacatttttggctgtcccaaagagcagtgcaattatgaaggcgtaaatacgaccaaagaccactctcagatacatcactgattgctggctttgtttgacggaacgtgttctttttggaggtggcccgctgttgacactcccaccagcacctcttcttaggcacagtgnaggatcccagcctatatggcaatggcagttccttctgttgtg

SEQ ID NO: 2129 - DNA, 6747 bp, Homo Sapiens
tgggtctgggttgacagaagtctgcagggctggcagcaaacattccaggccaattccactgccagatcaaagaccaagcgcaaatcctgggggaattggggaggaagccccatgtagacacccaagggaagctttagatggccctgtcttctcaaggaaccctgaaggcagcaggactctcagcccgtctagagggaaagagagcagaactcttccttgccgacagccatgcagttctcaacctgttgctactcatgcttattcctcccattcctctactttactgtgttttagagatggtgacctagggaaggagcctttcaaggctgccccacatactatccacccaccctgtgtagtaccttccagggcctatgaaatggatgagacaggagagatctctaggggacctgatgtgcacttgacacatggccttgagcccaaagatgttaacagggaatttaggctaacagagagcagcacctgtgagccttctactgtggctgctgtcctatctcgagctcaaggctgcagatccccttctgctcctgacgtgaggacaggttccttcagccactcagctactgatggaagcgtggggttaataggggttcctgagaaaaaggttgctgagaagcaagcaagcacagaacttgaggctgcctctttccctgcaggcatgtactctgagcccctgaggcagtttagggacagctctgtaggtgaccagaatgcacaggtgtgtcaaaccaatccagaaccacctgcaacaactcagggaccacacaccctggatttaagtgaagggtctgctgagagcaagttggtggtagagccacagcatgaatgtttagaaaataccactagatgttttttggaaaagccacaattttccactgagttgagggatcacaatcgcttggattcccaagccaagtttgtagcaaggttaaaacatacctgcagcccccaggaagacagtccctggcaggaagaagagcagcacagagaccaggcttcaggtggtggagaaggcttcgcccagggtgtgaatccccttcctgatgaagatggcttagatggctgtcagattttagatgctgggagagaggaggtggctgtggccaagcctcctgtgtccaagattttatcacagggcttcaaagacccagccactgtgtccttgaggcaaaatgaaacaccgcagcctgctgctcagaggagtggccacctctacactggcagagagcagccagcacccaaccacaggggctcacttcctgtgactacaatcttctctggccccaaacactccaggtcctcccccacaccacagttctcagttgtcggctcttctcgttctcttcaggagctgaacttgagtgtggagcctccttcccctacagacgaagatacacaggggcctaacagattgtggaacccacatctcaggggctattcctcaggaaagtcagtggcaagaacatctctgcaggctgaggacagcgatcagaaagcctcatctcgcttggatgatgggactaccgatcacaggcacctgaagcctgccacccctccttatccaatgccttccactctctcacacatgccaacccctgatttcacgaccagctggatgtctggtactttggaacaagcccaacagggaaagcgagagaaactgggtgtccaggttaggccagaaaattggtgctctcagatggacaaaggaatgctgcactttggctccagtgacatcagtccctatgcgctgccgtggcgtccggaggagcctgcacgtatcagctggaagcagtatatgtctggcagtgcagtcgatgtttcctgcagccagaagccccaggggctgacactatcaaatgtggcccggtgctccagcatggacaatggcctagaagaccagaactcccctttccactcccacctcagcacttacgccaatatttgtgatctgtcaaccacacacagcagcactgagaatgcccagggttcaaatgaggcctgggaagtattccgagggagttcttcaattgccttaggagacccccacatcccgacgagccctgaaggagtagcccccacttcgggtcatgacagaaggcctcagttcaggggcccttctggtgaagcagactgtctgaggagtaagccccccttggccaaaggaagtgctgcaggtccagtggatgagattatgctgctgtatccatcagaggcaggctgccctgtgggacagaccaggacgaacacattcgaacagggcacacagaccctcggcagcaggcgccactggagcagcactgacatctcctttgctcagcctgaagccagtgcagtatcagcctttgatctggcctcatggaccagcatgcacaatctgtctctccacctctcacagctcctgcacagtacctcagagctgcttgggagtctctcccagccagatgtggccagaagggagcagaacaccaagagggacatcccagataaagccccacaggccctgatgatggatggctctactcagaccactgtggatgagggcagccagactgacctcaccttacccaccctgtgcctccagacttcagaggctgaacctcagggagccaatgtgatccttgaagggctaggctcagatacctcgactgtgtctcaagaagagggagatgtgccaggggtacctcagaagagagaggcagaggaaacagcacagaaaatggctcagctcctctatcttcaggaagaaagcactccctacaagccccagagcccttcaataccctcatcccacttgaggtttcagaaagcccccgttgggcagcatcttccttctgtgagcccctcagtttctgatgctttcctgcctcccagctcccagccagaggagtcatattgcttagttgtcagcagtcccagtcccagctcccctcattccccagggctctttcccagtacttccgagtatcctggggactccagggtccagaagaagctgggccccacaagtgctttgttcgtggacagggcctcctccccaatcctcactcttagtgccagcacccaagagccgggtctttccccaggctctttgaccctctcagccccttcaactcaccctgttgaaggccaccagaagcttgactccagcccagaccctgttgatgccccaaggactccaatggataattattcccaaaccactgacgagttaggtggctcccagagaggtagaagttccttacaaaggagtaatgggagatccttccttgagttgcactccccacacagcccacagcagagtccaaaactccaatttagtttcttagggcagcaccctcagcagcttcagcccaggacaactatcggggtccaaagcagactgctgccaccaccactgaggcacaggagccaaaggctgggcaacagctttgtgcctgagaaggtggcttccccggagcattgcccactgagcggtagggagccaagtcagtggcagagcaggacagaaaatggaggtgagagttcagcatctccaggggaaccacaacgcactctggaccgaccttcttcatggggaggcctccagcacctcagcccctgccctgtctctgagttgactgatactgcagggctccgaggttctgccttgggcctccctcaggcctgccaacctgaggagttactgtgcttcagttgccagatgtgcatggcccctgagcaccagcaccacagtctgagggacctcccggtgcataacaaatttagtaactggtgtggggttcagaagggctcacctggggggttggacatgactgaggaggagctgggggccagcggtgatctcagctctgaaaagcaggaacagagtcccccacaacctcctaatgaccacagccaggattctgagtggtccaagagggagcagatccccctgcaagttggggcccagaacctctcactcagcgtggaactcacagaagcgaaactgcaccatggctttggggaggccgatgccctgctccaggtgctgcagagtgggacaggggaggcgcttgctgctgatgaacctgtgacatccacctggaaggagctctatgcacggcaaaaaaaggccattgagaccctcaggagagagcgggctgagcgacttgggaacttctgccggacgcgaagccttagccctcagaaacaactgagcctcctgcccaacaaagatctcttcatctgggatcttgacttgcccagcagacgccgagaatacctgcagcaactgaggaaggatgttgtggagaccaccaggagcccagagtcagtgtcaaggtcagctcacacaccctctgacatagagttgatgctgcaagactaccagcaggcccatgaggaggccaaggtggagattgcccgggcccgagaccaactgcgggagcggactgaacaagagaagctgagaatccaccagaagatcatttcccagctattgaaggaagaggataaactacataccttggccaattccagctccctgtgcaccagctctaatggaagcctctcgtctggcatgacctctggctataatagcagcccagccttgtcaggccagctccagttcccagagaatatggggcatacaaacttgcctgattccagggatgtatggataggggatgagcgaggaggccattctgcagtgaggaagaactctgcctacagccacagagcctccctgggcagttgctgctgttcaccatccagtctgtccagcttggggacctgcttttcctcctcctaccaggatttggccaagcatgtcgtggacacttctatggctgatgtaatggctgcttgttcggataatttgcacaacctcttcagctgccaggcaactgctggctggaactatcagggtgaggagcaggcggtgcagctttactacaaggtgttttctcccactcggcatggcttcctgggggcaggtgtggtgtcccagccgctgtctcgtgtgtgggcggctgtcagtgaccccactgtgtggcccctgtattacaagcccatccagacagcaaggctgcatcagcgagtgaccaacagcatcagcctggtgtacttggtgtgcaacaccaccctgtgcgcactgaagcagccacgggatttctgttgtgtctgcgtggaagccaaagagggtcacctgtctgtcatggcagcccagtctgtgtatgatacatccatgccaagacccagcagaaaaatggttcacggggagatcctgcccagtgcctggatcttgcagcccatcactgtggaagggaaggaagtcaccagagtcatctacttggcccaggtggaacttggtgctccaggcttcccacctcagctcctgagctctttcatcaaacggcagccactggttatagccagactggcttccttccttggtaggtagcatctcaccgtcaagatggtgctgctgagatgcaggcccaggctgctcaagagagacactgtggcagctccttgttactttccataccacagtgcaggaaaagctgatgctacctgctgtggccgattggggcagacagcactggcccagggatgctagcaaagcccagtcagtacttggtcacagctggcaccagtgcagagcaaacggcctgagctcctggcccagactatccagagtgaatgcagctctgctcaccttttggatttctcacctttctttcctgtttctgggactctgcggcagacaggacacttaaggaccaggactgggcacagccagcagagccggggactgcagtgctttggcaaggtgcttccgcaggctggtagggaagcaggcagccactggccaagactctgctctgaatctacctcctctagcattcagctctactgtgtgatgggacgttaaaaataccaaaacagaaagagggtttaagaaacagctgcacaaaccagaacaccgattcagaatcttttctccctcttgagtttttgcaaaatactttattattgatttttgctttttttctccctttccctcccaggagaagacatttgggtcttggcctgaggcaggggtgttgagcgatgatgctctgatatggagctgtcactctagagctcggtcagatggaagacactatagaaccaggttggacagatttggggtcagggttgggggctgagttcttttgaggactggttggagtggcagccagatggtggctgctgacaaggcaagaggaatttcagagattaaacattgtcctttgaggaagggagaggaggtgaatgaactcccagaggaggtgagtggcttgttgggaggaagctcagttccagaacttacctcagtgcacttgggaggggtggagtcctgagcattccatgatttctgccctggccccacctatcctaggatggggtgggatggagagtgggttcagttttcttgtactttagcctggctgaacatgaactttgtgtttacctggaagtggtaggggtgggagagattctcatctttagttctggtgcccaaaatctttggtagatggagggaactggggattcagaagatgtggtaaaggtctatttctgtagtgtggcagagatgtgtttttctaaagtgtttgcagggcatttttccctcttacctcagattaagttatttatatattgttgattgaaggttttttaaaattgcttttaaacttc

SEQ ID NO: 2130 - DNA, 433 bp, Homo Sapiens
tatacgaaagctgagaaattcaaaagctttcaacattcaagattatatcagcaatttaatgaaaataattctattggggagacacaagcccgaaaactttcaaaattgcgagtccatgagtttatttttcacaccaggaagttcattaccagaatatatcccaaagcaacaagagcagactcttctaattttaatccccaagaattttggaatataggttgtcaaatggtggctttaaatttccagacccctggtctgcccatggatctgcaaaatgggaaatttttggataatggtggttctggatatattttgaaaccacatttcttaagagagagtaaatcatactttaacccaagtaacataaaagagggtatgccaattacacttacaataaggctcatcagtggtatccagttgcctcttactcatt

SEQ ID NO: 2131 - DNA, 1538 bp, Homo Sapiens
ccggcagggggagcgaggaggaagggaaccgcggccgggccagcggaggcggcggagcgcaccgcccaccagggctcagggtcctccgaccgggtgaagcttcgctggctgccaggatccccggcagggatgcacttcagcaccgtcaccagggacatggaagccttcacggccagcagcctgagcagcctgggggccgcggggggcttcccgggcgccgcgtcgcccggcgccgacccgtacggcccgcgcgagcccccgccgccgccgccgcgctacgacccgtgcgccgccgccgcccccggcgccccgggcccgccgccgccgccgcacgcctacccgtttgcgccggccgccggggccgccaccagcgccgccgccgagcccgagggccccggggccagctgcgcggccgcagccaaggcgccggtgaagaagaacgcgaaggtggccggtgtgagcgtgcagctagagatgaaggcgctgtgggacgagttcaaccagctgggcaccgagatgatcgtcaccaaggccggcaggcggatgtttcccaccttccaagtgaagctcttcggcatggatcccatggccgactatatgctgctcatggacttcgtgccggtggacgataagcgctaccggtacgccttccacagctcctcctggctggtggcggggaaggccgaccctgccacgccaggccgcgtgcactaccacccggactcgcctgccaagggcgcgcagtggatgaagcaaatcgtgtccttcgacaagctcaagctgaccaacaacctactggacgacaacggccacattattctgaattccatgcacagataccagccccgcttccacgtggtctatgtggacccacgcaaagatagcgagaaatatgccgaggagaacttcaaaacctttgtgttcgaggagacacgattcaccgcggtcactgcctaccagaaccatcggatcacgcagctcaagattgccagcaatcccttcgcgaaaggcttccgggactgtgaccctgaggactggccccggaaccaccggcccggcgcactgccgctcatgagcgccttcgcgcgctcgcggaaccccgtggcttccccgacgcagcccagcggcacggagaaagggctggtcacagaaggctctgggctccaacctggcttgctggacgtgctcttgaagcccccaagtaagaagtctgagtccctgagaccaccacactgcaaggacacttgaaggtactcaggtttcagagcccaagtcaggaggtcaagtgtgcatgcaagaggtggcaggggacagatgtgctgctgttcccaggccacctgcacagctggatggtggaagcagttcacttaaaggccatgagttactcgggaggctgaggcaggaggatcacttgagcctattagttggaggctgcagtaagctatgatcatgccactgcactccagcctgggtgacagagtgagacccccactgtccctggtctcttaaaagaaaaaacaaacaaacaaaccaaaaaa

SEQ ID NO: 2132 - DNA, 499 bp, Homo Sapiens
  misc_feature (121)..(121): n is a, c, g, or t
  misc_feature (255)..(255): n is a, c, g, or t
  misc_feature (279)..(279): n is a, c, g, or t
  misc_feature (290)..(290): n is a, c, g, or t
  misc_feature (334)..(334): n is a, c, g, or t
  misc_feature (361)..(361): n is a, c, g, or t
  misc_feature (373)..(373): n is a, c, g, or t
  misc_feature (404)..(404): n is a, c, g, or t
  misc_feature (413)..(413): n is a, c, g, or t
  misc_feature (445)..(445): n is a, c, g, or t
  misc_feature (460)..(460): n is a, c, g, or t
  misc_feature (468)..(468): n is a, c, g, or t
  misc_feature (473)..(473): n is a, c, g, or t
  misc_feature (495)..(495): n is a, c, g, or t
tttttttttggaaaagaggtacttaatgtcacaaagtagactgtgcaaaaaaaaaaaaaagtacacccattaagttttcgtcattacctggcaagcccatggggtataatttttagaagantacggaggaaaatctgttaacagtaatgttgggtagcaatttggaatgtttactagtagacagaactcctaattaggtaaatgtgtattagaaatgaccttaaagtcttcagagtggaaggtaagtaatttgancatgaatacttagttggtaaatancattttaaganttctatttaggtttcacagactgaggcattaggtaaccctgtgnctagcctttaacattattataggttanccttcttaaaancccaaggggttacctttttggaccattgccntcccctccnccctaaaacctggggtaaaaccccggtaaagnggccactttggaccnggggttcncctcnccggtttctaaaagggggctgnccaa

SEQ ID NO: 2133 - DNA, 3346 bp, Homo Sapiens
ggcacgagctggctcgcgcgtgccttttcccctcaggttgtggggagagcggaatcctgctccgccgtcgcagcagcagcggcagccccggcagcctcgggcgacagcggcggcgcgcgagcccccgggcggaccgtaccaccgctcgccagcacgcagggggagccgcccgtctcgccgcgcacgcctcggcgaccccgcggggctgaggcgtcgccgcgcccggcagcgtgagcgcagagccggcctcgaccccgagctcggagccccgcgggccgcgcccgccgccggccccacccatccgggtcgaggaggccgaggccatggctgagacggaggagcggagcctggacaacttctttgccaagagggacaagaagaagaagaaggagcggagcaaccgggcggcgagtgccgcgggcgcagcgggcagcgccggcggaagcagtggagccgcgggtgcggcgggcggcggggcgggcgcggggacccggccgggtgacggcgggaccgccagcgcgggggctgcgggcccaggggccgccaccaaggctgtgacgaaggacgaagatgaatggaaagaattggagcaaaaagaggttgattacagcggcctcagggttcaggcaatgcaaataagcagtgaaaaggaagaagacgataatgaaaagagacaagatccaggtgataactgggaagaaggtggaggtggtggtggaggtatggaaaaatcttcaggtccctggaataaaacagctccagtacaagcacctcctgctccagtaattgttacagaaaccccagaaccagcgatgactagtggtgtgtataggcctcctggggccaggttaaccacaacaaggaaaacaccacaaggaccaccagaaatctacagtgatacacagttcccatccctgcagtcaactgccaagcatgtagaaagccggaaggataaagaaatggagaagagctttgaagtagtaagacacaaaaatagaggtagggatgaggtttcaaaaaaccaggcccttaaacttcagctagacaaccaatatgctgtgcttgaaaatcagaaaagcagccactcacaatacaattaaggaatgggctttgctaacccttctgaggtaactagactgcagctaaccaccaccaacagccattcatcatctgatctctgctggatctacagacaccgatgcagaccactcgatttcatgaccggccctattgcactatggaagttaaagtgtcacgactgctctatgcatattggatttaggggaattttcattgttacataaatgtgtgaactagtttcaacagtgttctttcatatttactctgcaaatacaaaaaaccaaaacctgcagccagtggtcatttcaaaatctttttatgttcagatactgagccttcataagggttgactacctcagatttgctgcactcattgtggacttcatgtggatcacaacttctggataagaagattacaactattaagtgtcgatgtgaaccttgcaaccagctctactggattcttatcagaaatcctgcataaaaagtcagccatctgggttctgatctgctgtaaaagatgaagatttaagtgaccttaattaacctgtcctgtgccctacccttaaggaatactctctgtagtaggctgttgttatattagacttcctggaacacaccgctgaaaagaactgatgtgttcagatcatctgtgtagggctgtgatttgtaatttaaactaattgtattctgaggtaaccacaaaataaattcaaccaaactggggtccaccaagtgggggaaggggaagggagagaataatcttgggggtttttttttttggtaatttttttatttggatagtgcttttttgttttgtttttgttctgcattaaggccttttttgctttgacttgaaataagttctttgacagagcatattgcttggttaattaagtaacctaaagtatgcattaggattgtgaaatgtctcgtgagtatgccaatcctgagggtggaaccaaatagcctttgatgaaaagggcagtggattctggaggctctacttcaggtgctgctataatgcctcatctaatcaggactaaattgtgtaggaaactgcagtgggaagaatatgctttctgctcaggctaagagggtcactgatctgtccttagaaattcagagtaacatgagcaaaacctcagctaaaacccatttaagtggcatggattgtgcatgatctttgataagaattcctcatgtacttgtgcctagtttttcaaggtattggctgttctatagatgcagtgattgtcccagctagctctgttaccagccttttggtgtgtctttatgttcatttggagagtcagggcgaaagacaggtgatgtagcacttctgtttttaataattattgcttaaaatacctattaatagttttgggtcatttaaagggacttgaggaagctacccaggattacagaagagtgtccacctaacaagatggtctggcagtttcctagttttgtatctggttcaatagaaatatgtgaaagtggtaatgtcatcatttgatgcagagtccgggtttctctataataaatccctttgccaaatgcatgagttgcagacttgctactggcaagagtgaagcaagtgggtgagtaaaactattttgacgtgggagcgttttcagataggagtttagtcttgacgaaagtgtccgtgcaggaattggactccgaggagggttacagtatctcctgacgggacctgccactcgcatctgggcaatgttgacatttgaggtggcaggcaggatgcctgccttctaatatatttgggtgagtaactgagccagccaagggaaggttgaatgattaaatcagaaatgggattcttggtaaactgaagacttttatttgggaatgaaaaaccttaaaaaaatctcttcatcgttgaactgtgcattttccctgcattttttcccaacaaaattttgttgggggttatgttactgaagaatgaacagatgagtaagtggaggtgttatgtaaaggcatattgtactcgaaatctgaagacctgcagcagatttaaattacaactcttgttataactttttaaaagattgtgaaaatatcaaaatataaatgaatcaagttttaatatactgtatgatgggtggatgaggctgtccattgtaccatttgtttgaattctcaggcatggtttggcagtgcaagaattctgtaacattaacaaattcaataaaaagtaaatatatggaaaaaaaaaaaaaaaaaaaaaaaaaaaaaaaaa

SEQ ID NO: 2134 - DNA, 588 bp, Homo Sapiens
cggctaggtcgaggcctggtgttgcgggcaccggggcggcgggttggtctacgctgtgcgctggcggacgtcggaggcagcggggagcggagcggggccgcggggcctctcaggccgcagcggcagcagttgggccccccgccccggccggcggaccgaagaacgcaggaagggggccggggggacccgcccccggccggccgcagccatgaaactccaactgtggagaacctacccccgcacatcatccgcctggtgtacaaggaggtgacgacactgaccgcagacccacccgatggcatcaaggtctttcccaacgaggaggacctcaccgacctccaggtcaccatcgagggccctgaggggaccccatatgctggaggtctgttccgcatgaaactcctgctggggaaggacttccctgcctccccacccaagggctacttccttgaccaagatcttccacccgaacgtgggcgccaatggcgagatctgcgtcaacgtgctcaagagggactggacggctgagctgggcatcgacacgtactgctgaccatcaagtgccttgctgatccaccctaaccccga

SEQ ID NO: 2135 - DNA, 233 bp, Homo Sapiens
acgcaatccagtttcaattttattcagaagtaggtcacctaattctagaaaatggttattaggtctagtgtcgcttagcaaggtacttaaaagaaaatctgcacatatccttgtgctgcccttcttaaaaacagaaaacaaaaagtgtaagatcatcattgcttcccacataggaaaaataaaatgtcttcagacttgatgtgactcaaaaataaaaaaaaaaaaaaaaaggg

SEQ ID NO: 2136 - DNA, 583 bp, Homo Sapiens
ttaggtgacactatagaagagctatgacgtcgcatgcacgcgtacgtaagcttggatcctctagagcggccgcctactactactaaattcgcggccgcgtcgacagccggagtctgcattttcctaaaaatcagagaatgccgagtggtcctggttgaaggtaaagccagaggctgtgcctatccagctccttacttggatgaatatggagaaacagaccctggcctgaagaggggcaacccccttcatttatctcgtgagcggtatcggaagctccatttggtctggcaacaacactgcattatagaagagattgctaggagccaagagactaatcagatgttatttggattcaactggcagttactgtgagctccaactctgcctcaagacaatcacaaatgacgacagtagtaaaggctgattcaaaattatggaaaactttctgagggctgggaaagtattggagggtcttttgctccatgtccaggttcacttacatcaataaaatatttcttaatggagtattgctttcaattagcaaacatatgcttcacaggaaaaaaggacatagatccaatct

SEQ ID NO: 2137 - DNA, 269 bp, Homo Sapiens
ctccgtgaaggcaaagagaacacgctgcaaaaggctttccaagaatcctcgacatggcaaggaggagctcgttccagtcgtgtcagataatatccctgttcacttttgccgttggagtcaatatctgcttaggattcactgcacatcgaattaagagagcataaggatgggaggaaggtcctcctacagtgctatcagactccccctggaccaacatctccggatcttgcaagggcaggtgctttgaacttcaagaggctggacctcct

SEQ ID NO: 2138 - DNA, 610 bp, Homo Sapiens
  misc_feature (192)..(192): n is a, c, g, or t
  misc_feature (490)..(490): n is a, c, g, or t
cccggcgcgaggccggcgctgtgctcgcctcggagatcgctgctctttagctgggtgcagaaggcggctccgcggctcgcggacgactggctgggcgcgaatcagattggggggctttctcccggtcccctcccacctcgtctgggctcgcggcgtctccggggaaagccgtggccccgagggcggatccgngaacacacatgtgaaagacacaatgaatggtcatatttctaatcatcccagtagttttggaatgtacccatctcagatgaatggctacggatcatcacctaccttttcccagacggacagagaacatggttcaaaaacaagtgcaaaggccctttatgaacaaaggaagaattatgcacgggacagtgtcagcagtgtgtcaggtttttctcaataccgtgttgaacacttgactacctttgtcctggatcggaaagatgctttgatcactgttgatgattggataagggaattgaanttgcttggtgcccaaggtcaagtgtgggctcaggatttggttctttcagtgggtgaccaggctgtgagcctggttgttcttgatgtcatattgaactgtgggattttcctttaaaacaat

SEQ ID NO: 2139 - DNA, 367 bp, Homo Sapiens
  misc_feature (332)..(332): n is a, c, g, or t
cggccgcttaattaagacgggccgcaaacgttttttttttttttttttttaaataagaaatagggtttattgagaaagttcggcaagcagagaaacaaaacagacacacaaccccctggctgttcacagctcaggcctaagatggttgtgttctgtggccaggccccctaaggctctgtgctttcataggaactggagagcaattgtcaacaagggaaactgaaagcatggccttcagaactctggctgacggcagcctgttcttttgttaagctaatttagacctttgttcagctaccaggagagaaaattaggtgtaggagccctggtcncaagctctggtcttaaaaaccatcatcctgcttta

SEQ ID NO: 2140 - DNA, 516 bp, Homo Sapiens
tttaaactggaaaacataattttaaagtgatggattggggggcaagaaatgaagttgggaaacaagtgtatggattatggcaatcaacaagcaaaggtgctttctccttgacaagggtttatccgggttcaaaggttaagggcaaagtgtgggaaggagactagaagacaaatatctgggcctgtggtagagcagtcatcaagcttttgaacgtagttctgtgggtccagactgtcttgagagatggcaatgatgattaggtctctagaaggccacctctgtggtctgaaggccattctgtttctgggtcagagggcctgagctgaggctctggggatttgggcactgggtctcacagttcgtcttcttctctgggttgggtattccacctggggctgtagatcggggcacaccattggagggcagtccatcttccagcatgccaaggcagagctgccataactgaggtgccgatggccagtccttccctctcagcagctcctcctatccccggca

SEQ ID NO: 2141 - DNA, 3269 bp, Homo Sapiens
ggtcgtctcgggtgaggaggtcgcgccggaagtggctctagccgtggcgcttcggcgtagtaaggagcctgcaacagagttttgttgtttagggggcgcggcaccgcaccgctcccttcaccttgcagcagccatggcgaaaggcagagtcgccgaacgatcgcagttgggcgctcaccacacgacccccgtgggggacggggcagcggggacgcggggtctcgcggcgcctggcagcagagaccaccagaaggaaaaatcctgggtagaagctggatcagcaagaatgtcactccttatattggtgtccattttcttatctgcagcttttgttatgtttttggtatataaaaattttcctcagcttagtgaagaagaaagagtgaatatgaaggttcccagagatatggatgatgccaaggctctaggaaaagttttatccaaatacaaggacaccttttatgttcaagtacttgtagcttattttgctacatatattttcttgcaaacatttgctattccaggctctatatttctcagtatactctcagggtttctttatccctttccactagccttatttcttgtttgtttgtgttctggacttggtgcctctttctgttatatgctttcctatttagttgggagaccagttgtatacaaatacctaacagagaaagcagtaaaatggtcacagcaggttgaacgtcatagagaacatctcattaactacattatatttttgagaataacaccatttctgcctaattggtttattaatatcacatctcctgtgataaacgtgccattgaaagttttttttattggtacttttctaggtgttgcacctccttcttttgtagccattaaggcaggaacaacactgtatcaacttacaacagcaggagaagctgtttcctggaactcaatatttattctgatgatcttggctgttctttctattctgccagccatcttccaaaaaaaactaaagcagaaatttgagtaaaaataatcatctgatttttagttttgctgtcatcaccatctcaggattaacagatgcatccatttatgttttaaaatcacctcttcagtaattaaacaaggaatttgtaaaataaaatttcctatcagatagttaaagtaatacatttaagtgacaaggggagaagaaagtaaaaatggaaattggtatactgtgaaaagtgctatcaatagttaaggtagacatcttagacatcttataaattattataccaagggtagctgtagataatagtagtgtggtaggaaattgttgatccagctaattcattcaatttaattgaatattttttatctttaataactaaaatagatatttttaaattctagattttttaaagtagtgttgcaggttttgttaatgttaggcttttttcagagcataaactggaaaacttaaaaagagatttacattttcttcctctttttttttttttttttttctgttttgagacggagtctagctctgccgcccaggctggagtgcagtggcgcgatctccgctcattgcaagctccacctcctgggttcacgccattctcctgtctcagcctcctgagtagctgggactacaggcgcccgccaccatgcccagctaatttttttgtatttttagtagagacggggtttcaccgtgttagccaggatggtctcgatctcctgacctcgtgatctgcccgccttggcctcccaaagtgctgggattacaggcatgagccaccgcgcctggcccattttcttcctcttttgaggtaatggatttgtttggagatggcatgttagtagacgactgaatatggaaaggatatcgagttatctattttgttaattttatttttgttttttatcatctagatttttatcatggattagtctgaaatttaaagttctggccagtcggttttctttcatcttgtagtttttacagtatttccactgtgcatatgcaaaatgggtattacataactgtatcatatttggtattgataattttttttttttttgagacggagtcttgctgttgcccaggctggagtggagtgcgtggtgtgatctcggctcactgcaaactccgcctcctgggttcaagcgattctcctggcccagcctcctgagtagctgggattacaggtgtgtgccaccatgcccagctaatttttgtgtttttagtagagacggggtttcaccatgttggccgggctggtcttgaactcctgacctcaggctatatgcccacttccacctcccaaagtgctgggattacaggcatgagccactgtgcccagcctggtattgataatttatattcagataatttgttatggctctttaatatcccacaaggggctctaaaaagcaaacattcaagagtatgtagtttttagacattaagttaattattttaaacagtgacagcaaaacacaagtgattaaatatagtttatttgttccaatgactaaattttacctcatttattaatctggtcattaaggaatatatttaataatattatgtaattattctttttatgcatgatacacctagaaaaatgccttttgtttctattgatggctttgttgtttggagctacttttgattacttattgcagtttcccaatttagtctttactttatctaactcacaaagtaaaattaactgatcacatggcaactactgtatttaaatagttctggaaaaatgaaagtgctttttgctgcttggtaaatgggtaatgcccttgattccttgactgtaggacatagctgatctaaagtactctgtcagttttaccttcacccatgactgtcattagttgtcaaagttgaaaagtactttagctgtgagaaatccttgtatgtttttattataagaggtataatcatcctcaaagcctgtttttattacatgatgtggactgattattttttctatcacagtgttaacagatggattttattgtaaatacaaagaaaacatattgattattgtagtattcttatgtcacctggccttttgcgtgaggattatttattatttctagcaaggctttcttcctttcttattgcccagagactgactgatacatcttttgttatttttacacataaattaaacatagcctttttggacaaattcactaaatattaatgtataaaatgtaattgagtaaatttttatcagaattttaaaaataaaagagcttagactcagtaggaactc

SEQ ID NO: 2142 - DNA, 516 bp, Homo Sapiens
  misc_feature (513)..(513): n is a, c, g, or t
tcagcctgctgggcctatgatgataagcagggctgaccctcttgggctctgtagctaagcccaaaccctgctgaaaatggggcggggaggttgaggcagtgtgtggcaagtgacacagacggggactcccagctgggggtccctggaattacttgacatcccacagctggtgtcttcagcagtcatctggggcaacaatcccacctgcccgttgtggttgttgaggatatcagagcttttgttttaaagcgcttgccacaaactcttaagatgcggatgggtttcccctgtgaagcactccacaggcgggatgcaggcccatctgaggaggggcttggaaggaagaggagcacttgagacggggcagaactgggctggctggggctcagcgacactcccatttgcagacaaactgggctggggaaggcagctcccacctggcagaggatgccttctgccccctgacaggagggaggagacaccgcatccccgacttttcagccctcacgtgcnatc

SEQ ID NO: 2143 - DNA, 336 bp, Homo Sapiens
ggatgatattagtcccaacatcccagaagctgtacactacccctgtgatattgtccctaacttccagaggggagaggatgatatcactcccaatatctcggaagttgtacatcccccgtgatattgttcatcatatccagggagacacaggatgacattccattgaatttcacgacaggtgtacacgcacagtgtgatattgttcctaatatccaagaagggagaggatgatattactcccaataaagcagtgggtgtacattacccctgtgttattgtctctaatatccggcgccgggggaggcggcgagaggataacattccctcaaatttagc

SEQ ID NO: 2144 - DNA, 1264 bp, Homo Sapiens
ggaaaattaaaaaataagccaggcatggtgggactacaggcgcctgccaccacacctggttaatttttttttttttttttagtagagacggggtttcaccgtgttagccaggatgatctcgatctcctgacctcgtgatccacccgccttggcctcccaaagtgctgcgattacaggcgtgagccaccgtgcctggccaagaccttctttctaaagcagctttatagtgaaacattttatttagaaatctggaccttctttcttcagtttactgtaatccacattcactgagtagaatttgtattgatccctgtgacctagtttcttctagggcacccagttattctttctgtccctagtaaaatctggattgaactgtgccagatgcaggccgtacagtgttgctccagtacctccagctccagcagacacaaagagggagatcagactcagatgcttcttggcctgacggaagatctggcagcgcgtgtttgtaccaggggcctccagttcaaaaggagaaaacaaacctagctaccaggctctgcactcagtggtatccgcacttcagcgaggctgttaactgccccatgctgtcacactgtgggacacaccatctgcagcaagataaatttgaatgtgcagtgtagcatagtaaacgaaatttatgtacagcaaagggaaaacagttatcacttctttttaaaaactaaacatggatgaaaattgcgtgtcagcatcggagcatgtcagattgggagcagcaagagagatttagcccagccctcatctttcatgaatgaggaaaccaaaaccctaggattttaagacccagttgggaaaaggatgttctaaggagggttctgaaacctaaaaactcatctctgcagtgccttggtatctgttatttattttgagttagtagtaacttgaaaagtaccaagtcttaagttcctttagtgttaataacttagtagatttttaaaaattctttctcttttcttttcgggaaataccaaaatgagctccagtttacgttaaatataagtattatatggggtttcatgctctcttcatattcctaatgatgttacaatggaaatcttcaggtggaggagaatactccgactttctcaccgtgttctgagccttgtaccagagcagggagtggttgtgggaaagaagtcatggcccctcaggaggatgaaagggtggacatgcaggtgacaagagaaagcgccagagacaaaaaaaaaaaaaaaaa

SEQ ID NO: 2145 - DNA, 2202 bp, Homo Sapiens
ggaaacatgatccagctgaaggactgattgcaggaaaacttggcagctccccaaccttggtggcccagggagtgtgaggctgcagcctcagaaggtgtgagcagtggccacgagaggcaggctggctgggacatgaggttggcagagggcaggcaagctggcccttggtgggcctcgccctgagcactcggaggcactcctatgcttggaaagctcgctatgctgctgtgggtccagcaggcgctgctcgccttgctcctccccacactcctggcacagggagaagccaggaggagccgaaacaccaccaggcccgctctgctgaggctgtcggattaccttttgaccaactacaggaagggtgtgcgccccgtgagggactggaggaagccaaccaccgtatccattgacgtcattgtctatgccatcctcaacgtggatgagaagaatcaggtgctgaccacctacatctggtaccggcagtactggactgatgagtttctccagtggaaccctgaggactttgacaacatcaccaagttgtccatccccacggacagcatctgggtcccggacattctcatcaatgagttcgtggatgtggggaagtctccaaatatcccgtacgtgtatattcggcatcaaggcgaagttcagaactacaagccccttcaggtggtgactgcctgtagcctcgacatctacaacttccccttcgatgtccagaactgctcgctgaccttcaccagttggctgcacaccatccaggacatcaacatctctttgtggcgcttgccagaaaaggtgaaatccgacaggagtgtcttcatgaaccagggagagtgggagttgctgggggtgctgccctactttcgggagttcagcatggaaagcagtaactactatgcagaaatgaagttctatgtggtcatccgccggcggcccctcttctatgtggtcagcctgctactgcccagcatcttcctcatggtcatggacatcgtgggcttctacctgccccccaacagtggcgagagggtctctttcaagattacactcctcctgggctactcggtcttcctgatcatcgtttctgacacgctgccggccactgccatcggcactcctctcattggtgtctactttgtggtgtgcatggctctgctggtgataagtttggccgagaccatcttcattgtgcggctggtgcacaagcaagacctgcagcagcccgtgcctgcttggctgcgtcacctggttctggagagaatcgcctggctactttgcctgagggagcagtcaacttcccagaggcccccagccacctcccaagccaccaagactgatgactgctcagccatgggaaaccactgcagccacatgggaggaccccaggacttcgagaagagcccgagggacagatgtagccctcccccaccacctcgggaggcctcgctggcggtgtgtgggctgctgcaggagctgtcctccatccggcaattcctggaaaagcgggatgagatccgagaggtggcccgagactggctgcgcgtgggctccgtgctggacaagctgctattccacatttacctgctagcggtgctggcctacagcatcaccctggttatgctctggtccatctggcagtacgcttgagtgggtacagcccagtggaggagggggtacagtcctggttaggtggggacagaggatttctgcttaggcccctcaggacccagggaatgccagggacattttcaagacacagacaaagtcccgtgccctgtttccaatgccaattcatctcagcaatcacaagccaaggtctgaacccttccaccaaaaactgggtgttcaaggcccttacacccttgtcccacccccagcagctcaccatggctttaaaacatgctctcttagatcaggagaaactcgggcactccctaagtccactctagttgtggacttttccccattgaccctcacctgaataagggactttggaattctgcttctctttcacaactttgcttttaggttgaaggcaaaaccaactctctactacacaggcctgataactctgtacgaggcttctctaacccctagtgtcttttttttcttcacctcacttgtggcagcttccctgaacactcatcccccatcagatgatgggagtgggaagaataaaatgcagtgaaaccc

SEQ ID NO: 2146 - DNA, 610 bp, Homo Sapiens
  misc_feature (386)..(386): n is a, c, g, or t
cacgaggtgtgcaactggtaaaatggagctttgtgcaagaactgacccttctgagcaagtcgagggaaattgtgaaattgtaaatgaactaattgctgcctccacacagaaaggccagataaagaagaaaaggttgagtgaactggggatcacgcaagctgatgacaacttaatgtcacaggagatgtttgttgggattgtggggaaccagttcaagtggaatgggaaaggtagttttggcacatttcttttctgactacagtgatgtaagtagatagcaaaatactggattttgcacatgctgccctaagaatcactgctgccattgtagtttgctgtattgtctgtattttatatttgattatttgggcttgagtgaaaggtanatttatttccatttgcaggtgttgcacataaaacactccctctttataagaaaaatcataaatgcatataaaatagaaaatatttggagattgcttatctgaaagtcttgctttcttatacacatggttctctcatattaagcctggtggtaactttttagtgtaattacctttagcacttcaaagacgaggaagtaaggaagggaatgcaagactagtgcata

SEQ ID NO: 2147 - DNA, 290 bp, Homo Sapiens
gcacgaggtgccttacacaaagagaaactctatacagaatgtatgtcatggggtggggtaacagagtctttactgcactgttaggtgatggcacacagagcatgtcccagaacatttctgtgcttaattacccaaccaaagagatctgaagtatgtatgtcgtactgtaatgggggtttatgcctggacaattaagtgttttatttgttttctgaaatgatgtgaacttatttttctaaacactatgctaaataaactttatatttatacataaaaaaaaaaaaaaaaaa

SEQ ID NO: 2148 - DNA, 398 bp, Homo Sapiens
ttctttacttaaaaaaaagaagctccagaaaggaaactttgaagcaaaataaggactccctctccctccagaacataaagaatgaggtgtgttttgtttgagttggtggcaacatttaaactcttgtttatcccctaggaggtaaggagaagatattttccaattttcccaaacagggtgttatgaggtaaagttctgtgagagaaaggtgaggcccttaaatctgtcaaattattaactgatttttcttctacaggtggtgattttttgaatttcctatctttgtctttagcacccaattttagagaccaaatggttggtctaatcaaatagttattttgtgttatccagaatgacccctgcattccactctccagtaacttcctgaagcttttatc

SEQ ID NO: 2149 - DNA, 5770 bp, Homo Sapiens
gtgagcccgggaggcggacttgcagtgagccttgatcacgccactgcactccagcctgggtgacagagcaagactccatctcaaaaaaaataataataataaataaataaaaaatcccaattacagaacaggagatatgtttcctctgacaaaaccccatttttagagtatataaaattctgtctttcatttccaaccatttttcaagagaagctgctactatcttgagacttcgtattatcatgggagtactgtaagttcagtctcagggaatgctaaattagagtaataagttttatatccttcattctgggagaggaaatcaacataaggtgttgactaattgattatcctggaacattttgaatatcggggaaggaagatgatacttctttctcaagaaaagaaaattggattattaggaatacatcttgacccttttccactcaatagaccagggaaaggggttacagagagcctcctcagatctgtttgtgcctttcaaaagtactgggggcagattctcaaaactcttagattggtgttgcatccctgccacttcacatgacccttccatgttaaagctgacttttcttgccagaaagttttccttgtgacaagaaatttgcaagcttttcaatctcaggaatactggattctatagccaagaactcatgaaagtaagtgtaaactatcctaggtaatttcaggtactttctcttatgcaattaattttattaactgatttctggtctatctccagagataaaataccattccttcacaactgtattgtctggaagccccatgagatggtaattataggccttctactagccagcagttctctctggatactggcatcagcaggtctcctttttcttgtgctgcttggacaggtacctaccgctggcctcttcagtggccacaatcctcagtcctcacctgctggtttggagactcatgagcaccccaggcagctcaagctgaataaatagctgcagacatggccaacaacatggggctcaggtctgtcacttaacttagagtctttacatgaaatatcagaatgggaaagagaatgttcctggtaaaactctgttttcattaatttgttatttttcaaaaaccgagccacacctttggaagtaatgatttggccattccagagattctggggctaaagtttgtttttccagggctgctgatccttttccagatagctccagagtatgatgaccccagccccatcccaatctctagcgaaagggttatgcaaatctcagggtgttgcctctaaagaatctaaagaatagacatgctttgggcttactcagtgtaccagattctctagtgggccattctcatttgatgttccctagaacctccctgtcttccaactgcaggatgtgtttacttctcttctgggcttcccctggtttctgtcctagttcccaccccaagtttaagaagacttagattcatttattgctatctgaggccactagtgagatttcagatctctcttttgcaacattttacccatttcccttccccaaaccatgtgcttattagatggttccactcaggaagcaaggaagctaaaactcaagttaatggtctgtggatcccacgaaagtgtgtgtaaactactgactgtttctccactagaggcatttaattgagccaaagatgatggaagaagaaactctcaaagccatgtactttgttaggtgtctggatttttggcctgtttgcagcctctcctagccacagacagacactgtctcctctcagagaaaggccagtgtttcggtccaggccactggtgagtgtcggcacccttgaggtgggcatggagtgagcagaagaagcctggagaagagagaactatttaaaagtgttgccagttattcagcttccaggcggctttgcacctccaaaggtgcaaaaaggaaaaagaaagcagaaaggattcagcatttaagcagaaagaaaagggaaattctactctaccagatgagccactggttccactggagcttatcagtgaagtaacactgcaggagccctggtatccttccctcagagatatcatcaggggccctcaaaccccattgtttatgccagcactgaccgcactttaagcacacacttaccaatcagaggtcgtgtaattggcctaaatctaggcccagttattactacaaatcttagtcaccatactctctcgcccaggctggagtgcagtggtgtgatctcggctcgctgcaacctccgcctcccgggctcaggggatcctctcgcctcagctcccgagcggctgggactgcaggtgtgcgccgccgtgcccggctaatttttgaatttttttgtggggatggggttttgccgtgttgcccgggctggtctggagctgctgggctcaagcaatccacctggctgggcctcccaaagcgatgggattgcaggcgtaagggcccacgcccagcctaccatactgattttcaaggcagggtctaacccttcataagatgtgagttcttccaacccaataagcaggcagctttgaggacaaaaaggcaacattaaaagataagaccctagaagtcagaacatctgtattccaaggccaccccttctccttttagtcatgtgactttgggcaggtcaccctccctgtctgtaaaatgaggttggactggataatctttatgtgccctttccttttggcttaaaattctgtgatttattcattcttaggaagatcagcatatttattgggatttctgcttcaaaaattctttctaacctcaaaaatccaagtccagaattttttgttttcttctggatttaaactgtttaatatgagcacatcaaggttgacttctcatcctttttgggaagtgaatttaatattgagggtaattgaatgatgttgcaatggctttccctcctgctggcttggtaagaatattaaagcctgcagaggtggaaattggagctcatggagaaatggatagaaagcaatttgttgcaggcagcctttggacaagttgttttaataggaaatagacctgctgcttcataggtttcctcaaccacctttcctcagctttcttaaaatgggatctacattggctcttcacacccaaatagcagactaatcgtttttctgcttagcaccgtctggttcattgtcttgaactctgccttacagcagcaagaaaattttcctcgacaagaacctcaatctttagttccattgagctccccctctggattttggacttaccagaagtaggaggttctgataccattcaagatggtctttccttcaaagcaggtctgaagaggagactaccaaagcagtgtttacaaacccagagtccacacaaccatattgcatagaacagcacttggctttcacaagcctcctacaggacctggtgtaattggagtgaaagggcagagaccctggaagtggaggtggctgtgtgctgcgatgggaagaaggcagaaggcccaggggctttggacatagagcagggtggaagctgcaagtactgggaaggaagagagtttcacagaaacaaagctttgtcacacagaaatgagttctgtctcactggtgacttcatccctcaggctccagctgagcagagattttaatcagcttccttaatgggtattgacactgctcaggaagcagtagaccctgtcagggacagctattgatcttttgtgttctgattagattggaaaatagatcaacttcattgtagtccaggaactgttggtcacagctactaggaatgaggtgatttctgagggctgagaaaaaacacagaatcttggccagcagccagcagctgcatggtgaaagatgcattcacttctcctttgagagttggggttgagggcaaacatagaacccaggtttggcttacaacccagtgtcccggaagccctccttcgggagaactgtaagtaagaggtgggtgtgtctaaagacaataccattaatgaatgttctggccttacctaaaaaggtttagcaatttggggataactcttggatctagcttatgtgcgttcacatgcacatttgctagcccagagcttttaaaatgaggtctggcatatacttgattacaaatgaaaactcagaaaccaattttatttattaaatcatatcttttgtttttccccctcccttctaatcccccaaaggacctatttgagctgttccccaattcatctgcttattttggaccatgaatctgccagagtgatattttctgttatttctcctccaaatttttccctgatgtttccaataaagatttacttgggtggccccttaaggtgacatcaggatgctcttatgtccttccagaataagcatacacttcactcctctccctttcatctccctctgcattcttaattccttgcttttctcacttggagccgagggtgctttagagaggtggttttccatgaatcagccaagattcctgtagaagttgggtataccaaccaccaccaccaccgccccctattccagtttcaaagctcctcggctatgctaatgtcccctcagagatgaggtttgacttttaggcccgtatgactcctccatagcctggccaaggagaccatgagtagccatgtctggtttactctttatcctgagactgtttgtttatagcttaaaacagaagtgtgtcttcccagcacaaacctaatcaatcagtgtatcagtgcatctggtggcaacagctcagcccattcaaagagcaaggattcaggaaaggcacactgatggtggggagcctcttaagagcctctaatgttctcccaaaaccagagttgagagtcggagtgccagtcgtcggggcccactattcctgaataagggacatgcaagggccagaagtagcttgactctcgcctaaatatctgtgcctttgcctgtcctttctcccactctactgaaacccggaacagattcccgcttgccttctgatgaagagaggttaggtaaagagagtttggaggaaaaaagacaccaggaggcaggctgtggggtaggagagggttctgagaggaggcagcaatccagaatacctccttttctagccagcatcccttgaacttttgaaaggttgtgcctaccactggctggcacaccagggcaatgatttccctgcagaaggaaggaaagaatgtttcacccttgcatccttcttggagaagctacagcctgtgctcagttgagtggttcacactcagactttggctttatggttttccttcctccttgtctttgccctgaccttgatcaacaggggtgaaaagaaccaccctgaggtttccatgcctctcccattttagtggtagcattttgtgtctttactccacccttcaccctagttccaccaaggttcacacaccagatgtaactgtttttcagctgagttgtatggattaacttcagtccactgtaaatacacctgggatggggtggggttggggttgtttagggagaagcagccagacttgctttgtgaactgaatgtatttttatgcaattttgagtggcctttcaaccctaagatgaatggttttgttttactggttgttgttatatagttttgagtattctgtgtttgaaagtttgggaataataatattcacttctatatgatgcctgtaaacacaacagtatttataaatgagtaaataaaactgtgttttaactttg

SEQ ID NO: 2150 - DNA, 968 bp, Homo Sapiens
ccaagcagctggaggctctgtgtgtgggtcgctgatttcttggagcctgaaaagaaagtaacacagcagggatgaggacagatggtgtgagtcagtgagagcagcgactggacccagagccatgtggctgtgccctctggccctcaacctcatcttgatggcagcctctggtgctgtgtgcgaagtgaaggacgtttgtgttggaagccctggtatccccggcactcctggatcccacggcctgccaggcagggacgggagagatggtctcaaaggagaccctggccctccaggccccatgggtccacctggagaaatgccatgtcctcctggaaatgatgggctgcctggagcccctggtatccctggagagtgtggagagaagggggagcctggcgagaggggccctccagggcttccagctcatctagatgaggagctccaagccacactccacgactttagacatcaaatcctgcagacaaggggagccctcagtctgcagggctccataatgacagtaggagagaaggtcttctccagcaatgggcagtccatcacttttgatgccattcaggaggcatgtgccagagcaggcggccgcattgctgtcccaaggaatccagaggaaaatgaggccattgcaagcttcgtgaagaagtacaacacatatgcctatgtaggcctgactgagggtcccagccctggagacttccgctactcagacgggacccctgtaaactacaccaactggtaccgaggggagcccgcaggtcggggaaaagagcagtgtgtggagatgtacacagatgggcagtggaatgacaggaactgcctgtactcccgactgaccatctgtgagttctgagaggcatttaggccatgggacagggaggacgctctctggccttcggcctccatcctgaggctccacttggtctgtgagatgctagaactccctttcaaca

SEQ ID NO: 2151 - DNA, 310 bp, Homo Sapiens
ttctcccaaccctcttccagcttgaatcacatcattccctttaagaatttccattcattttagtttcctgcctaattgacatcttcactacataaaatactggtataaaaatactgcgtaccaagatttgatacaactagcaaatgttcattggtttacaacaaacccaaaatactcatccaaattatgggctgttggatttaggaaaataagattcttgagcgattccagttgcatttgtttatacagaacacatttactcaggaccctgcagtgtcagcttcgttctttgggtatgcagccttctatc

SEQ ID NO: 2152 - DNA, 429 bp, Homo Sapiens
gtggtttcagaggggctcatgcttcctagggcagctgaacccatccccaggaagacaggccatgggagcatgacaggtagcctggtagcactctcctccttgtccctttttgattgaaacatggctgtagctgggggtaggggcagtgcaggcccatcaataattcagcaagatggggaaaagctgcagctcctccagcaccccctgctgctggggccaggctagtgttcgcaagcatgcctcagtctggcatgtgacttctcgccctgcaggtgccctggcaggagggactggcttacgcaccctgtgcaggatcgtcttctcagcttacagagcctagtgtgattcaacaaccctccatctctgcccccaacatgcccaactgatctggtggagggaactgaagatgaaggcctctcaggcaccatg

SEQ ID NO: 2153 - DNA, 3292 bp, Homo Sapiens
ttttttttttaaataaatatttttaaaaataaatattaaataccatctagttccaaaactcccaaagaaatccaacacagagtagcaagcatgtatatatcagaacagcatgaagtttaaggccatgtcttgggatagggcagacctgcatttgggtagctgtgatctcacatgctgcaaaaattacttcatttaaaaaaatgtggctaggcgcagtggctcacgcctgtaatccaagcactttgggaggccgaggcaggcggatcatgaggtcaggagatcgagaccatcctggctaacacggtgaaatcccgtccctactaaaaatacaaaagattagccgagtgtggtggcaggcacctgtagtcccagctactcgggagcctgagacgggagaatggcgtgaatccgggaggcggagcttgcagtgagccgagatggcgccactgcactccagcctgggcgacagagcaagactccaactcaaaaaaaaaaaaaaaatgctaaggtgttacaagtaacaacttctctaagcctaaatatcctgatatgtaaaaataggggtaataagatacaacttcatggggttgtcaggattatgtaacttaatttatgtaaaatgcttagcatgttgtccggcacatagaaaattgtaactgttgtctcatcattatcatacttcattccacaaatacttattgctatttgccaggtccagccctagtcataatacgctcaaaatgcatcttaatatgttacacttcacatcttcacagtctgtctgcgaggcactaaagttcacaagaaatgctaccttgcttcagaaggtttgaagcatttccatgaggccaatgaagactgcatttccaaaggaggaatcctggttatccccaggaactccgacgaaatcaacgccctccaagactatggtaaaaggagcctgccaggtgtcaatgacttttggctgggcatcaatgacatggtcacggaaggcaagtttgttgacgtcaacggaatcgctatctccttcctcaactgggaccgtgcacagcctaacggtggcaagcgagaaaactgtgtcctgttctcccaatcagctcagggcaagtggagtgatgaggcctgtcgcagcagcaagagatacatatgcgagttcaccatccctcaataggtctttctccaatgtgtcctccaagcaagattcatcataacttataggttcatgatctctaagatcaagtaaaaatcataatttttacttattaaaaaattgcaacacaagatcaatgtccatagcaatatgatagcatcagccaattttgctaacacatttctttgggattttgcccttcctggggtataggggatcagaaatattgatccatgtgcacgcagataaaatggcttctgctaaacagactaaaatctttctctctagtctttctcacttgtacaaacccagtttgttttcaaaaaatcacagtagcaatgcaactcatcactctagaaaagcaagcttaggctacctgaaagattttcccttggaagtttagcgtatgtttgactaacaagaattcsctacatcagagactctaggtgctatataatccaaaaacttttcagcctgttgctcattctgtcccatgctggcaataataccttgtcagcccattacccttattttgaattgctccatctcctggtgggacttgtatcttgtctgccatatcagaacacaaacccctgaagaggttctgatttgattttttttttttcttcatgcctaccctttttttggaagtttccagccgcaatttgaaakgaaatgacaaggtgtatatttgatcaattttcattcccaccattgcattacaacctctaacttaaatgggtaaccctaaggcatatcaaagaagcagaytgcatgataaacggaaatagaaaaaaagaacctacatttattttgctttagcatccttactctcaccttttatgagattgagagtggacttacatttccttttttacattttcgtatacttattttttttagccatcattatatgtttaagtctattatgggcaaccaatctttggaagctgaawactgartttaaagaatgctatcttggaaaattgcatacgtctgtgcaattttttattctgcctagtgctattctgcttgtttaactagattgtacaaaataacttcattgcttaatatcaaattacaaagtttagacttggagggaaatgggctttttagaagcaaacaattttaaatatattttgttcttcaaataaatagtgtttaaacattgaatgtgttttgtgaacaatatcccactttgcaaactttaactacacatgcttggaattaagttttagctgttttcattgctcagtaataaagcctgaattctgatcaatagaaaatgtgttcgagtgttcattacagttattcaaaatatgttggtttatattaaacttggcagagtttgaggggaattaccctgaatttaatcaaactggtgattcggatatactcagagaacaattttacctggcaatgaagaggtatggtctggctagaggagggaaacttttaaaaaattttagctgcagaggctgggcgcagtggctcacacctataatcccagaaaccctgtctctacacaaagtaccaaaattagccaggtgtggtaaggcacgcctgtgatcccagctactcaggagactgagctgggaggatttcttgaactcaggaagctgaggctacaatgagctcagattgtgccacgacactgcagcctggatgacagagcaagaccttgtctcaaaacagcaaaaaatgtagctgcaattgtatctggttgatcttgaccaactccctacttccaacgtaaccacagtcttcgtaaaggtaataaccataatgaaacgggtggacactggtgagtaagtgcattctcttcacatttcaggtactatgctagatcttatataattctcatttatcttgaggaacaaccctgagaatttaacccggagaattaggctctagaatcatttcatattacagaagaagaaaaaaaagagaggtaagttgccctaagtcacaggccaggaaatagtggaactgtcactggaacttaacaagctgactcagatcctgtatacttactacccatggggagcaataaaaggtaaagcccattcagaaaggcaatgggagtggattctaatccagtatctcaatttccttaggtgaagtaacaatctggactaacag

SEQ ID NO: 2154 - DNA, 259 bp, Homo Sapiens
ggcggccagggaagcggcggctccgtgaccagtgggtgccctcgcagtgggtagggtcccggagggtcagcggcaattggcgcaacgcttgctgccgggtttggtccaagggctgcgacgtagcgggactgcacgctcgggagaagtgccacgcgcgtctgtcgcctgaccggggaggctggggagggccaggcacggaaacaagactgcagaagtttctgggcactcagtcgggactctcatttaatacccagagaga

SEQ ID NO: 2155 - DNA, 560 bp, Homo Sapiens
  misc_feature (441)..(441): n is a, c, g, or t
  misc_feature (504)..(504): n is a, c, g, or t
  misc_feature (536)..(536): n is a, c, g, or t
gtcgttgaaatttggattcaattgcctgttgcacttttacattaagtgttgcttaaataaacaaaaatagagcataaattcaatattctactgtctaaacattttaaagcaatggttatgccatcataaacaagtaaaatgcacctaatttgggtcttttgacacctcttgttttaagtttcctgtatgataaagttcttcacagtttaaaatattgtgaagaaatatatttaactatattcacatacatattatgtacatgtactatgtctttgttgtacccataaactttgaatacgtgtgtatcagtaggataccccacacatattggcaggaaccctgaataatatggttggtgtggactgaaatgatttcccagaaaggcttagaaataagaaaagaatattattatgaataattgtaataacagaaattttaccntatttacatagtgcctatctccccagagggaaatatgccttacagacattttttagtaactcngtgaggtggggcatggggacaccatccattcncatttccgcagccagtaactaccc

SEQ ID NO: 2156 - DNA, 222 bp, Homo Sapiens
ttttttttttttttttttttttttttttttttggcatttcaaggcacaattttaatagcttttaattcctttcccagttgtgtacatccagtccagtggtgtctttttatacacgataaacgcttatcattgtcggtcagcatgtcaatgtgcacagccatacatcacaacgagggtcggcacctgtataaaactacagattctgaaaacagtggcacatac

SEQ ID NO: 2157 - DNA, 172048 bp, Homo Sapiens
gatcatgcagtccttgcctgagccaatgtctagaggggtttttccactattatcttctagaatttttacagtttcaggtcttagatttaagtctttaatccatcttgagttgatttttgtgtaaggtgagagatgaggatccagtttcattctcctacatgtggctagccaattatcccagcaccatttgttgaaaagggtgtcctttccccatttttgtttgttttgtcaaagatcagttggctgtaagtatttgggtttatttataggttctcaattcggttccattggcctgtatgcctattttaataccagtaccatgctgttttggtgactatggccttacagtatagtttgaaatcaggtggtatgatgcctccagatttgttctttttgcttagtcttgcttcggctatgcaggctctttcttggttccatatgaattttagaaatatttggcattggtgtttcttttctttcttttactttttttttttttttttttttttttggagacaaggtctcactttgtcacccaggctagagtccggtggcacaattatagctcactgcaatctcaaactcctgggctcaagcaatcctccagcctcagcctctcaagtagctggggactacaggcatgtgccaccacacttagctaacgtttgtattttttgtagagacaggatctccctatgttgcccagggtggtctcaagctcctggcctcaaacattaggagtacagatacaagccaccttgcccagcctgacactggtgtttcaaaggctttcaccctctgtgtttggatctctaccttccaacacttaaaaaggggctagagagccagagacaacatggaagagcctcttcctgttcatagtggtccatatttaaaatggctgaaagactctcatgtctcatatttttttaatcttgagtccctttgtctaatacatcctttaacaaagaggaattagagacatttgcagtcattttggtctaaactagctgatagagcaggcaaatccgttgtctgtggttatttccataaaaaatggcacactaggataaacacgccaagagtctggggaacctggagagaccagtttgtactccagaatgacacagtaacatttagttggcaagaatttgtgtttattgccacagaaaaaaatggttactcctcagcaaggctggaatcagttaaaagaatacaaacaaagttacacttttttgtgtgcctgagttataactgcaagttttctttaaaactgtccctttcttttctctagtattcttcctggtcatgtacaataattcactaaaggtattcctaatgggaataatcaattatgactgagagctgttttctctatcattggtgtcagcttagtgttcatattctcacactgtagtggtgctcttttctctaacatttgttcatactgttctaatgttctgaccaatgatacagcttcatgacacctccccaagggctgtctccttttgccctgtgcttcatcttatgttatcgctacactcacttaattttgtaccccttctccaagatttataaaaatggtaaatatgattgtttgcattgattcctaggaaaccccactgaaacatctcccttgaaagaagtatccatttacccctgtgccttcagcctgaatttgctctcccctaatttgagtaaaataactcttagagtttgtgatttccctaaaaagttaagcataaaatttgacctagcaattctactcctaactatattccaaaaagaatttaaaatagatgctcatatctttgtaaacaaatgttcgtaatggaactattcacaatagccaaaatgtagaaataacccaaatgtccactaatggataaatggataaacaatttatggtatgtgcatgcggtgaaatattattcagccataaaaaggaatgaaggggtcaggcacggtggctcatgcctgtaatcccagcgttttgggaggccaaagctggtggatcacttgagctcaggagttcgagatcagcctgggtaacatgataaaaacctgtctctacaaaaaatacaaaaattagccatgtgtggtgccacacacgcatagtcccagctactggggaggctgaggtgggaggatcacttgagcctgggaggcagaggttgcagtgagctgacattgtgccactgtactccagcctgatgacagagtgaaaactctgtctcaaaaaaaaaaaaaaaaaaaaggaatgaagtactgatacatgctacagtgtggatgaaccttcaaagcataatgctaagtgaagctagacacaaaattgtattagtccatttatttgaaatatccagaatagataaattcgtagaaagcttgggggttgcaaggggctattggtagggagcaatgaggagtagctgcttagagattgcaggatttattctggaatgatgaagtgttttggaactggagagaggtggtggctgcacagcattgtgaatgtactaaatgacacttaattgttcacattatttattatttatttattttttttgagacagagtctcgctctgtcacccaggctggagtgcagtggcacaatcttggcacacagcaacctccacctcccaggttcaagcgattctcctgcctcagccttacaagtagctgggactacaggcgcctgccgccaagcccagctaatttctgtattttcggtagagacagggtttcatcatgttggccaggctggtctggaactcctgacctcaagtgatccgcccacctcgacctcccagcgtgctgggatcacaggtgtgagccactgcacctggtctgtattgttcacattaaaatggttaattttagggtctcactctgtcatccaggctggactgtagtggtgcaagcatggttcattccagcctggactcaggctcaagcaattctcctgcctcagcctccctagaagctgggactacagttatgcaccaccatccctggctatattttatttattttttattttttgtagagacaaggtctcactatgttgcggtcactggcctcaaactcctgggctcaagcagtcctcctgccttggcctcccaaagtgctggcattataggtgtgagccactgcacctggcaatatgtagatctgttcttatcatagatcttagcaacctcagcatacaatttttctttcttattaagttgtgaactttcaacttttcacttaaaggaatcactttatggcatctctttggcatatctgaattatcagtattactacttttgctctttgggaccagtattacataaaataaggatgacttgaacacaagcactgaaatacagtgatgtaatgatacagttgttcgactggaaaacccaaggaaccaatttgaaaactactataaataatactataaataataagagactttagtcaggtgactgattacaaaattaatatttaggaatcaatagattaatagaaaaagtcttacttacaatagtaaccaaaaagataaatttctaggaacaagtttaacccaagaaatgtgcagttttctgagtgacataacagaagatttgaacaaatggaaaagtgtacctattgtgtcttctgggtttgatttttatttttcaaaaataatactaaatattttggtgaggatttgaagtaaaaggcacttggcaaaatatggtaagatgtgatttggtgtacacctccctaaggtcaggttggcagtatttgtcagtgtgtaaaacatacatgctacattttgtgtaacaaaggaaggaataagaatatataatagtgtttgtttgtttttatttgcataagtgatgcagggcggtttcttggcttcgcccaggaaggaattcaagttcaagagctagccgatggtagcagacagctttattgaagctgtggcagggttatagctccatgactgctcctgcagagcagggctaccccacaggcagtgtgctgagagcagcagctcagtgacagttctgcattcacagttatacccactttaaagtacatgcaaattaaggggtgagttgttcagaaatttgtaggaaaagggtgataacttctgggtgctaccatggcaatggtaaactgacatgtcaatggcactggtgggcatgtcttatgaagaggtgcttttttaaaaaaattcttttgagacaaggtctggctctgttgcccaggctggagagcaatggtgctatctcagctcgctgcaaactccacctcccaagctcaagcaatcctcacacctcagcctcccggttagctgggactacaggcgggtgccaccacacctggctaattttttgtacattttgtagagacgagattttaccatgttgtctaggctgatctcaaactccttggctcaaaccatccacccacattggcctcccaaagtgctgggactgcaagagtgagccactgtgcctggcctggagaggtgctttcacctcttccctgtttcagccagtcttcaatgtggcctgtagtaaagtcccacctcctaccccataaggaagcttaggaagtcttcacaataaaataataggtaaggtgtagatggaaatgggatataggggggccaaaaaaaaaaaaaaaaaccctaccagaactaataagtgaatttgaaaaatctgtcaattcaaaagatgataaatattgtattgttattataattagttaataatctttgacatttaaagccacccactataatccccaacactgtgagagagttgagacactgcaagaccagcaggttttagcttcaccttctcagtcatacttagaaggcacaatatccttctgcagacccaaggtctttctctccactgcactccccaggtaacttgtgtgccgtgatagcacagccaatactttggagacttgagcaaatggtggagggaaatgccaatcaataatattgatgataaatgtttaccagatgtctgatcaatcaataatgaagcaaaacagaaacaggaacaaaatgaaacaaaaattaaggtaggggcagtgcattgcctgttattgcgtgactggtggccagttatgagacctctcctctcacaccccaccgtgttcagctgcaattatgctttaaatgtttactctctctgacaatttcctttagttaatattgatgatttgggtttgttgttttcctaattattcttttcaaggctaaagtcaagcatatttacactacgcttctctatgtatatttacaagaagcactttctcagactgaagcagcctgtcttcaaagaaataaccacacaccacgcatacctccaattgttcttcctgaagcgtgttttattctgtgtttttctctctctagcatatctcctctgaattttattcttgtgccataggccttatagcattgctctgttgtgtgttgaattgaaatcctaaaccctgtggctgtgactttatttggaaataggatccttggagacatgatcaagttaaggtgaggtcacactggaatagggtgggccctaaatccaatgactggtgttcttataaggagaaggagatttaaagacacacacacacagagggaagacagccatgtgcagacagacagagattggagtgatgcagctataaaccacgaaatgccaagaatttccagcaaccaccagaagctaggaaagggcaaggaagaattcttcctcccttagagccttcagaaggagcacaactctgctgacatttgacttcagagttctggcctccagaactgtgagagaatgcatttctattgtttcaggccatccagtttgtaggaatttgttatagcagccgtaggaaactcatactcactcttcacctcagcttatctaaattaaacatgtcagacagaaacactatgaatgatttggtgggttatctttataagaagcatgcttaggccgggtgtggtggctcatgcctgtaatcccagcactttgggaagctaaggcaggcagatcgcttgagctcaggagttcaagaccagcctaggcaacatggcaaaactcttgtctctacaaaaaatacaaaaattagctgggcatggaggcacacacctgtagtcccagctactcaggaggcttgggtgggaggatcacttgagcctgggaggcagaggttgtagtgagctgagatggagccagtatactccagcctgggtgacagagcgagagaccctgtctcaaaaaaaaaaaaaagcatacttaatcagaacctgcagttatttacaaaatcaattacctaacaagtctatcaaatacatttctttctttctttttttttttttttttttgtgacagagtctcgctctgtcgtccaggctggagtgcagtgtacgtttcttacaaatattgttttaaatgaaataaaagtgtgatcgttaaagccattcagaactcaaattactatgcctattactaattccatttggaactccattacagaaagaaaaggcaaatgggaagaaactagttaaattttctttgatacaagagatgttgtccgtttaaattatctaacagagagccaagtgtagtggctcatgcttgtaatcccagcactttgggaggccaaggtgagaggattgcgttaagtccaggagttcaagaccagcctgcgcaacatagtaagaccctgtttctacgaaactaaaaaaattagccaggcatgggggcacacacctgtagtcccagctactcaagaggctgaggtgggaggagggttgcttgagcctgggaggttgaggctgcaatgagccgtgactgtgccatgcactccagcctgggtgacagagtaaaactctatcttaaaaataaaaaataaataaactctgtaacagaaaccttttgttgtagaagtttcctggctgggcgtggtggctcacacctgtaatcctagcattttgggaggcagaggcgagaggattgcttgaggccaagagttcagcccaacctggccaatatagtaagatcctgtctcattaaaagaaaagaaaaaaaaaaaaaaagaagtttccttactaaggctgcaagaaaaatcagtgaagaagctattaattgacaagtgagcacttcatataaatttgggccaaacaggctggaattgaagtttgggaagtgtttgctcatttatctcctgaggttggttcaggaaatcggcaactactacctccatatcatttgctctccttccttttagaactccatggcaatgttttgaggattaaagaggagagtgatgactatccaaacgtcagagaacgcaactatgagactagagacactggaaaactaaaaaagtaacgggcctttgctgactcagggagatgatttcccaagagggaagaaaactggaacctgagaaataagtgatttagtaatgtggctgctaaaatacggaaaaactagaatgaatggcttacacatttttgaaatgaagttagaagagggttatactgtgaagaagaatgaaaaagccaaacatttcattcaggtaagcatatcacataggagaaactctaggtgactttggtttggcagtgagtttttagatacaacaccaaagcacaatccataaaagaaaagaaagatagataagttggacttcattaaaatgaaaaacttctgctctgcaaagacactgttaagagaatgaaaacacatgccacagactatgagaaaatatgtgcaaaacacctatctgataaaggaagtatgtctgaaatacaaagaactcttaaaactcagcaataagaaaatgaacaacctgattaaaatatgggcaaaagagctgaatggaaacctccccaaagaatatatgtagatggcaaatgaacatatgaaaagattctcaacacaatatgtcactagaaaattgcaaattaaaacaagataccagtatacacttattagatgagctaaaatccaaaatactaagaacagcaaatgctgatgaggttgtggagcaacaggagctctcattcattgctggtgggaatgcaaaatgatgcagccacttggaagacagtctggcagtttcttaaagattaaacaaaggcttaccagacactccagcaattgcactctgtgtatgtgtgtgtatttatatatgtgtgtgtatatgtgtgtgtgtatttatatgtgtgtatttgtgtgtgtgtgtgtatacaggtatccacaggggattggttccggaaagctccatggataccaaaatctgaggatgctcaagtttcttacataaaatggtgtgagatttgcatataatctatgcacatcctcctgtatactttattttttattgtatgtacttattttttgagacgggttctcagtttgtcacccaggctggaatgcagtggtgtgatcacagctcactgcagccttaacctctgggacttaagcaattctcccagctcagcctcctgagtagctgggaccacaagcatgcaccactacacgtggctaatgttattttttgtagaaatggaagtctcactgtgttgcccaggctaggcttctgtatactttaagtcatttctagatcacttataatacctaatacaatatataaatgttatgtaaatagatgttatactgtatttttaaattttgtatttttttaattgttctattgttattttttattgtttattgttttgtttattgttgtttattttgtttattgtgttgtttattgttttattgttgtttattgtttattgtttttattgttgtttggaatatttttgatcccagttggttgaatccatggatgtggaacccatagatatggcgggccaactatatttattatttagatcaagatatatttcaatatataaatttaaaaatcttttctgaaataaaagaagattgactcttcttttcaagtcaaagaacataccatgtgccaggcaaaattgattcaaacgtatcttcgtaaaactattggacaagggatcttctcttgctacctgaataaatagtgtgaaaaatatggttgttgaagagacaaagtaatagtatctgtcaattcattttgataaacttcagttttgtaagagattatatatattttgtatatattttgcattatttgtatatatgcatattttatattatatattttatatatgtgtgtgtgtttatatgtatgtgtgtatatatatatttgactctttatatccatgggttcatctaattacctctgcttctatttaacattgtactgggctgttttgtagtgatgttcagggaatacaatcaggacagtgcagttctgctctgtagaggagtttcatgggtggatgttgaagagcctcaagtcaccttcccaaccctcctaccaatatagcttctccctgactggttgagatgaagacttaacctgaagattggtttgatgttactggttttctggtgcccaggttatatggtttggctgtgtccccacccaaatctcatcttgaattgtagttatcataatccccacatgtcgtgggaaggacctggtgggaagtaattgaatcatggaagtggtttctcccatgctgttcttgtgatagtgagtaagttctcatgggatcttatggttttataaggagcttcccccttcactcagctctcattcttctccttcctgccactgtgtggagaaggacatgtttgcttccccttctaccacgattgtcagtttcctgaggcctccccagccgtgctgaactgtgagtcaattaagcctttctcctttataaattacccagtctcaggtatgtctttattagcagcataagaacggactaatgcaccagggctctcttagtgtttgttcttccccatcacacccttcacatctttctctctctgtcctgtctttcacacacacacatacacacacacacaccctttagctcattactgtaatactgtcgcttctgtccttccccagtgttccttattggacagaggagctaggggatatgagttcacagaccaaactaagatatctgagtaacacaaccacttcaaaataaaaaaataaaaaaaatcatggccagatgatggataacatcagaaagagatgcgttagaacagatgaaccaagagtttagaataagcataataaatatattaaaatatgtaagtgaggatattagcaacatgataataatgaaatacattgtatatgtacaattccaggtttcagggttttacttttagcacattaaatatggcattccattgtcttttggccttcattatttctgatgagaagttagctgatttttctactcatggttccctgtatatagtatatgctgtttttcttggtcattttccagattttctgttttttagtaggttgattatgatatgttcaagagtagttttctttgtgttaagttgtgttgagcttcttggatctgtaagcttatatttatcgtcaaacttgtgaaatttttggccattatttctccaaataatttacttctccaaatattttttctgtcccattgtttatttcttctccttctaggaaatgtcctataagttactgaagctttgattatcttttcaaatattttcatctctgttcctcagattatataaattttattgatttttattcaacttcaccttttcttattaagcctgtctagtgagagtttcacttcagatatcatgctttttaattttagaattgccatttggttcttttttgtagtttctagttctttgttgaaattgcccatctgttcattcattatgactgtgttttcaaagtccttgaaaacatatattatatttgctctgaaatctttgactactaattccaatagatgaagtgtttcaggattggttttcattgactgcttttcttttctttttttcttttttttttgtgacagagtctcactctgtcacccagactggagtgcagtggcgccatcttggctcactgcagcctctgcctccccggttcaagtgattctcctgcctcagcctcctgagtagctggaattacaggcacgcaccacctcgcccagataatttttgtatttttagtagacatggggtttcaccatgttggtcaggatggtctcgatctcttgaccttgtgatctgcccgacttagcctgccaaaatgctgggattacaggcgtgagccactgcacctggccaactgcttttcattgactatggatcacatttccctgcttgttttcaagtttcaagttttaaaaaaattgtattattctagacattatagataatacaatatagagaatctggattctgttaccttcctctgaagagcatttattttcaggcagctaacttggcaggcataaatttccaaattctgtgtcccctgagatgagtggcagctaaactttctgctcagttctttcaacttcctgtctttcaccttctgcttgtttcttgctgggctccttaaattatcccctatccatgcacatcaggagtcagccaaggatttgatcagattttatatgcacttttaagaagcctctgtggtttcttcatttcttagattttctttctaaatcccattctctgacttgtcaaaccagtaagactagccactttctggccatcctgtgctacctgttctgaagagtaccctcaggcaaaagccttgtgatcacaaatcttccccgctgcacttccttcttctggtggtttactcccctctggtttctgcctgcttttggtctctccagtgccttccaatagttgggttttttattatttctataatgatcataatacaatacaagcgactccaccactactagaagcagaacctctgacttttgatttaaaacactcaagggaagatgttgacttgtctgaaatcaaatacaaacatccaaggtagagatgtgcatttgctagtcatcagcatatggatggtatggaaagccaggagagtagaagagaccatttagaggggagcatgaacagaaaagggcaaccaaggagagagccatgggcactccaccattaggagatgcatcagaggagttgctggtggaagagactgaaaagaaaaaactgcagtaagaggaaaactttgggggaattaagaaaaaaaaactcttagagattcagtttctttgtttgttaaattggaataataattgctgtgtaattagtgcaaagattagatgtgatatatttaaagtacccagaagagtgcacctagaaaacatgcaacaaaaggatagctacactacccatgatttatatctgttatattttatttccttatttcatgcaaatagaatgaagatcccctacatgtcttaccaggggataggtgggtgttaggatggaaaagggagagaggatcaacaaggaagaagccagatgagagcgggaagggcctccagggtgcccatccaaagtgaactctggattggtcagcatcaaaatgggagaagtgaaacatctttccaccacccccaggactcggtgtgtttgcatgactgatgagttgactccctctggctgtgagcagtacctccaggtcctttcagggaaatgggctcaattcacacaaaagaaagtaaagcctataaatcaagtcaaaagatagagctctttaaaaatttatttactggccaggcacggtggctcacgcctgtaatcccagcactttgggaggccaaggtgggcagatcacttgaggtcaggagttcaagaccagcctggccaatgtggtgaaaccctgtctctactaaaatacaaaaattagccgggcatggtggcgggcatctgtaatcccagctactcggggggcttaggcaggagaatcacttgaacctgggaggtggaggttgcggtaagccgagattgtatcactatactccagcctaggcaacatagtgagaccctgtctaaaaaaaaaaaaaaaaattatttactagccaggcacagtggctcatgcctgtaatgccagcactttgagaggccaaggcaggtggatcacttgaaatcaggagttcaagaccagcctggccaacatggtgaaaccccctctgcactaaaaatacagaattagctgcacatggtggtgggcgcctataatcccagctacttgggaagctgaggcaggagaattacttgaaccacagaggcagaacccacaccacagtaacttggttgaaatgactaaattcatagacagaaaccatagttttaagtctttggaattaacaacaacaaaaaagataaaaagcaaaactgtctcaagaagatacagaacgtctaaacaggcctgtaacaaggagtatgatttagtcatttataaacttccccagaagaaaagcccagacccagaggtatctgtcagtatcttttcctagaacattcctacttccccaaaggcagaggttgcagtgagctgagattgtaccactgtactccagcctggggttcaagcaattcaagactccatctcaaaaaatttatttactatttgtattagtccattttcacactgctgatgaagacatacccgagactgggtaatttataaagagaaagaggtttaatggactcacaattccatgtggctgaggaggcctcacaatcatggaagaaggcaaaaggcacgccttacatggtggcaggcaagagagagtgagagccaagcaaaaggggaaacctcttatcaaaccatgaaatcccgtgagacttattcattacctccagaatcatgggggaacctcccctgtgattcagttctctcccaccgggaccctcccacaacacatgggaattatgggagctacaattcaagatgagatttgggtggggacacagccaacccatatcactattattacttatttttattatgttatttattggattataaccaaggtataaaataaacacctgttggtccatagacgtaaattattgagaaaaatagcccatacagaaatattgcaaataatttatctagatattcccttctcaaagaagtggagtacacttcccctctttaagtatgggctgtgcttagtgacttatttccaaatattatagtgtgggaagaagggggagaaaatcacttcacagtggagaagtccggcaaacaccaccttagccaggtgatcaaagttaacatcagcagtgctaagtcatattgataggatatagccttgatatgatgtgatgagaaggttactttactactgtagtcttccttccaaaaacacattacctgagtccaatcatgagaaaaacattaaacgagtcccagctgaaggacattttacaaaatccctgaccagtactcctcaaaaccaccaaggtcatcggaaacaagaaaaatttgagaaactgacatggccaagaggagtttaaggacacaccatgactaaatgaatatggcatcctagatgggatcctggaacagaaaaagaacattaggtaaaactttaggaaataagttttactgtagaactttggtaaaaacaaaggaaactgaataaagtatgaactttacttaataataatgtatcaggccaggcgcagtggctcacgccttaatcccagcactttgggaggccaaagtgtgtggatcacctgaggtcaggagttcgagaccagcctgaccaatacgctgaaaccccgtctctgctaaaaatacaaaaattagccaggcgtgctggtgtgggcctgtaatcccagctactcgggaggctgaggcaggagaatcacttgaacccgggaggcagaggttgcaatgagctgagatcacgccactgcaccccagcctgggtggcagagtgagactctgtctcaagaaaaataaataaataataatatatcaatattggttcattagttgtgaaaaaagtgctgtactaagatattaataagaaggaagctgggtgcagcatatatggaaattctctgtgctcttcttgcacctattttataaatctaaaataaagaagttgttcattgtataagtttttgtttgttttttaaaggatgaggtcttgctgtgttgcccaggctggttttgaactcttgagctcaagtgatccttctgcttcagcttcccaagtagttgggaatacacgcatgccccactgtacccttaaaataaaaagtgtgtgtgtgtgtgtgtgtgtgtgtgtgtgtgtgtgtgtgtgtgtataaaatcttaatactgtacacagagaagttcttttgagatcattttattcctggttctgaaagaggcagctgaagtaatggcttcactgtaaaaaaaaaaggataggaacaggcagggctggtgtggacaaaggcaagcagactcctaggcaggcagagatgggtgccaattaattgggcagaaacaatgaaaaggtctcagagaagcagagaaacccatatcccatcccacctatttttaaaaattgatgcctaggccgaacacatcagaagtaatcagtgggcaacactggtttaaaaaaagaaaggagggaaggaagggagaggggtgaggggggaaaaagagagggagagaatttccacttacaaaaattactcttatttaaaacagctttttggaatgttagcaagatttcacaatgcagacatctcagtttgagacagcttgattgatttcctgatttccaggaaaacagagctatcatcttgttcctgcttcgttgtttactggcataaatatgcagttcttacaaaatgtgaaatggctgctgaagaagtaaaatttaattctttttgatatattgttccaaatccccgcaaaaatgaagaaaccagtggagaaactttattcctcccttcccaaaaatgaatgtgaagaattgtggaagattttgttcctttgggagtttgtacatgaactaaaggctctgaaccagtctgttgggccccagagtcagatgggaataagcacggttcacctccatacttgcgtgttatacctacacagcccaaccaaaaactggagggcagcagccgtgttttgtaggtcccatattcccaagagtattaacatcatccacaagtgtttttgagtacccactgatagaaccacaacaatagtaaaaatagctaatatttactgtgcactctgtatgcactttaccctcactagttctatgagctgagctcttccaagattccatcttggagaaggaaaataaggctcagaggaggaaaataccctgctccaaaatgcatggtgtgacaagcaggcttacatgcccagttatttggttaaacagtctagatgttgctgcaaagaaattttgtagatggaattagcatttacaatcagttggttgtagcagattaccctccctactgagggtgggcctcaaccaatcaggaaaaggccttaagagcaaagttgaggtttctagaaggaattctgactcaagactacaacatagagatcttgcctgagtttccagcctgcctggcctgctctatgaatttcagattcaagattgcaacatcaactcttacctgaattgctagccagctggtctgtcctacaaacttcagacttgctaatccccagcaatcttgtcagccaattcctaaaaataaataaggatagatagatatatagatagatagataatagatagatgatagatacagatatagatgacagatgatagatacagatatagatagatgatagatatagattatagatatacatgatatgttgtgggaagtcagggaccccaaacagggaccggctgaaaccatggcagaagaacgtggattgtgaagattttatggacatttattagttccccaaattaatacttttgtaatttcttatgcctgtctttactgcagtctctaaacataaattgtaaagatttcatggacacttatcacttccccagtcaatacccttgtgatttcctatgcctgtctttactttagtctcttaatcctgtcagccgaggaggatgtatgtctcctcaggactatgtgataattgcattaactgcacaaattgtacagcatgtgtgtttgagcaatatgaaatgtgggcaccctgaaaaaagaacagaataacagcaattgttcagggaataagagagataaccttaaactccgaccaccggtgagccgcgcagaacagagccatatttctcttctttcaaaagtaaatgggagaaatattgctgaattctttttctcagcatggaatatccctgagaaagagaatgcgcacctaggggtaggtctctgaactggcccccacagggcgtacctgtctcttatggtcgagattgcagaggtgagatagactccagtctcccatagcactcccaggcttattaggaagaggaaattcccgcctaataaattttggtcagaccagttgatctcaaaaccctgtctcctgataagatgttatcaatgacaatggtgcccgaaactttattagcaattttaatttcgcctccatcttgtggtcctgtgatctcgccctgcctccacttgccttgtgatattctattaccctgttaagtacctgatttctgtcacccaaacctattcgcacactccctccccttttgaaagtccctaataaaaacttgctggtttttgtggcttgtggggcatcacggatcctaccaacatgtgctgtctccaccggatgcccagctttaaagtttctctcttttgtactctgtccctttatttctcaagccagccgatgcttaggaaaatagaaaagaacctacgtgatttttggggcaggtcccccaaaaatgatagatacagatacagatagatgatatatatagatgatatagatataggtggatatagatagatgatagagatttttgcaagttctgcatatatcctgttggttctgtttctctggagaaccctgactaatacacatggctaataagtggcaaagccaggatgcaaccccgggtctttttgaatgcaaaactgaggctcttaactccacactcagcagaccttgcccgaaaggctactggggttgtaatacaagcaagagctgctgtaacccagctgtgttcctactgtgggaactaacacagccaggcggggtatggtacctggtgctgtaagcaagagggggctatttttggcttttgagcaaggggatgaaatgtctcagcagcattaagggagaaggatctggcagcagaacagataagaaaaggaagagcctagagggaggaaatcattgtgtattattaatcttataatagaacaggtgcaaaggggcctagagtggccaacacagaatagctgggaggagccttatcacagaggggccccgagatgtgggatgaacagggaaacaaggcagaggcagggaggggccagcaaggtggccctgctaaatggccaagggatagagggcatcgtgggccagagtgggggagtctgatgggagagctggtctagggaggttagtttaggaaggttaagtgggaagagatgtggtggcccagtgggaggattccacggaaagcctccggagtcagatccaggctctagagagaggaccaggctggagggccagtacggctgggaagaaagggaagccacaggctaaggactttgctctgtgagctaagtcaaaggcaggaggaagctggcccagtgaccagactggggagatagagctggaaggcactgggggggtgggagacagtcacaccactgaggaagaggggctccctgtagaagggggtggcaggcatggtggagaggcctgggacccaggacagcaagatttgttgatcagagactgctgtagaacatgacagagtccttgtggaagaagggtagatggtgaaggcaggtatcagggtgtttgctagggagtcgtggtgagaaaacagaggtgacaaacacagactcctctttgaagacagtttgtcaagaaggtaaagaacccaggtgggaataaggtagtagacccactgaggagggatttaacatggacacaaggtgagtgggaaaaactgctactgagaaggaggaagtggagatgtcaggaagatggggtaatcgaggagggaagaggatgtggtagagaaaataataaaaataacagttaatgcttggcaagcacttcctttgtgccaggtactgttctgagtacattccttatctttatttctttagtgttgctgtcctcattttacagatgaagaaactgaggccccagatcacagggctggtgagaagaacgtgatatctccagagctaacacttaactactatagtgtaccacacaaggagagagcagcattagagaggggtgccacttcctctgatggaagataaaaaagaaagattgccagcctgggcaacatagtgagaccctgtctctacaaaaaataaaaataaaaaaattagctaggtgtggtggcatgtgcctgtagtcctagctacttgggaggctgaggtgggaggattgcttgagcccaagagtttgaggttgcagtgggctatgattgtgccactgcactccagcctgggcaacagagcgagaccctgtgtctaaaaaaagaaacaaataagataaaaggaaaggccgaactaaactcagatttctaaaggcaatgccctatcctgccgggctggaggaaatccaactgcagcctttactgtggttcttcctgggaactttacaaaacttctgccatcttacggaccccacaatctggagaaagcccccgtgcatatgagtctgtattgaaaccactgagatgctgtgccagttaagaatgtatgagccatacatacaagaaacctgcctgatagcggcttaagctaaaaagtgattatttagttatttcacacagcaagaggtctagaggcaggcagtcctcagagtggtttcatagttccctgatgtatccaagcatttaggaactttccatccttccattccatcgtcctcagtgtatgggccttttaccctaggcttgctacctcatagtcacaccatggctgccagagctgcagagctcacaaaaccatcttcagggcaggtagcaggtgcagaccacctgtatcttcttcccagacttctcccaagttctcttgggcaggactgagtcctaaatcgatccctagcaaagggaaaatcagcacatttggtttagggctttcatgggtcaccttctggagctgggggaaaggccaccttcccaagcaagctgcatctagaataaaatgtgagttctttaaggaagatgggagaatggctgttgggtgggtaaccaacacgtctgtctcagaagaccactgacccagtccacagggctctttggggtccatggtctgctgccccaggccacactccggacacagaaatttcagccaaaaccaggagccctggtcttagggtccagccttcccgggcacacccagcagctccttcctgggctttgccagggtgttgtggggagctggcaccgtcccaaatgaatatggggactcatgggcttcaaactccttctggtcaggagaaacctcctatctaagccacagtgcttcccaaccacacttccctctctcatcccccaccttgtcccatcccagggtcctggccaaatattctcaatagtgagacctttgggaacacagagaggaatgtattgtggcagctccttctcttggccagttaacacaaacttgtcccaaggtgtggctacctttgtgcctatggtggccgggggctcaggggcagtaacacagggagcaaaaaacacaaattcatctccatagtgcccgtgccacactggcagcaggaagaatggtgcagtggtaaattggagacctgagccctcgccctactctgggcctaagtgtcttcatcagtaaaattgtttagagggaccacagtagggcagggatggaggagttccacccattctgcaaactagatatagaggcctccaccaattccctaacacagggttccccaacccccaggcagggggccgatacctgtctgtggcctgttaggaacgagctgcatagctggaggtgagccgcaggtgagtattacagcctgagctctgcctcctgccagatcagtggcggcacaagattctcataggagcacgaaccctattgtgaactgcacatgcaagggatccaggttgcacgttccttatgagaatctaatgcctgatgatctgaagtggaacagtttcacccaaaaccattccccacccaaaacctttccatccatggaaaagttgtcttccacaaaaccagtccctggagctaaaaacgttggggagtgctgccctagcaaaatgccccagtcaggtccatttctacccagatggtgaggttgggcggtccagaggagcgggccctgatgagtgtgtgggcgtccaggtgcagtgctggaagtttccagcctggctccatgatcatagagggtggggctggggggtttgttaggaattgacagaggatacctaaagcctcatttcagtagctagaacagcctcattccaatagctcataactggggtccacaaactatagaattcaggggtctgtgcacttggattggaatagaatacaactttattttcagtcatttctatttccttggttatgaacaaaggtagcaaagtgcagttgtatcagcagtgccaatagaaattacagagtttttcatatccctttacagtttgccacaggtatctatcttaaaatattgtttacactcatctctcttcagtttaccattgtttaataggcctaccctcgatctttttattcaatatgttaataaagaaacctatacacatagtatcacgttatacattttaaaaatattttgacaactgtatataaatataactagcttactttgtaatcctacatattttatgtgtatgaaaatattattctgaaattagccaggcatggtggtgcatgcctatagtcccagctacttgggaggctgaggtgggaggatcacctgaacccagggaggtcgaggctacagtgagctgtgattgcaccactgcactccagcctgggtaatggagtgagaccccatctcaaaagaaaagaaaagaaaatatgattttgagaagcgatccatggcacaaaaaatggccaagagcccctgactgagaggggccctgttgacactcacatgccacccgcccagagtgagggcagctgcccagctgagcagggaccccgcaggaggaaccagagcaggagaatccctggcaccacccttgctccagtacacacccatgggtgctcaatgaagaagtgaggacaacttgctgccatcttcagtttgatggaatggccttaggcctctgctgccgattgtgaaatcatcggcctcttacctaaaagctcaggaggatttagggggaatgcagatagagcacatgagttcactgtgtaatgaaggaaggggagcctcccagcattagatcttagggaattgttcaaatttaaggaagcaaaagccaagagttgggaggagaggcagggagagattcctccctcctcagctgtagctatagcattgcttggggccatggaaaaacagttttccacaccctagcagacagcaaaagctatttcaatgtgccaagtgaaagttgagccatgccctcatccaaactagcccccagcctcacgcaggcagctccgggcacccgtgcacactgggttcacccttacggagctgttcctccatcaggcagctctgggcactggtgcacactgggcttgcccttacgggggctattcctccatttctgtctccccttgtgctgcccctcactgggggcagcaccaccccaatccacgccaggcaagccctgccctgggacaccgctgctgtctgttttcatggatgactcaggccccagcaaagatactctttgttcctcaaaagagggaatggagggtacacttgctcttaggaaatgtcccccaccttgcagtctggcttcctgatctctctctgttaagatcttttaagccaccccatcagccacagaacgaagcgcatccaccaagaatacctgagcccacatctccccctccctcgccccgccagctcctctgccccccacagcaggagaatggacttgtttcctattacacaggccatgtgcccactgggcaagacccaaacccgtggaacccccactccctctactccccaccccctccaccccccaccttgcactgctgagcacctccaccgccttttgaagaaacttcacagatttgagaaaactctgtgggaggggctgaggtttaattccggagtggggatggcctaggaggacaccagaggatgaagcggggggtggggtctgggagtctgaaataatagagattttcaggagagcagctcaaaggtacagcccagggccgcccacttctgcttcctgctgggctctctgccaccttccatatgacattggcctggtcggggcaaagaagtgaccgacaggcccctgggacatctttcactcattattcattcacgcacaggtatttgctcacagtgggcaatgggaaggggaggccaaaccacacactaaatgctgcccacagagggcctgcagcccaggggggatgatggagaacagctgcctggagggaggcctaaggtagagccttgaaggccaaggagaatggagaggagaatggagggccttccacgcacgggcactaaaagaaggccaagcctacttggggagaggcaatatcgggacctgtgcactgggctgcactgggcaaaaaaggctatgtgtgtcatgctgttgggagaaaatgggtcctgcggttaagtacatctgggaagttctggattaaatgaggaacggatctctttactgcaggacttgtcaagacctttaacctgtgaatgcagaatgaaccttacggtggatcccaggactggtgtcccacactgacataaggactagctaggggaggcagtgggagctgatgagattagagagaacacaaggggttttgaatgccaggccaagaaggaaggctagactttttccttggggcagtgagaattctcaggaggcttagagggatgtagactcagggaacctggggcagttttagtaaccagcgaggccagggctgtggcaagactagccagtcccagtcaaggactccccagctccttgacagcagggccattctgtgggagagaaaacagagaccatggacacagtcagcagtaagggtctcagactggcgtgaagagggaaggctgggcaacccttgaatccaagctgggtacagtgctcaagcctacttgggttccaatctgactccaccacttcctagctgtgggtgtctgacccaatgtctctgtgtcctcagggtatttgttttttttgtttttttgagatggagtctcactctgtcacccaggctggagtgcagtggtgtgatctcagctcactgcaacctccacctcccaggttcaagcaattctgcctcagcctcccgagtagtttgggattacaggcatgcaccaccaagcccagctaatttttgtatttttggtagagatggggtttcaccatgttggccaggctggtcttgaactcctgacctcaagtgatccgcccacctcagcctcccaaggtgctgggattacaggcgtgagctactgcgaccggcctgtggtttattttttagagcagttttaggttggtagaaagtatagaggttcccacctacttcctccccttctctctcctcagttttcttgatgagtaacatcttgcattagtgtggcacaattgttacaatttatgaaccaatactgatacattattattaactgaagtccatagtttacttgagggttcactctgtgttatccagtcctacagatggtaacaaatgcacaataggtatccaccattacagtattatacagaagagtttcaaggccttaaaaatgctgtctgggcctgcagggtggctcatgcctataatcccagcactttgggaggccaaagtgggaggatcacttgagtccagaagttcaagatcagcctgggcaacatagagaaaccccgcctatacaaaaaagaaaaaaaatgttttaattagccacctgcagtcctggtgcacctgggtggcacagacctgtagtcccagctacttaggaggctgaggtgggaggatggcttgagcccaggaggctgaggttgcagtaagatgtaattgtgccactgaactccagcccgggtgacagagccagaccctgtctcaaacaaacaaacaaaaaaaagctttctgagcctcagttttaacacctgtaagatgagtgtgaaactccatctgaagccccccagtctcctcctataggtttttgatttaggcctcccaacaaatcaagtatgactgaaatccactaaatgtctcgaactatggtctgatatccatcagaatcactaggcttgggtcagggcgagaggtcctcattcaaatgcacattctaaggtctcaactgcagacctgctgagtcacaagccctggggtggggcccaggaatctgcattttaacaagtcccctggtgcacaaggaaatttgagacccactgtgcccgacagcttgtgcacatggaaatttgttctgccaaagtttctcagataaaaacagagaggttctagccactgtcaggtcaaagctctggagagctgtgccatctcccaaagggagcagaacggtttgccatcaagccaggcaagagcccatttctgcctgtgcagctcgcagtctccgagcctgctgttgtttcatatcttgattgcttatcactcacccaaaataacctgaatgcaatcgcaccagctgcagctctctctgcaactcccttaatttagcagccaaacacattgggttccttcacagagcacaaggcctcagcacggggcccaggaaggggcccctccctcccagctgtctgtagtgagttgaatcatttccccctggaattcatgtccacctggaacctgagaatgtgactttatttggaactagagtatttgcaggtttaattaataaggatcaagataagatcacacaggattagggtgggccctaaatccaatgactgttgttaaaagaggagagaacagaagagacagagactggagtgatgcagcaataagctggggaatgccacggactgcccactgccgccacaagctaaaaagagccaaggaaggattcttccccagagccttcaaagggaccacagccctgccaacacctccatcccagatttccagcctccagaactgtaagggaatcaagttctgctgtttcaatccaccaggtttgtggtaattcgttagagcatccctaggaaaccaacacagcatcactgccataggcccccggcctggctcagcgcccactcagccccactctggcgggaaggaaagggccccacctgcaggcgattctccagatgggcagtttaacgtggcctgttaggatcagagctagtttctcccaaccgacatctttgaattctgcatctactaggcccatttcccacataaggagaaggacccttctgtcctctgcttgaaaggctgtattccaagaagggctgagtttggtagtgacaaatactggtccttgggcagtgtctggccggcggtgccatgcaagatgagtccctacagcttcatgccactccggcgccgtgagtccttccgggcaatggggctgaagttcacaatctccttgtagatgtgctctgagaaaggcagcatggtttaaggtgcgtaaagaggtgctgtggcgagaaagtccaccccccttcagagacagcatggagagcgaagtcagctcaaggagaaagaagcacccaggagacaatgcccaccaagaaggaggtggcaggtagggctggcagaggccaggcacaaagatggaggaagcaaggaagagaggctgcaggcggaggcgaggaagcccgaggccccagctcttacgcttccattcatccactgtgagtttctcgtgttctaaggaatcatcaaacggctgctgggcctccgtctcttcctcagggtcccggaagggttcaaagaagggatgggtgagggcctgcgcggccgtcaggcgcttgtccacgtctagctccagcatcttctccagcaggtccgcagctgcaggggcagagccaagagcctcacaccaggggctgggagagcccgccctctgggatacgctgagaggcccctggggagcgggctctgagactcaccctgggggctggcccgtgggaacagctgagtgaaatccttcctgggggtctgtggcagggactggatgtaggatttggcctggaagacagaaaagcatcaaaccccttagggctctggcctcagcgtgtagagcagggatttcagaaaagcctcagagcagggctgaaagttcaggtcagggtccacggtgagattaagacaagagtgcctgccagggtaggaggatgctgtgggaaggtgctggtgagccttcttccacaaaggcctgcagcccactgggcccacgtcaggcaagcacacagcccaggccagcctaggtcccatttaccacccaccgctttgtcgttcagcttctgcacaaactccgtgccaggcaccccggtcactttcaggatctgggtcagctggtccaggtcttggtggcaggttaaggcttagccttgctctcctggtgggtctgagactgcccttcctgcgaccccaccatcacttcacccgggcaccatggcaactgatcatccaggctccagccctgcctaaccacctcctgctctcaggaggaggcttattcttcagggctcagggctctggagagctttccaacgtgccaggctgaggggggtccctacccaacaaatggatgtggacttctcagccttcatcccagtgactcttttctgtttcctcgtcttctcaccaaaggcctgccctgcacacacaggtactcagttaatgtgtgccgtgccaaaatgtattttccacgtagtggtagaatttttcatcattttgcttatctacattttttttttttttttttttttgagacagggtctcactctgtcactcaggctggagtgcagtggcacagtcttggctcactgcaacctccacctcctgggttcaagcgattttcctgcctcagcctcccgagtagctgggattacaggcgtgaaccacacccggctaatttttgtattttttggtagagatggggtttgaccacgttggccaggctggtctcgaactcctaatctcaggtgatccgcctgccatggcctcccaaagtgctgggattataggtgtgagccaccatgcccacccaacattttgttttttttttttttttttttgagttagggtctccctctgtcacccaggctggagtacagtggcacaatcatagctcactgcagcctcaacctcccaggctcaaccctcccacctcagcctctcaagtagctgggatttttctttttcttttttttgagacagagtcttgctctgtcacccaggctggagtgcagtggcgcgatctcagctcactgcaagctccacctcctgggttcacgccattctcctgcctcagcctcctgagtagctgggactacaggcgcctgccaccacgcctggctaattttttgtatttttagtagatacggggtttccccttgttagccaggatggtctcgatctcctgacctcatgatctgcccgcctcagcctcccagagtgctgggattacagacatgagccactgcgccaggcccatgtctggctaatttaaaaaacttttttagagatggggtctccctatgttgccacatctggtctcaaactcctgggctcaaaggatccttccacctcagcctcccaaagtgctgggattacaggcatgaaccactgcgtccagccttatctgcatttacaaattattctacagggagtatgtatcactctcacattaagaaaaaaaagacagttatttaaataaagtgtctgttgaaggaaggaatccctagatggagtttggcttttccagcaaaggatacaatctttccccttgaacagagttttccctgtcagcatctctgccatgatacagcccacagaccagatgtccactgcagagggagggagagtgtcacctggactgtctggggcccagcagtcagtcagcaccgagtgaccagatggccccaggaccgccctctcaggcattgaccactgacctgtctggttgtagtgcatccagctgaggatcacctcgggggctcggtaccagcgggtcaccacgtagccagtcatctcggcgtctgcatgtcgcgccagcccaaaatccagaatctatggcacaggggataaatagaaaaggaacttgctgaggggaggaggctctgggagcggcttccaggggcttccctgggggagggcctatcccgcctctgggctgagcctgcagcccactcaccttcagttcacagtcctcattcacagccaggttgcctggcttcaggtcctggggggaggacagagaatgcatgctaggctgaggcagagatggagcttgtcctagctccaccaccacccaggggtgtgacctcagccaggccccttccccttctgggcctcagtttcttcatgtgtaaaatgagggttggactaggtgttctctcagggcccacccagctctaaaatgttcctgattcttgaagcctgaaacactcagctcagggctcactttgtctgcagcaattccccatgaagtcccctgggacacagtgactcttttgagcaggccttcctgggccgtggctgggtgtgaaaactccacattctgtgctcctgggcagtgtcccctccctccaactttcccactccttgattgccagagaaccccatacccagggatgggacaggggcctctgaggaccatggcagagaaagcactcaccctgtgcacgaccccagcagagtggatgtactatgtgggagagagagaagggtgagtccatggcccagcttccacaccaggcacttcaggctggccgacctgtaacagtgcgctccctccagcctccccaaacctcaggtctagacagcaaggcgtcccctctgccagcctccaagtccccacccaccttaaggcctttgagcatctgatacaccaggtactggatcttctcctcactgaactccatccccatgatcttctgcagatccgtctgcatgaagggcatcaccaggtagctggaaggcatgaggggttcttggaacagtgccgggtcccacccagccccaggtcagagctcagaggagggacctcagggcagaacaggggtcatagagacaccctccagtgtgcaaaaactcaactccacctcagccagccagatcaccacacgggcctctgggctcctggctcccagtctccctgtggcgggccgcccagctggcagagctcggagtaagcgctgcagttggagcgcgctcaggaaagccacatggaactgtgttcccgctcttcaaaggtactctctccttgccctcctccacaccccagggaaagccacagctaggagttagaaacatctgccagtatttccttcggcttctgtccaaatatttgatccctcagagggtcatgcccagctgagatggctccacaaacaaacaatatgtctacctttccaagaaggaaacaatacaacagtttccaggagggtggaagagggagatggggaggctcctgcagcctcttaggggattgcacaacaggataaggccagcaaaatgtaactgttacagtaaaagcaaagaccaggacaaagacaaaaaataataaaaattataaaataggccaggggcatacctccaatcccagtgctttgggagatggaggctggacgatcgcttgaggcgaagagtttaagaccagcctgagcaacatagggacccatctttctttcttcctttctttttttctttgagatggagtcttgctctgtcgcccaggctagagtgcagtggcgtgatcttggctcactgcaacctccacctcccaggttcaagcgattttcctgcctcagcttccctgagtagctacaactacaggtgcacgccagaacgcccagctaatttttgtattcttagtagagacggggttttgccatgttggccaggctggtctcgaactcctgacctcaggtgatctgcctgcctcggcttcccaaagtgctgggattacaggcgtgagccaccatgcccggcctggaccccacctttcagaaaaaaaaaaaaaaattagccaggtgtggtggcatgcacctttagtcttagctactcaagaggctgaggtgggaggatcacttgaggccgggaattcgagatcaggatgagtaacatagtgagaccccatatctataaaaattaaaacaaaacaaaaagctggacatggtggcatgcatctgtagtcccacctacttggggggctgaggcgggaggatggcttgagcctaggagttggaggctgcagtgaactgtgtttgtgccactgcactccagtctgggcaacccagccctatctctagaatataataaatttaaaacttttttaaaatgaatgttaccttaaacaattatgtaataggttgtgttttttgttgttgttgttgttgttgtttttgaaaggacatgctggaggcatctccaggagactctggattttggcagccctctcctgccggaccacacacctcccttgggggcctctccatgcccagtcccctcctgtgtctttcccctccactcgggcactggttctttcatcttggcaacatgcttcctgaagcctctctgtgctagaaccacattcccttgactttgcttcttcaactgaccaccccttctccctctctcaccaccaaacttctagaaagggcggtccacactcctggatcccactgccttacctcccagtcctgagttaacctggtttctgcttccctcctactgccagactgctcagctcaaggtcaccagtgaacacccgacaaacacaccatgactcccttttcttctgatctaacctttcaccaagtctgaaactccctctcaattctttgctgactctcctctgcctcctatcaggccctctcagcttcttccatctgctcatcctcttggatcttctctttcatgttgatatctgaatcaatactatcttaccacattctacaattatctgttcccgggtgtcagctataacccatcggtgattattccagcacaaatccacatccctagcccagaccttcgtctcctgaggttcatatttatttgcaactgtgattaaacattggaatgttcacagtttctttaaaagtaaagtgtccaaaatggagttcgttatctttcccccaagatctgttcttcctctaccgtgtatttcaagcaggaacctgcccattcctccacctctgccacctcactcagctactgcaccccaacagatggaacattgtgtcggccctgcctcccaaatggggcctcaagtctgctcttggcatcccatcacctctgctttagatccctactttagatcactaacactgacctccaggctctccccctctgcctccgagctgcttcctactcctttcttgctgctgccagtgtgcatcccccaaatcccatctgaacatatcacctcccggctcaaagtccccaggtcttgaggctgcctgtagggtcagtccagattcagcttgaccaagccagctgctggcctccacgtgccacactgacttctccatcttgtccaaatagtccagtctcattcagacactgcacaggcaaagctatacattttgcagctaaatattctggttttctgccattctgtcaaacacccccatcagccagaggcagccaaggcttcttaatccttgcttcatgctagaaagagctccaaggtccagactcacatctgtgtccccaggaaaggtgagttggtgctaaccctgtgaggactggcagatgtgtcttcatggtgttaaagctgggtaaaaagcaaagcagctgtgcagactgccccctgccaggcaagcaccccacaaagtccttcctgcctcttcctgcctgcctttggctaaaagcatctttccagagagaatcacacttgacaggcaaaggcacaggactgccagggaaggaggctctccccgccacacccggaatagaaaccctagaccctcccccaccttgctccccagcggcatgtaaggcctgcaaatgccccagaacccagtgcagcccaactcacaagtcatagaagttgcgcagggaggaggctggggtgaagacatccaggagcccaatgacctggggaagaagtcacctgtgagggctagacagacgctaccttctcctcccacctcctcctgggccctggccatgcacagggccatccaccctttcctaatacaccacctccagcaggaggcatgtctccaaccttcttggaagcagtaaaaagggcagaggcctagaggaatcccctggatttggagggagtttgcaataaatcatgacagagagtcaggctggggagaagggaaggtggggagaatgatgtgtgctcattgctgtcaagtctggtgtcagggcaagcaacacaaacccactctcaactcacctaggcagcaggaaagcataaggggagggtggaagggaaaaaggagggaacagagaaggagcttttcagccagcaaactccctgcccctgaccttgggtctccagccacatccatccttgcctgccacagggctggttcagagccaagggcaagatcaccctggctggaggccataggggaggggtttgctggagaaggatgggcttaaaatgtacataacattttgaaatcattctttgaaatgtctgccctccaatctaggtatcctgcagcaaagcctggctgccaggccctgagctgggcccctggttttcccagctgcttctatcagacaagacaatctgatggtcatgtgctcagaccgggagcctcgctgccgagattgaaaccccagctctgctactgactaaccatctaatctgtgagccttgctgtgctttagtttcctgtctgtgacatgggggcagtagtactcatatatcatgaggactagacaagttagtgtatgcagagctcttagaacataggaagtgctcaatatgtgtatattgctattgttatcagggtcacgtggacacaacgctaactaggattctagtcccagctggccacaagctctcagacatggaaccaattacaaagttcccctgtgccaatttcctctgtaggataacacagtctgtacctcacaaagtgcattctgccaaaaataccctttgacctcttcctggaaagtgggcagggaaggtctcggcaccccctcctttcaatagtgaggcgagaggcaccgtcaggggagcagggaggagactgtcccgagctctccataccgggaggccccgcctgcgcctgcccctgactccccagggcagcccccaccccctccccggggcagccaccacctacgttctcatgctgcatgtgcttcagcagcagcagctcccggtaggcgcgcttggcgaagatctcggactgaaagggtcggctcagcttcttgatggccaccttctcccctgaccgcttgtcgatggccgagctgtcgggcacaggccggtcagcaggcgaggctctcctcctgggccgtatctcccagaccgccctgacccctcccactgggcagctgggctgagaggggactaggcccaccacctagaatatgggggagccgcgggacgcagggcagggagtaggaagccaggcaggagctgagagaggggcacagcgccaggggcagcaacgtctcattgcgacgggatccacggcagggcgggagtctcactctgtctgcaacttggcgagccacctccccctcttggggcctcggtgtactcgtctgtaacagtgaggatctgcccgatgaactctggggtcttgcaagtgtacagtcctggagaaccaggcccagtcccaactcaacccccagagacctcactcagccactcggtgagaaaagggagatggccgctgggtggccccggggagggcgctgggccttgaggtccgcggtcaaggtggcgctggcgaggggccagcccagggcgggctgggcggaaaggggagagcctggcgcccgccccccgccccccagcggcccaggggtctcaccacacggagccataggccccgctgccgacgtgcgtcggggacacgtaggtcttgggcagctcccaggctgtcttgttgacgtcctgcttgtagaagccctttttccggatgaggctcatcccgggcacccgatctcggcggccccagcgtggcggctgcgttcgcggcccaacgggctcccagcgccccgacccccgctgcgcccgccccgcgccgcccgctcctcccccgcgcgagggcgggggccccgggctgctacgctcccacctgccggctcgcccaggtgcgccggggccgccacgcccgggcctgtccagccctgcgctcccgcgcttccgcccggcccgacggagccactgcggcaggtgcggcccaggcacggggtcggggctgcccagcgggaccccggtgcctcccagccgagcgcgggccagcggcggggctggtgggtccaagcaggagcggggaggcagtgcttcccagttccctccagccccggtctccgtaggaagagctccctgtgactgtgaacacacaggaaagcagaacaaaaccccacaacctcttcattatggaaaatgtcaaacatgcaggaaagaattgaacagagtaagccagcgcttctcacacttcagtgtgctcaggaatcccctgggcattttatttgattaaaatacagatcctgactcagtaggtttggggtggagccgagattctgcatttctagccagctcccaggtctgaggcttctgaaccacatctgataggaggttctaatgaacccccgtgaccccaattccccagcaaccacaactcataatcaattttatttcatccacattcctctcccaccatcgttttgaagcaaaacccaggcgtcatatcattttattcataaatatttttgtatctctaaaacgtaaggatttttaaaagtacgtatccacaatactatatatatatattttttgagactctgtcggagtgcagttgccatctcggctcactgcaacctccgcctcccgggttcaagcaattctctgcctccgcctcccgattagctaggattgtaggtgcctgccaccaaacccggctaatttttgtatttttaatagagatggggtttcaccatcttggccaggctggtcttgaactcctgacctcgtgaaccacccgcctcggcctccgaaagtgttgggattacaggcgtgagccaccgcgcctggcccacaatacattcttaaacctaaaattaatagcactaattctataataccaaatatccacgcaggttcaaatgtgcaggatttttgtttgtttttgacatggagtctcactctattgcctaggctggagtgcagtggcgccatctcagctcactgcaacctccgcctcccaggttcaagcaattctcttgcctcagcctcctgagtagctgggactacaggtgcacaccaccactcctagctaatttttgtatttttagtagagacggggtttcaccatgttggccaggctggtcttcaactcctgacctcaggtggtccgcccacctcagcctcccaaagtgtttggattacagaagtgagccaccgcacctggcccaaatgtgcagttttgaacacagtttctgtggacttcctaaggctctatgaggacaatgactaattggggcccttgccacctgtctggtggcctgtgcagcctgatggagattctttgctcaaaccacaaaggcctctgaggagcaaggtgggcaggtggggggaggagatggctgcaagggctctggatgcccagcctgacttgtccaacccctctcttgcccaggcatggggctgtggaaggggcggggaccacctgcttcactttgtcaaaaagaaggtctattgaacaaggaaagaaatttgctaggggcttacagcaagccgggggcccacactagggagtctgcagcccccaaactctgtgccccaagccctcccgggcagtcctgcagcctcaggcacagcctggaagatcattctgagatgagggtggggtgccatcatcacacaacaacacctgccattatttcagtcaggcaatctgtctttttcatttctggcacatggcaatataacagcaaatgtgtggagaatgaatggaggagtcagcccattagatgtaaaagagtcatttaatacacacttgtgtttgccatgtgcccgtcattaagtgttttatataactcacttaatcctggtaagaggcctgtgagtcagtaatatgattatcctcattttagagatgaggaacccgaggtacagagaggctaagtaatttgcccaaggtaacacagctggtaagggcagagctgggtgaaagcaagtacagcctgattctagagtccctgctcttggctgcgaggctatgcggtggcctagagttgacagaattgctcctcaaaggaaatggccttgcccacatcataaggacatgtctactgatccaaccatgtctccctcagtccatcctgccctggggtatctgatattttccccagccttttccctcccccaccccctactctggccctgagaccccatgagagcctaaggaacggggtcgcttgcctgtgagtgctgcaggagttttggacctttgggatcagtggcaccagtgcaaggtaccttgattctgaagttggggtggggtcctggaagccagattttaggctagacgcaggcaaaagagagtaactgacctcagagattcaggttttcttctggtttgaggatccagtaaggaaaggggctaggatgtggcaccaggtcaggatggcgcctctctgctgcacgtcttaaacacctgagtggggcagaggtgagcccaggaaggtggggataccaaggacatgctcatcgcccaagtgggtgcgatcttctgagagcacgagtggccactctggctgtagctccggatgctcttgagcaagggtcaggaagtgactcaggcctccgactctgctgacactgacccctactctgggcctgactggctctgcattactcagcagccaggcagtctgggagggagcccttggaggatccagttggggagtcatgaaagggaggggaggaggagagggtcactcaggtcatcctggataccctgcttctccagcctgaggctctcttttgagttccaagggccctttgctcttctcctctccaaacaccaacccaagttgtcttgttggtttctgccctatgagcatggagcatggaggcagggattcaggaaactagctttggaatgaggcctgaatttacatcctttctctgtcattaccagctgtgtgaccttgggcaaagtctggccctctctctgagcttcagtgtcctccttgtgaaatggggataataataaagtatgacaagcatattgaaagagccttaggattgtatcatttcaagtacatattcctcacgacaacccaatgaggtaggaactttcaatgcctccaaccagagatcaccagaaacacacgtgtgggtgaacaagctgagctgatgactcgttgcaacaagggagagcatgcaccatggggatcatggggcgtcccaggaagggggcgttagaaaggacttagtctaatgtttggagttgtgttaggtgattggggagaggttaaggaagtgaggctttgttctgggttgatgctgtcaggaagtggagctaacactatgattgggagtcttaatacatcttgcctagaaggaaagcagactagagcaaggctgaagctacagctggtaaaccagcagcctccactcagcttagctctacagggggatttgggtcatttctgtgatttgacaatattcatgttttgtctgtgttcagatatgattaaggagtagtttcatttttgtcttagtctgccctggtcgcggatggccttgttctatgctgatgtctgtgaaatcgtctatgttcagcacagcaagaccgaattgcaccaggctggacagctctgagcaaccaagtcctggctgataggaccaggcagctcccagatgtcagggctgctttggtctagtctattccaatataattattcccctggtacagatggagagactgaggcccggagaggttatgtaatttgcccaaggtcgcacataactaagaaagtggtgaacatgatcttcatacctggcatctggctcctaagtctgcacatttaactgtcaactagaattcctggtgcccagcaagtgcctgagaagtggctgctgttgttgcattgtcttcctagctagcctgtgagcctctggaggcagagacatggtgtgggaattggtgactggtttcttagagatcgagacaaaagccccacataactatgagactgtcatgtcccctatcctggccacccagaccctatcttgccccacgagcacagcagccaccctgtctgtcccatatggcaggaccagcatgaacctcctcaccataatgaggatgggccagcaggaacatcctcaccatgagacctccacagaaatgagaaagcatgacacatctggggtcctgtgagggtgggacaggccagggagccctagagctctggccccagctctagagagtcccatgctcttctggggctttcaagactccatgaaacaagcaaaattacaaggaggcagggagatgcagaagaaagactgcagatgtgggctgctctgtggcgtggtaagctgtgtgatcttagacaagttagttggctcctctaagcctgttttctcatttgtaaaacgagagtgggtgataagacccatgttacagggctgttgtgaagactaaacgagatgactagaaaagtgtccaattcagtgcctggcacacagtaggtctcgccagaggctccttccccaatggactgtgtcagctctgcccgggtactccagctgcccaaccccagcccctgccctttggctgtccagtccctgccccagaaggtgtcccctcagtgagagtcggctccaactcacgtccaactcctctattaagttttttgccagatactcagcccaaggattcattgacccattcattcaacatttatttgttggctgggcgtggtagctcatggctgtatcccagcactttgggaggctggggtgggaggatcacttgaacccaggagtttgagaccagcctggacaacatggtgaaaccctgtttctactaacaataataataaaaattagccaagcatggtggcacacgcctgtggtcccagctactcaggaggctggggtgggaggattacttgagcctgggaggtcgaggctgcactgagctgcacttcagcctgggcaacagagcgagaccttgtctcaataaacaagtaatttaaaatgctggtatttaatacttctctatggttcaactaaatgtagtggcaggtggtattaagtgctatgaagaaaataaggcagagtaaggatctaaaggactagtgagtactatttgatcagggaaggtctctctacggaggcaacatttgagcaacccttgagtgggtctgggagtgagcccagcggacatctggggaaagagcaggtgcctgcctcccaaacccctcaggggacacttgaccctgcagaccaggcacccagcctcattcctcctgtgcccattacttccctactccagcagcctctggtaagtccctcaggggaacagcttagagcacctgggacaccttactgacctccggaaacttttttttttttttttgagacagtcttgctctgtcactcaggctggagtgcaatggcgcgatctcggctcactgcaacctccgcctcccaggttcaagcaattctcctgcctcagcctcctgagcagctgggattataggcatggccagctaatttttgtatttttagtagagacagggtttcaccatgttggccaggctggtctcgaactcctgaactcaggtgatccgcccgcctcggcctcccaaagtgctaggattacaggcatgagccaccgagcctagccagcctctggaaacttgatggggtgctgggctcctcctgcaaggccatctccccaaccttgtctccccattacctcttccccttctcaggggcaagggctggtcagcagacttagggctcaagcagaacatccatcccagcagcaaaagataaggcaccatcagccaggtgcggtggctcatgcttgtaatcccaacactttgggaggccgaggcaggcagatcacctgaggtcaggagttcgagacctgcctggccaacaaggtgaaaccctatctctactaaaaatacaaaaattagccgggcatggtggtgcttgcttgtaatcccagctacttgggaggctgaagcaggagaatcacttgaacccaggacgcagaggttgcagtgagccgagatcgtgccactgcaccccagcctgggcaacaagagtgaaactgcatttcaaaaagaacgaaaggaaggcaggaaggaaggaaggaaggaaggaagggagggagggagggagggagggagggagggaggagagagagagagagaaagagagacaagaaagaaaaggcaccctcccccactcccctgcacctcctccacctcctcctctctcccctccttcagctttagcaccccctggtggaagacgggggtggggacagctctgtgagtcgggcacctctcagccagccttctgggttcgggatgacaggcttcccctcttcacacctccctccccacaccatccggtccacactccccgttccactccacccctaaggcctgcctccctgcacccagcccacatgtcaccctccactccaccctacaaagatgtggctggggtaaggtctggtgcccaggcctccgctctgtttgatctcggccttgtccttggtagcattcagcataatattaatctgcattgtctcctgtgacatgtccctctccacctctggacaatgactctgtaagggcgagggcagtattctggccactgctgagccccctggcactgtgcctggcccattgtagctgctcagtaaagacttagtgactgaaccaaccaaggagttttgtgtctcttctgggtactacccataggaggaagatgtggcttgaagacccaaatggtgggaccgagtaagcaatagtaggggaatatgcttggctagcctaccacagggtgggatctgggatgtgtggtcactgttcagtctgatacaatctgtcctaggatgtttctgattttgctgttcttcccttgctccctgagggaaggcctagaggcctcatccttgtggggcccccaaggtcctagcatgaggctggaccttcgtatggtggtgaaagaaccagagtgtacaacctgaatctgaggcctcttctcttgccacgaatttgcaccatccactccaaagcaggttcctccctgtggacagccctcctcaccactcccactgaagctctgcatgagccagatcctctccctatggaattgtccacctttccttccttcctctttccttccctccctccctctctccctcccttccttctttccaagcctaactctaaactcacatctacaaggaggtgttcccgagtgaactctagatccactcaccccactaaccctgtgcatatccctctccccaagacccccactgcacaccacccgcttccccctccacaggctttgtgacgtccacattcttgaagcgtgcttgtactcctgtgagccagtagagaggtagctgagttctgggagacagggctgagtctgaatctcgtgcctccatttgtagctacaggtggagcttcctcatcagtaagatgggagaatgtcacttgcatagccagggacaccaggagggtttactgaagcaacacatgccaggttgcaggcattgtgcatggtgctccctctggtccttcaggactgctcatgtgtcacctcctccgaggtccccctgacctcattacaagccatgctcacctgccttacctggcctcgtgttcttcaagccctgtgtacctgtttattgtctgcccccctctaatagaatgtcttgaggttggcgagggtaggggctttgtctattttgttcatcactgaattccacgtacctggaagagtgcctggcagccggtgactggccgaatggcagggatgtagcagggccttatccccagcagccttgttatcgctgcatctctgtctgtgtgcagctgatatgcaggcccaactcaccttcgtgcctggggcagtctctgctgtgctgacctgacaaaccgcagtaatggagtcaggtcctgcctggactcctgtgtgcagcctgcctcaggcaggagaagctgtgcaccctggaggccacctccacaacctgcctgtccagggcagaggccacagggtctccttgctccaccccttctaagtaaactatccaatgtcaggacacatagatcctccccagaagccctatggaccttggtcaggggcaaataaccccaaacaagactagcagggctacctgccatggcagaggtttgggctctgattctagctctgtctctaatttgctgtgtgaccttaggtaagtcagactgcctctctggatacattcattttctattatatgcatttaataaacatggaaagagcactaattacttcccaaaagttgttataagagctttacatacatgtaacttaatcctcctgaggactctatgagatgggttaacagtatcccccattttatgtataacaatgagacacagagaggtgaagtgacttgcccaaggacacacagctagtaagcactagagctgggagtgaagaccaggtagtcttgcccagggtcagtgctagtaaccactatgcttagctgcgctggatgatgcttgtgaaaggccaatcttttgtaagaaataaaattaagtagaaagaacattgcaagaccctgtctctaaaaaaataagagtcacagagagctccaggacaccactgtcactgtcagcccgagcacaggtgtggcaacagggatgagtaaggggctgtggaggggaagccaccctgatcctggtgactacacttccctgacaaacagcttctccctgcttctcaggcctggtcttcactccctcacacttgcccagggctgcccttcctaagccagggggcacccggatccagctttggtcacctggaaagagggtgctccagctgggcagcttgagggcagcacagctcccatgtgacaggcagccagcggcaggcagcccagctgtgattaatcttcctgtttcagagcagccctgcctccccataacgccccacccccggtagctctcagtggcctctaggataaagattaaacttcttagtctgttgggcaaggcttgcccccatccggacaggccctgcctttcttgctaatcggatcctccaaggtgtctgtgcccaggcaacctccattctagcgatccgcaagcgtgccttcctcatccctgtcaccacgtctttgcttgagctgtttgtgacctgtctggaataccatcctctgctttgccaaggagggggggtggggcatcctcgttccttacaacctgctcagcagctcttcctgggctggctttgccaggccactctcaccagcacccttagacttggaattctcagttaactttcaaacaaacctaaattgtaagttcttgagggcacgagtgtcttatttttctctatcctccttacctacctggtgattaaggtaaagccttaatccattcaaccaaattttgccaggcacctctcaagacattgagaatacacggacaaatgtcacagttcctgtgcttgagaagctcctaccctagtgagggcggcaacaggaaacagtgacaacactgtcgtcggcaggtgggagtgtcaactggggcaagcttttagaaccatttggcaatgctgccaaagtgtcaaaatgtgcaccttgttaatccggtaatcccatagccatcaatttagtgaaaacgcgaaaacagccgggggatacacacttatcaccgcattgctcatcatctgtatcaataaagaaaagtttccagcatcatggtggggggtggcggtggtggtgggggaagaggaaaaggaaacacactgcttggatgaattgtctcagatttggagagtatgttccggatggccagccttaacaaatatagactaagtgctgagggtgaaattcacttggctggtgggggtgggaggaggagtgaaggtccttgtcaaggcagaacgctgagatgtttcacacacatgccatattcacttctgatattttaaaaatagaacatcatagatactcatcatcatgatgaaaacggtgacaaaaacatatagttcttactatgagccacacactgttctaagtgctctacattggttaacgtatttaaccctcaccacaatcctgtgaagaaggcactattatcaatatcatcccattttacagttgtgataactgaggccccgattgatcaagcaacctgcggaggttacacagtgtcagtggtggaaccgggattagaacctaagctgtctggctcttggcagctgaagccctttcatgcccctctctgattccatgccctctctccctccctagaggtgacccctctacaagttggtgtttattattctcgtctgcttttagttttactatatacgtatgcatctgtaaacgatgccagatagatcgttttgcagcctcctttttcacttaaggttgttggtgagatctgccaagatgttgagtcgtctctgtttctcagcctcggcactgctgacatgtttctgctgggtaattcctcgttgtgggggccgtcctgtgcgtcgcaaaatgttcagcagcatccctggcctctacccactagatgctcaccaccctcacctccaagtgtgacaactaaaaaggtctccagacattgcctattgttcctgggacagaggcaaaatcaggggtctggggtggtggtgggggaatcattctagttcatttgtcttcactgccatttaatatttcattgcatgaatacatactgcagtttatttcctattcccctattgatggtgtttgaggtttgttcccattttttcctgctattacaaatgatgttgagtgaaaagtctgtactctgttccttgttgacatacgagaaagcttctagaaagttctagaattacctagaaccgcagctatgtacagcttctgcccttactgaatcctgccaaatggacgccaatgtatgaaagctctacagtttttgcacgggcaaattcatttgccttttcctgcatggtttctaggtttggggacatgctttgaaagcctttctccatttaaatctttgacctgtctggaaatgattgtggctgaaggaggaaagtgtctatctagctgtttcaatgccatttattgacacagatcactgaataataatgagttttaaaagcgatgttttccagatttaaaaaaatttcttggagttatgccaatctgtcaacagctattatttccaggtagtgggataatagatgttacctactacatttaaacattttcaacaataaatatgttttgtgtcatgaaagaataatagttagacaaagtaatgtggtaagtgctttgaccctggtaagatcagcacaaattacataaacacttggaggggggcacctgactcaactggaggctggggagaggactggttgggtgggggctgtttcctcaccgtgaagcagggtggggcttgttgagggcacagcagccactcggctgtttgcctccagatagggacactccccaccacaagcactgtgtcagcaaccatgatcagatagtcattgcctgtctcactgggcagagctgtgagtggctgagtttccatacaggacaatcagctctgtcatacttgagcaatggcccaggggaaatgggtctttgtgtaatggcagcggatggtgacctcacacctcacactggaaacacacagtggagccagctgatcaggtcgaggtaacccaagaggacatgcagccctggacgccacgagaaatcctgttgtctgtcagttgagtgccagggaggtggatcaaaggtgcaccggcccagaaatggcctccagcaacaggtgcttagatgttctgttctaggggtgccagcgagatggtacagtcattgtttaccactgccttttcccatgaaaacaacgaacaactccatggggacaggaatttgacttttattctttcccatattcccagtgcctgacagatggaaggtacctaatagatatttgtagaatggctgaatgagggtgcaagacaccataatgccttccaattatctttcttttgccttgctattttcattttaaagtggcagatggatggggacacagtaggaattatctagattatggccatcagccactttcaataatcttttggttcttgttctaattcattaaattgctgtgcagccaacttgaattacacagcaagacacagcaaagagaatcagaagccaattcttctaacacgtatctcttcttaaacaaggaaattccacacagcaccatttcttaggcaaggcagataacccctacatatttggtttttctttaaatgatctttgcttctaaagactattgattgtaaaaacaggaagcaaaagacaaggtgatctgcaagggattaaaagctgacagtcatttatggactcggtcaataaggactgaatgcctactgtgtgccaggtaccaagctaggtgacagggacaccacagtgaacaagacatgatctgtcttcgatgacatgcagccttaagccagtatttagcatttactgtatactcagggtttttcatgtcttaactcatttagtcctcacagccccactctctattattggtacaatcttgagcaaattacttaatcacatcaaaggttccagagcctgtatccttaacctttatatgtttttcttttttgagcaggtggtacaaacagcaagcaatgataaagcagtgtaatcagtgccaccaatgatcattccagattacagggtgcatgcagaagacacagctaatccaggcttgggaatggtcagaaatttactgagggagtgatgtcaaggctgaacagaagaacgaatacattagctcagaggaatgaggaggaggaagagggttctagagagagggactatcacgcacaaagaccaggagagaaagcaagagcacacagtgactttgtcccattagagcactgctatagagagccagagggaagcatgctcatcttctaggacatacaaagcgagtgctggcttgagcccttttggctgaaagagggaaaaggtagtttctcttcagaggcctggaggtgcatttctatcccagatgagtagagaagcgagggcaaggggcctggaactagggagagagacccagtgtgtgctgaacaagataaggcaccagtgcctggctgtggctgccagggactcctccccaatttggccagcagcagccagggagtccttatggaaattatgctgaattaatttttttaaattttctttaaaaaaaccaaaagaggattgtctaacaccaatgctataaaactctttggaaccaggagtctttcaacgttgatatcaggatagtctgttgaatctagcctcagttgtaacgtgactgagaaagagacattacttgtatagaatatgcaagaatgtaaattgcctaacatacagtagcagttcattaaaagaactactttttagtagggaggtaaggaaagtagggggaaggaggtgaaggaaggaaggaagaccatagggagccaggtctgtcctgcattgtggaggtttcacttcttaggactccaggtgtcccagagtcatttgatctgtcagcagttctcagcgggtgcactgaaatctctggggccatttttggttatcatactgatcaggagtattactgatatgagcatgcacgggccactgtgcagagtgggattcttaacaagaattgcttcacattacaaacatcctgctggacattcatgaaggtggaaaaaactatttatgattatctgagcctagactgtaacttggttttacatatcaaacaaatacttttctgcatattaatatacttacatttcccaggatcacaactgagtaaataaaaaagttctccaggctgggcaacagactgagaccctgtccaaaaaaaaaaaaagattctaattgtttgtttgaaatttttaccaagagttgcttaccactttcagaaaaatcatgactgacagcagtcagccatggtatctgagttgtcaagacaacacaactgtatcagtacgcatttggagctgtcatattcaaggtgattctatgtataggtacaagcatctaactacttcattatttcttttatgtagctatgcctgagaatttactttttatttttttttagacagggtctcactctgtcacccaggctggagtgcagtggaatgatcatggctcactgcagcctcaacctccatggcttaagcaatcttcctgcctcagcctcctcagtagctgggactacaggtgtgtgccaccatgcccagataactttttattttttcatttttttttttttttttgagacggagtctccctctgttgcccaggctggagtgcagtggcatgatctcagcttactgcaagatccacctcccaggttcaagcaattttcccgcctcagcctcctgagtagctgggacccaggtgggtgccaccacagctgactaatttttctatcttgtactaatttcgtatttttagtagagatggggtttcaccatgttggccaggatggcgagtgatccacttgcctcagcctcccaaagtgctgtgattacaggtgtaagccactgcgccccgccccagttaacgttttaaaaattttctgtagagacgggtttctccatgttggccaggctcatcctaaactcctgacctcaagtgttctgcccgcctcagcctcccaaagtgccgggattacaggtgcgagccaccatgcccagccagcacttatatatggaaatgtattcgtatttttcctttgtcatttatattggatcattatattttctttgaaattgtgtgaattatctatgaatttcacctcagcattataaaagaggtattataaaatattagttatgcaaagggtaatagatctgacaagagtttagaaccactggtttttgttaagaatctaggctgggtctgtggttttacaccttcttcttttctgctgcaactgacactcaaatggtggtggcagtttctatttttagttgcaaactgaaggttacttccttatttaacttataataacttctaaacaaagcaccttccttaaattgaactactcaaataactctgcaatataacattatcccactggctatgcgtacttagaccacagcctatggcttcaataatgggttttccagaaactgcctcaggaccatttgtcctcagaagctctctccccagttggctttagagacacacactgttcccagatgcagaaggctgcaaactccccctaacaagacagcctcgatgccccctgtcaactcgtgagatgcagactaaccagtatcttgagtgtcgacaacacaccaggcacattgagatttgttatttccttactggtctaagaaaatcttgtagtcatacccccagtttaattaccagattttctgcctgtggataatggcaaagaacttctgaacaaaggataacttaatttactcaacctactgtttttttttaagaaatgaaatgacctttattcagtaccaaacatatttcccctaaaaatatgtatttgagtctaaaaaggcctttccaatttgtacttttcctccaagatgccaagctactttttttttttttttttaaacagagttccactcttgttgcccaggctggagtgctgcggtgtcatcttggctcactgcaacctccgcctcccaggttcaagcgattctcctgcctcagcctcccaagtagctgggattacaggtgcccaccaccaagcccggctaattttttgtatttttagtagagacagggttttgccatgttggccaggctggttttgaactcctgacctcaggtgatccgcccacctcggcctcccaaagtgctgggattacaggcatgagccaccgtgcccggccaccaaactacttctttaagttacaacaggccagtgggtgttaactcttttttcaagaaaagaggctttggtgttctgcaagattaggagggatgaagtgttagattcatggttttcaaccagggatgattttgttccccagaagccatttggcaacaacatctggagacatctctggctatcccaactgggggaagggagcatgagtgctactggcattagtgggtagaggccagggatgctgcctaacaccctacactgcacaggacagcttccacaacaaataattatctggtctgagatgccaatagtgccaaaattgaaaaatcctgcttaagatccttaaaatacacccttctactgaagaagaaacaaccaaaccctcccagctgggtggagaatgccgctacaaagtactggtgcggctttgcttgccagaggcctaacagctgggtgcaatttctttccagcaactgttctcctgccttgaaaggctgggctctagccctggcaaaactgaaatttgagaatggttccccaggtcacatagacttttaaacacctttctcattaaaaaacaaaacaaagaaagaaaaggtttcttctgatcacaaaacaaaactctcagtgtaaaaaaaggtacacattacagaaatagcataaaaattaaagggcacaatcccactgcctagagatggttgctaacagttcaatgtatattcatttcctagccaggcattacctatcaacaaaaaagggggctaggatactacagtttgccactgactttttctccttcacaatgtatgttgcacatctatccatgcctagctggatggtattccactgcacagatgaccatcttattcaatcaagtccttattcatagatatgtgggttacttccagtattttgctgtacaaagaatgtgacactgaaaaacattctactttgtgcacttaagacctttttttttttttttttttttttttatgagacagggtctcactatgtcacccaggctggaatgcagtggcacaaccatgactcactgcagccttgaactcctgggctcaagagatcctcccacctcagcctcccaagcagctgggactacaaggcatgcaccaccacacctggctaatgtagagtcaagagtccccagctatgttgctcaggctgaagacttctgagaagtgtaaatgctaagttcaaagggcatgtacattattaaaacatatctgcattataaataaaagggggtctttattatttgcatattcattaaccaagtccttgcagctaccaaattatatagagaagtgaaagtcatcccaatgtgaaaacattcactaatgagctatttataaaaagttagtccctctttgcttcttaagtacctgaagccaatgtatttatcctgcccactgtattctggtcttctgttagtctctatggttatactgtaagcatatgacaaatgacacaaatagaatgcaacttaattgcaataatcacaaatcttgcaaatggtggtggatttgatgaagttgataaataatgctagaaaactgctcaaaccttaagcaaaagctctgaaaagtgtgggtgacagactcagaccagttaacaataaaaggaaagttgaggaggtgatcaccgatagatacttataaaaaagaatgtgaatatcaaaatatcaagaggccttctgaaaactgatgaagccctcaaatatttttgcaaaacttccttctatgatcacgttgcaaaaatcaaatgagaaaattattgtaagatacaaaatcagtttcacttcaaaaacaacttaatttccttgtcagaattaatatatctttaaaattatgaacatgcttttgtcattttgttccattttcatgattaaagttccattcaggtttcccctatcccccagtgtccaccacatatgaaattttggtccccgttttaagtggattcacttcaggggagctttttgtggtgtcagctctctttgggctaagcaggccctcttctcagaagcctaggaggaaggctgttctcatgtctcatgtctggtatgtgaaggcaaaatactccctacaacggtctgattctttttttttttttgagacggagtctcactctgtcacccaggctggagtgcagtggcatgatcttggctcactgcaagttccgcctccctggttcataccattctcccgcctcagcctcctgaatagctgggattacaggcatgcaccaccacgcccagctaattttttgtatttttagtagagacggggtttcaccgtgttagccaggatggtctcgatctcctgacctcgtgatctgcccgcctcagcctcccaaagtgctgagattacaggcgtgagccaccacgcccggccaactgtctgattcttaacaggagctaaaggaccccatgtaacaaccggggcccttttctctcacctccttacgaagtcactggggatggaaaggagactatgcttggtctgccttcgatcactgccttcattcccagctgccagccagggcctggacaaaaacccagctctcaatatcctcacaggctgagccccacaatccaccctgggacacctgctgggtgtcattccaaggacaccaagaaaggaagcacatcagcaaagtccctgagaactcagctgtgagaccccgtggctctttcatcccgtgatgcaattcagtcattctgaagaatattttcaaggaccgtagccagctaagacaaaacagagtcataaaatacattcgcctaaaagcttacaaacaatgtacacctatatatacaaaccaaaccttctctctggcagttttataataaaaatatatggcttatagatagtctcaaatgtcaaagatgaaaaaaacctgaacttcactttatagatgagaaaactgtagccctgggccaagggtcagcagacttctctaaagggccagatggtaaatggttgacattttggaggtcctatagtctctgctgcaactatttgcctctgtcactgtagcacaaaagcagccacagacaatacataaacagatgagtgcggctctgttctcataaaactttatttatggatactggaatttaagttttacattacttacatcacatgctacaaaatctactacttctttttttttctttcccaaccatttaaaaatgtaaaagccattcttagcaggctacaccaaacaggtggtgggccagatttggccctcaggccacagtctgctgagccctgtcatttcggccactcttacactcgagtgtagataagacaggccccaatgcttaatacttcgttcatttgctctttgctttacccatccacagcaaagacctggatactcttcaccaaaaaatgtacaactaagaagctttatcaacattttctaaatgttaggagtagtattaagatctgtcagacaagtatgccaggtcacagtttaaaggatattgatataatgccatattgtgcattaaataaaaacaagagaaaaatataataaacttgagaaactcactaaatttgaaaaataggctttattttaaccagtggtattgtctgacatcctatacggcataactgattacagccaagttcatgaatacaaataaaatagcaatttccctcattctctcttttgttttctgttcagagaaatcaggagatgggagcattatgctcagaaaccgaagagctcttccaagagctccagcttagagtccaggcttccagagcatgcagcctcctaacacgtatgtggtcacatgtgcaaagacctttattacaaaatattcagagcagtatttctgtaggaaatcacacgagcatttacaaccaaacatggctgataaaattcatcttgctgtggatggtgaggatttgaactgcaataaaggagatgaggcctttactttaaaggttcactttccttgaaagggggagagtcccgggtgagagggaatcgccatcagtctgcctccttccttcttgctccagttgactcagggggtccaccctgtccctctggagtacatgtatcactgcactgattgagaaatggaaacaccttggcccaaatacaagattctgtcacacagccaacactggaagtgactttatactttcttattacacaaaaggcttaaatatatgagtcctcatgtagaacaaaatgcctgaaattcagcaagttatgaaaacgacacttctccacccctgaggatattttatctttataaagttgaaaatacaaaatattaaaataatttgccctttctccccatcaaaaggaatcacattctcaaaggattcctacaatatacaaaattctgaaacaaaatttatttctccccaaaccaagaagtcaatgttaagctgccaagaagacccttttccataggagtggaaaagacaccttgttacttttttattttaaagtaatcatatttagagaaagacagcaaaaggagtttctggccttatgggctttaattttttactttgattttcagcatttcttagcattagttattgggagtgaagagaataacttgtttccgaagtttgggatattcctgggaaaagccctggtcttttcccatgataattcctcaaaaatagttggttgaaaacagatggcatgaataaaaatgctatacatccacctgttcctcttttcatgattttcacatcaaaagcacctgaagtatcaattgtgttcaacacagaatagcactaggggctgaagagaggtgatatcacttgccataatatcagctgaggtgacatgggatctaaactacccaagaagtcttcactggcaaacctgcctgacaccagggcctcctgaagagagcaggacaagcagctgtgcatgctcaaatagcaagacgtgcaaaacacatcctcactctgctagaaataaagagtacacaggaagtacatgacatcaagaacctgcttctgactactggggcagatattcaagaaacctctgcaccaaaggtgaagggtaagcagagaaatggcaacacctgggggtgagggagaaagagagacgcacatatacgcatgtgctcacatgcacacatgaccgcctatgaaggctgcctgattactccgggcccacaagcagctgtccaacagccctctcgacttgcccggctcagaacttcagcagctgcagtcttttaactatctacactttcttctctccttttaaggcacaaacatatttacagtttcaaatatactgtcaagatctgagaaccatactaagcaagttaatcacaggctagtgcacagaagccagttggtcctttttggctgtacgtatcactgagggacggtgtcaggtctgaagcaaccagaaggtatgggccttctctccgtgccactgtgggatgttgtcaagtctacgccccaccgtcaaggtggggtcacaggagaagccaaagtggcaaaagcatgaccgggattggggacaattcatatttttttactttgcattgaacatattcctaaaaggacagcagctcttgtctgcctgagccaactctcagaaagaagagcaaggtggaggctgccctggagcatccacaacctcctgtaaagtcactgtgatcatagtttgttcatattgtcttaccctcccacaaagacagacacacacatgcacacacactaacacgcacgcacacgcacgcacacccccttccaccatggaggaaatctctgcaacaagaggcacttgaataatatttggagagttcccgtgaaaaggccttcccctcacagtgaagtgggatcaacagaacagaaaccaggtgctcaggactccatctcttcttggtcaaggggtggtggcacaaagctgatgacttcatcataggtcaggcctagaaattgggaaggaaaagtaagatgtgagagtttaggctattctctttgctggcaagcactctgacttctaagctcaagatccttcctctctgtccaggtagtggtttgatgggctacctcacagcttgtatgtaatagcctactggaacacgttatcacacagaagttcaagggacatagaaaagaaccattttttttctcatgtttttcatcgctgagtgcctcttcttttaagctctctacggaggtgctcaagaatgaaagagcactctcacaagctacagcaacagatggtcttggctcttgggatttaactagagttctgaacttgtgttttgtggaaagaatatgggactggacacaggatacatgggttccattcctggctatgtccctaactagttctaagttaactgataagacataaattctctttgccccagttctactaattgtaaaactgtaaaagctcagagagatgttgtaaatgcaatgactctgaaaacctcaactctccatgcaaaactcctatgtgaggggctgtgcataaaatcagaccagacataagtatctcaaaggtccagagagtatcactgtctacaacagtttccaccagagaacatattcattctgcattagagacctcatctacaagctttagcaagttggttatgaccattcagtttttatttttcccaccgcttttggttagtggttcaagatgttaatcctacccttaggacttacttttccactcatctataaggaggtccctgctttcaaaggactgatcataaggatcggccactggttcatcatcaggatcgtggtactgagcaaagtaggcatgtgcaagggcttgggccgctgtaattctcttatctgagtccaatacaagcatcttctccagcaagtcgacagctatcagtaccatagacaggaaggaaaagagtttttaacatgttacaaaaaagtatgccttattgagcaaacatagttttgacccttcatatccaaacaaagaactctcctccaaaatacctactctaggatatattagccctcttctcctttatgtgtgtatgtgtgtgtgtgtgtgtgtgtgtatctgtattttctatgttttaaaatttttttattttatttttgatttgggggtacatgtgcacatttgttacatgggtctcaccacggactgatggggactgggcttctagcgtgcccattaaccaaatagtgaacattgtacccgataggttatctctcaaccctcaccctcctcctgtattttgtatttttaaagaatatgttactaaagaagaatttttttaaatgactgggattctgtttgaacaggcttttgtggaccgtcaatgtcaaactgctaccagtgtagtcaaactgtataaaacaaagcctacagctgaagtaacctacaataggtaggcagggctgttttttttttgtccccctaagctgtttatttactaacatcaaatattcatcaacagatcttcaaacagtgaataaactgggggttttacatggtgatgagggtgagacatggtattaaaatcaaagggaattttatttttaaaaatttcactatgaaaaatttcaaatatacagaaacagaaaagtaaaaactatgataaagtgaacactcatatgcctagcatattcaacaattaacatttttatatttctgtatttatatgtatttttttctgaactgttttaaaataaaattatagacatgacactttaccctccccaaatatttcaacacgaagacatcttcctatataatcataatactgttattatctctgacaaataatttctaaatatcatctaaaatccagttcatgttaagatttctccaattattccaacgttgtcttttagaactagtttgttgaaaccaggattcaattaggggccatgcactgcaactgactggttttctttagtctctcttagtctagaataatcttcttacttctaagccctgttctttcctgattttgatctaaagagaccctctgattgtcctgagaatgaccgtttctcgggatgtgtctgattttgcttcttttgctgtcatgtgtctataccctgctttccactatcccctgtacttcccaaaaaccggaagttaggtcaaaaattttggtaagaatcaggttaaacattttcagcaaaaatacaggtgatgctgtgcacgtgacagtgcattaaggccatctgtcccactactaatgagctaaaattgatcactgggttaagatgtttcccctttgaccaaagcaagtaatctgcgggatattttggtaccaagtaaatatccattcttttcacttatggctttctgcattcactgggtttccttcccaaaagcaattatttcataaggggttacaaaatggtaatttgtctaactctatatttcaaatgagtatttttgtgtttcagcatggtggcacttgggagaataaatactgccatataaccagttatcactgtggtgaaaaaggcttttgagactttgcaaattactccttaaatgtggagggtgtgggggtgagtagtgaagaggacagcttcctatagagatctactgctgtgtatattggaggctgtaaaacacccgtcctacagcttgaattccagagtaatccactggagaaatatgggcttcaaggggatacagaaacaaagtaaatattcatgtgtcaattcaagttcataagtttacactttacagtactaggtgaatgcctggattatatatatatatattcttctgatggtcttctcttcttagaaaaagaaaccttatcagctgttgattttataattgaacacagattatacgacaagtctctgttacccttagggtaaaaaggaccatgttcttataaccaataaggtcaggggcaagaacaaattcctcaaagatcttattagctgggcatggcattatgtgcctgttgtctcagctacttgggatagggaagaggaaggatcacttaaacacaagagttcgaggttatcatgaaccgtgactgtgccactgtactctaacctgggtgacagagtgagatgccatctcttaaaaaaaaaaaatcttgacagataaatacatacactaacatcaaggggtaatttaagttttaattcatgttttgggaatagcagtgaaacaaagtcagtggctgacaaaacagagctgttaatatttatatttctggcatgttcctgctcagttaatatgctgggcacgagcttgtgatagtaacactgtgctccatctgcccagcaaggggagcctcattatatgacatcactgtttggcaatgggctgtaaggcacgtttaaatgctgagaagtacagtgctgagcaccagatggaccaaagcctcctttcaactcattagcaaagtggtatctagttcttttggaggtttcaatgtcatgatttcaaagaatgggaagacctatcaggaggtatgtgacctaaataagctgctggaacacaaatatctcccctctccccctaaaaaatgaattaacacatctttctgagtctgttaagagggtgtcagtgagtactgccctgttcaaaacttaaggcttataaaatgaaacaacttcagaacagaatgacgacaagaaagaacacgacgggctgggtgcagtggctcatgcctgtaatcccagcactttgggaggccgaggcgggcaggtcacgaggtcaggagatcgagaccatcctggctaacacggtgaaaccccgtctttactaaagatacaaaaaattagccaggtgtggtggcacacacttgtattcccagctactcaggaggctgaggcagaagaatcacttaaagccgggaggtggagcttgcaatgagccgagatcgcaccactgcactccaacctggacgacagagcgagactctgtctcaaaaaaaaaaggaaagaaagaacacaacatcttttcccaacatcctgtagtacttaaggctcaaagagagcttctcacagacccttgaactagataatacagctcaaataaatcacacaaagccaatgagagcatgccagggcagatgcaaacctaagccagtctcagtagaatcgtacccacccctgatgagactgtggattcatcctagggcaggagagcgacccagctgagatatgacatactctctgtctccaaggctgacacgaactcatccacaactgcccaaaacttcaaagagcgtgagtatctctgctattataagaattatcacagcgacactaaaattcctctccataatcactatggatgaagtacttaaaaaggtaaaatcacctagccttcaccccagcttctaaagaggtcagcatggctgtcagccctcaaaaagataaaactaaacctgaagcatagctgccaagacccttaagaagacagatgacccaaacagatgcaaagaaatgcagtgagattttaaaacacaccacacaatacaatcttaagaaaagtgagaaggcagattatactcgttaccatagcatagctcccttccctattgtagggaggtcctggtctgatccttctgtgtccaccattaaacagcactgtccactgtcctcttcaagagtcagggaatgagcctcaggcaaagcagctttcaggggccatctgaagcacacatcactcctccccttcaaagaatatagtccgccaggcacagtgtctcacgtctgaatcccagcacttttggaagttgaagtgggcagactgcatgagtccaggagtccacgattagtaagatggtgagaccctgtctctacaaagaattctttaaaaaattagccaggcttggggatgcatgcctgtagtcctagctatttggaaggctgaggcaggaggatcactggagcccaggagttcaagcttgcagtgagctatgattgtgccactgtactctagcctgggtaaaagagcgagaccctgacactaccaaaataaataaataaataaataaataaataataataataaagcaactccttttttagccaaggcaacacatatcttcagctgccaccatcacttccctctgccaaggatcttgaaggcataggaagccattcctttaagtttaggtagcaaataagctccacaaacaggagaggacggttatgcctctgagggcagagaaagaagaggagaggggaaaagttcatgagtgtggaagacgacaggatctgtagcaacggcagctaccgttagagcagagcaccctgcagggagctcctgggtggctcctctaaacacccacctgcacttcagtggtttctgtcctccactcagagacaccataaatccacagcagttgtgagcaagttacagctttcttctgtatctgcttcttcctgcctcaccaatcttttctctcaacattcccattactttctctcctttctccactgtacctgcccattcccccaatcccaagttctgtgatcatttaaacatacaatcatctcatgtgattaaaaaaaaatctgacaacacaaatagataataaaagccgtatttatcaccttccaagattcaactaatggtactttatttggtcaaaaggagaaactcttcttcaaatccccaatttatatcataaccaattcaatatccatgaggtgaggatatatggtcaacttacccaggggattggcaccaataaatacattcgcaaagttcatcttcggcatctgagtcaaagactgaatatagtttcttgcctgaaaaaacaagggttttcagaatgactttgttcaataatgttactgctctcaaagaaagaatcttggtcctgctaaggaacgagtgttaactgacaaagtccactaacttcagtgtttctaactgtctttgatagaacttctcccttactgccatcctaacttccctagttatgatcatcaccttctttattcctgctatctctcacagttgcatttcaagtgaacgagaatgctcatcaatcaaattctctttcattagctttctgatcacaggatgagaagtttaaaaactgaggccaagatatgtaagaagtagccctgagacagccttctcaaacagctaaattggtagaggggttggtattcccaaagcaagtcttggaccagcagtcttttgacagtgctgacttcagtaggtgctcttagtacatcaaaggatatcaatattaaaccttgctaacaaagtaacggtggtaacaaaaaagttaatataaacttaatataacagtcctacctcacagggttggagtgaagattagagataacaaacctagtactttcttaacacagtacttggttccaagtgacagttcaagaaacattatctgctatcccactatcaccttcagaagcaaagtctgctgtctatcttaaccacctctttaaaactcctgttttaatacagtccaacagtaaaagtatgtatgtatatttatgtttacacatacacacacaagtttataaaaagttctggttgcccaggcacggtgactcacgcctgtaatcccagcactttgggaggccaaggtgggcagatcgcttgagcccaggactttgagaccagcctgggtaacatggtgaaaacttgtctccaaaaatacaaaaaattagccaggtgtggtgacgcatgcctgtggtcccagctacttgggagactgaggtaacaggatcgcttgagcagggagatggagcccaggaagcttgagcccaggaggtggaggttccagtgagctaagatcgtgccactgcactccagctggggtgacagagttaagatcctgtcttaaaaaaaaaaaaatctggttgcttgggcaagttcaccttctttatttattaaaaaaatttttttagagacacagtctctgctctgttgcctaggctggaggtcactggcacaatcacagctcactatggcctctaactcctgactcaagcaaccctcctgcctcagcttcccaagtagctgggactacaggcatgtgctatcatgccctaatttttaaatttttttgtagagctgcagtattgctgtgttgcccaggatggtctcaaactcctgggctcaactgatcctcccatctcagccttccaaagtgctgaggttgcaggtgcacgccaccacacccagccttccgcttcttaattattgcatgtggagtcaggaggaaaggtctgctttgaaaagcaattgagaatctttctgatttgaaaagaaagttttaggaattgaatacataaatggctgtaatccctttctacttgaacatgtaaataaaaagaggaagggaaaacaggtaagagagaactatctcattcagagaacagtcatccctttaataaagataaatcaaaagacgacctgaatatagctgaagtagaaacaaagctgctgggaagggccctctgtgatgccaacctggttccccaaaatattaagggtatcttacaaagaaagaagtgccccaatcatctctgataataaaacaagagttagactaagtagttaataattaataaagaaggtacctaactgtaccaaagtgtttgtatttattctatattatttgtgtattttcttttaaatatagtacatattagtattggatatttcagttttgtttttaaataaagaatcctcttttggtcattaaaaaaatggatgaattggaaagcatgctaatggacttcagttaactacccttctgataaaggtcacgatagtagcacaccctagctacaggcagagcacctagaaagaaaccgcctcacaagcactaaattcacacaaccaaatataaaaataacaattttccatttacaagcttactaattatattcccaatctcacaggactggatgacattttatcccaaaagtcaacatcttgcaatagcacataggcaggcctcaaggcacatgcaagcatccagtgatgttaagaactgttggttatacggtggcaataaaatgagaatgtggcttctcagtgcgacatccctgtacagtctctttgttctcacctcatggcttggcatcctgttaatgagataagcggggggtgttcctgtcagacgcataatctgctgaagctggttaatatcttagatgcctagtcaagggcattgttaaacatacagtgcaaaaaataattttcaactcaagtttttaaaaaggtcaaaaagccacccccaaacagacaaaaaaacctaccctccattccccctacccgagagcccacagctgcatgctacagtacacttctgtgaatgacatgagtaactaggcacgtagccagtgactggccatgcagataagaaaaattacttttctttggttttagcatcatctttactgttaaatattttaggttccctggaaacagactgccccttgatccaggatgccagccatagaactgttttcaagtactgatggccaaaacctgtttgtgggagaaatatagatgattccaaaaattttgactcaactttgaacaaaataaaatatccaacatatccattcaaggaagagactaaacttttgcggcacaggttctccaaggcaccatccctccgaattaagacacacgtgggcatctgggttaataagcaatgccacatttcaaagacattagttagtggtacatttaaaatacttgccacaaacacaaaatggtaaatgaagaaagaggagaagaggagaaggttagaggctaatggcaaaggcaaaacagaagtcacaggctgctgagagtgttaaagcatgccacatgatttcctccacaagtctcttcaactagcgaacagactaacctcatttaacaaacagctggagggaagtctgcagaatactctgcaagcatctgataagggcagaactatgagattttctatatgtataggcacatatgtaagctgtactacaacttctctcttttaactgttccatcaatgttaatacaactcaccctcttctaaaatgtcagaactgtttatcatgttcctactaagagcagaagtgatgagattttaaaaatattcaatgtaattcaataaaccccttttctagtcctgttcttgttaactactaattccctcattcaggtgaagtgtcatctttaataagcaccatggccaagcaattttacttcatggctttcccaaataatttttctactttagctcgtcctctgaactgaactccctagtggtcagatgacttagcagtaatctgtttaaggctggccacagggagggagctagagccatgtgctccacgctgccttttacgctccctaagcccaaagacagaggccagtaaattccaaaaggggataggaaatacactttgatttgcggtccttttaagaaacgttaacagatccataccagatgatggaattctttattttgttaggagtacagataacagaatttagagttacctttaacaaatcacataacaaatgatacttttcatgccaagggaaataacaaaaaggggccacaaagtaaaccagcaatagcagaataccagttgggtcttaaaatgtaaaaatcctccacttcccctttctttctgtgaatgatacctggcctgcacattttctgtctttgtctcctttagtcaaagaggttattatatcccctttctgtcaagaagttagaaagattctatttctggaggaaaatgtgaatgagtcaggtcttcgcttttttatctaatttaattaattagtttatttatttttaaagacaaggtcttgctctgttgcccaggctggagtgcagtgcatgatcaccactccctgcagcctcaaactcctggcctcgagtgatcctcctgcctcagcctcccaaagtgctgtgatgacaaatgtgagccactgtgcccagtctgcttttgctttcttaatatgattttcttgttctttcactgattattatagatactgggacattaaccaaatgaattctctgtccttggcctccatcacaacccatttataccttttcctatggctcattctaataggttctaaatccattactgcattctcttactcggcattcaatttcttcataattattgccatcactacttcactacttttcaggagaatgaaaacagctgttggctatttactgcactccttcactaatgtcttttttctttttttaatttttaaaatctctgaacaattttactcacctggccttatttttccattctgttcccatacatcatgcgcttttaagataaacaggtacttgggccgtgtcacgaacatcaaattaatcttgtctaccccttaggatgtttaaactacttttatccactcaccccaattatgtaggaaacaaaccaaaaaaaaaaacctttcttattcttatactcaatataatattatttgagttaagttctgtattctggtactcaatttcagtagagctgttgaaatgtataatgtgcctcatttcacagagagacctccattattaggctgtgcactcattgtttctttcttaaaaataagtgatggattaatgacagataaatactattgactattttacctagactttggtttgaattcctaatccaattccaaatgactaatagcacgtatctatagggcagatggttgggatggaagagaagactaagaaagggctgctaggagacactctcaggaaggaaatgaatttgcttggtctcattagcactatttattaattgagctcctccctctgcccttaggtcctcttactgtaagacagtgtttctaagcaaaaacattaaaaaaaaagtactgctctttctaagcatcatctgatatctttgattcactctaattcagcttctacatatcataaaggagaaaaaaatacctctttaggttgacattgtggtaacactgacaatgactttcaaaatagtgtgtaatcacatgggattatagtttggatcatgttatcagaacatctgggatctatactcagctctgccacgtgattcagtgcatgacatggaaaagtcactgcccttctgggcttttgcttctttatcttaaataagtaaatgaaacaaattcagagtggaggttcagaaatacactgggctttgggatcctttcaagaaatgtaccggatacataccagatgacggtattctttattttgtcaggaagatgatgaacggttccaactcacctgcttatgcttgcctcaagctacccagccatcttcccaactaggcaaagggccccttcagtcataaatgttgggaggagaatccaggaaggcataactggagcttggctccatagctctttttttcttttgttcaactgcctggcagcagatcgagggaaaaagaaaagctgggctttcatggcttctctcatgcctctggcccaagaaaatgaccaagagcaggaaatcatagcaaaagtaagccagactcacattcccatggcttctgtctaagtccctgcttagaagcaagaaagcactagttccaaactctgtctcaggttatctaacttataattacaaggcaataggaggaaaatttataaccacattcctgtgtatctgaggtatcaggagtgaagctgtttcttctgagtggggtctagggactgggtagaaaggtccctctgttgggaacaaacattttacataggatatgtgagtatctattctaaaacaataaaaaataacttctgggaaggggcaacagtgtgcagacaatgtacattttattcttttagtgattaagttaaactaaatacatggtgaagctcatgctctgagaacaaacactagaaacagtgaaaagagctctagagcatacgtgaaacttctgagaaagaagaaagtcaggtcttgaggacagagacacaaagtttacattaatctcttggaatgaattagaatctcaaatctcattgctttactgggatactattgtctaatggaggctcccgtgatcttagtgtgtacccagatagagaataaaacacacttgtgcatgcaagcaggcacacatgcgtgcacgcacacacacactcacactgtcttatacctcactcatccgggaagtcagcacacaaagggcatgtgtgcttacaaacacacccaggtcaaagtacagattggtagaaggcaagtggcagaggctcccaacagggcagataattacaaagcatcaactcacagactctgaggagattttcttcaaaagctcagcccctggggttccaacgagtcttaaaatgagcttcaactgatcaatatctaatggtggaccataaaggaaaatgttgggacaaaataaaaatgaaaaacaaacaatgacaaacaaaacaaaaacaaacaaacagaacacaccgagaacaaaaatgaaacaccccaaacctagccaacacggtgaatccctctaggtcaaggctcctgcaggatgatcacttcacgtagggcatgctcctcctgtacaaagattcaaaatgctaccaaacacatatccactttatattcattttatgcatctgtcaacagcatgtatcagtaaagtgaggcaactttagctggttcttagctgccaaagacagcaggtgaaaacacaagagcttcactcagtttacactgccctcttcatctgccatcacagtgtcagtaaccagttcagcaaagtgcactgataattagagggccacagataaggaaaaaagcagcagaagacaggagctagggatgtacaagtctatttatgaatattctcccaagcgtgacctaaagagcttgtgatatgacagtggaaggcctgtgagaccccaaagcctgaccactggagcacaccctctggaaagggaagcctcgcctctcacactggctatagcaggcactatgagggagagtcgccagcagagggcgctctcccatcgcatgttcctttaggagcgccatgagaacgcaaatacaggcggtttcaaccttataaaatgcaaatgaacaatgcttaacaaacttcacacatcccaaaggctctaaataataggccacaatgccataacttttatcctggtagctaacacttcaatgtatactcagaatgtatgtgcatgtgttaaccagaagacaaaaatttgtttgttctcattgcttttaatcttacctaaaaaggaagttaaaaagagggggaaaaatattataaaatagcttttaatatttcctctgaaaatgtgaacagtttatccacgtttatactgactgacattccagggagggagaaggggaggatgactgtcttctgacccatcaggtttttcacatgactaaatcctcttggcttcaggtctcagcttcaacttcacctcctaagggaggcctcccctcaacactctatatacataacaccccaccccccaattctctctcagcaccatgcttgataacatcatagtgcttatcacagcctagaattactttatttgcttactgtctgccccctgtactggtctacagctctacgaggacaggggccactctgcctcttcaccatttatccccagcctaacatctggtacatgacaggtagtcaaaatatttgaggaaaaggtagagcaggatgaaagaaatttttgcttatggttatacatataaaggcaacatagcagcacttaaaaacaacagtctctataagccacaggtgcctacgttataggaataacttaatgcagtaatttgacatcctgtcttttactttctttcagacatgaaatcagcttaaatggaagaaaattctaggctggagtcaccaaaccccaggctctgcctgttttatatataaagttttattagaacacagccatgcccattcatttatgtacagtctataggtgtttccaattacaacaagcacagttaccatatggttcccaagcctaaaatattaactacctggccctttcagaaaaggtgcgccaaaccccaccctaaacccaaacaacttgtgttctttagcaagcaaaaacaaactagaaacaagtccactcacattatttctaaattaagaataacagggaattttgtcatctgcaaatggcaaaaatcattgtgttataaaggttaagattttaatactggcttctcagttcaagatgttgacaagtaaaaaatcttatagcatatgttcatgggacagagtaggaatgggggtgggatggatactgtcttgctctaaaataatcagattaattatattacaatagaaatcagtaaaaaaaattcttgctcatctaaaatgactcaattcaaaaaatttagtttcctcacattaacactcttcaggaatatatttaactgggtagccaccacaagataaagtaaatcatatatgggaaaaatcttgactacttcaaatctcaaacaagtggctttacaatatatgcatcaaaagtaatctctaaaatgaagcttttgatattggtactcttgtttaagagacttctttctgactacttaacaatgagagtcagttgtttttttttttttttttttttttgagacggagtctctcgctctgtcgcccaggctggggtgcagtggcgcgatctcggctcactgcaagttccacctcccaggttcacgccattctcctgcctcagcctccagagtagctgggactacaggcgcctgccaccacacccggctaattttttgtatttttagtagagacggggtttcaccatgttagccagaatggtctcaatctcctgtcctcatgatccgcctgcctcggcctcccaaagggctgggattacaggcgtgagccaccgtgcctggctgagagtcaatttttatactctctctaaggaagacaggctctctgagctgtgaatttctcaactacctgaacttcaccccaacctacctgaagaatacgcaatttccattagtcacagtggctcattacatcaatgagctgagaaaccctctctctcccacctctgctggcatgaaacaatatcaggcctgaagaatcaagcctagtttgactctggctcaaattattattctttaatgcactcaatgcttcaactcacatcagatattccaggcacttctaagcttccaagtacttatttatgtactcataaaccagaatacctcccccttctcccgtccttccaagccttttctattcctatttacactttgaagtcctattcaaacaagaactctgccatgaagtcttcttggatttttttcaatagcttatctataactctattctagtgtatttatcactccatcttattttataatcagagacagttgttcaagtaactcttgtaactctctttccactgagtctgatcattctggttttaaggacaggtaccatcctgtccccagcaccttccacagagcagcttgataaatactagttgacttgaaaagatgagccatggcacatcctttcatcacctcgggaggtgccgatgtcttgagtcgtgacaccggcgtatgctgacactgctgcctccagtagttcttttgtcctcttccctttgtcacccctacactttggaggtgaacttctctcctgagggctgtaaagactagtttgaaaagggagagccaagaaccaactgaattgtctcagaatggaaacactatattatttcagaggagttaatttcagaaggaaaatgggtcaaacttgaaaaaacaacatacatggctcctattggtaaaactggaacttgggactcagtgaaacatacaaccaggaaagaacagactggtgatgatgtagcggtcatccctgtgctgcagagaacgcttcactacgagtgtatcgttctggtgaaacagtcctgaccaccaatgggtggctactgcatagagttccctgcagggaactcatagaagatggtgaaaccccaggagcagctgctctttgggagcttgaggaagaaactggctacaaaggggacgctgctgaatgttctccagtggtctatatggacccaggtttgtcaaactgtaccacacacatcgtgacagtaatcattaacggagatgacgcagaaaatgtaaggcccaagccaaagccaggggatggagaatttgtggaagtcatttcgttacccaagaatgacctgctgcagggactcgatgctctcgtagctgaaaaacatcttacagtggatgccaaagtctattcccatgctctagcactgaaacatgcaaatgtgaagccatctgaagtgcccgtcctgaaattttaaggccaaagacgacactggccatttttgtaaatgagactaccaggccttcttcacaaaggctttgtattcaacttagtttaatgtagatttgaattagctttttcgtaaaataaaagcagcaaaaaatgaaaaaaaaaaaaaaaagaaaagaaaagatgagccatattatgcttttcaactcagctttaccccactgccttgccctcaaaacacagaatgaccatactccatggaaaaacacacaacataaaataaaaatcttagtaactaaaagcatttgcatgaaggaagttaaaacatgcaaacctcagaagaaatcaccatgggttcttcaaaagctggcaaatccactgaaatacaggccagtcttccaacagtaccagctactataaggccactatgatttgtccaggcagttaagaccagaaggagcgtcacgtagccacattagcggagtaaagcaaaactcaccacatcatgacaatcagttatttccacagtgagccatcctttgtaataggtttagccctgtttctcttaggtagaaaatatttttactattagtttaaaatgtgttttaattgtaatgatcacaacgtcaaaatttaaatcataaatctcctgaatctttctaaaacaaatgaagaaaagaacaacttaagcctaagattactctttagacgaagtcatctttaacagaagcaagtcagtcagaatgaacaggtaaagaaaaaaaaaaacaaaaaaactaagcataacaggatatttctagggaaagtaaaagagggatattctagtcagttctaagtgctccaggcactcctaaaaaacctccacaggccagaaagttgaagataaataaaaggaccaattgcaggacctacctgccatgagcagtaattttcaaagacataaatccacataggggtgaagtggagcactaacctttgggaaggtaggaaatcttcctggtgacagacaggatagactagaataagacttagcctagctccttatcttccaagttgtcaaaatagtcattttcactgtaacacaaagaaaatttcttaagggacccttggtttatggacaaatctgaggattctaccttttcctgagaaaatgtattttcaagttagagaggaaagggcaaataacctaataaaatatttttcttcttcagcatttattggacacttgcttttggtgtctaaagtgaaactgctttttaaaaatgagagaacatccaggctggccaacatggcaaaatcctgtctctactaaaaatacaaaaattagccgggcgtgatgacgtgcacctgtaatcccagctactcgggaggctgaggcagggagaatcgcttgaacacgggaggtggaggttgcagtgagcagagattgcgccattgcactccagcctgggcgacagagcgagactctgtctccaaaaaaaaaaaaaaagagagagagggagaatatttggcagggtgcagtggccacacctgtaatcccaacattttggtaggccaaggcgggcagatcacttgaggtctggagttctagaccagcctcaggaggtggaggttgcagtgagccgagattgcgccactgcattccagcctaggcaacagagtgagactccatctcaaaaaaaaaaagaaagagtatttgaaaccaatgactgaaagtgatgggcagatgtgagagaagggtctccagaagctttagctctattgccagtgttttaactcacaagcaggacagtatgaacagaggtgtttattattctttgtctagcagtatgtctgaaatatttcaaaacatgtttgcaaaagaagaaataaaaaaaaatatataagaagcaaatttaatacactaggaaaactcccatagaccagggcagtaactgatggcaagtggattttaactcagctccattaacccattatgtcttaagagcaccatttctgttaaaattaaagaaggttttacacataaggaaattcacttgattatggagaaaaggaaaacaacagcaagccaaggctgtgatctctggtagaaaaacggtatttgatgcataacagggctataaaactttctctcttccttaagctgcagagtgttaagcgttggtaacagaattttcaaagtggcttattcatttcaagatctatggtatttgaaataagttagtactgtacctgaagagacattctgtatcctccctcctttctagtacaaagttctgtcagctgtgtccacttgatatccctagtcaactaggcttttaagaaagggcttcattctttaaaaaataataatgctatcattaggccagatggaagggttctgcaaagtcacaaacaagaataatttctaatctgataacacattattggctttaagacaaaaatgagtatttcttatatttttttaaaattaaattaaagttctgagatacaagtgcaggatgtgcaggtttgttacataggtaaatatgtgccatcgtggtttgctccacctatcaatccatcacctaggtgttaagccccgcatgccttagctatttatcctgatgcgttccctccgcctgacccccaccccaccaacaggccccagcgtgtgttgttctcctccatgtgtccatgtgttctcattgttcagctcccacttgtgagaacatgtggtgtttggctttctgaggaaaatggcttcaagctccatcagtgtccccgcaaagggcacaatctcattcatttttatgggtgtatagtattccatggtgtatatgtaccatgtttttttatccagtccatcactgatgggcatttgggttgattccatgtctttgctattctgaatactgctgcaatcaacatacacatgcatgtatctttgtaacagaatgatttatattcctttgggtatatacccagtaatgggattgctgggtcaaatgttatttctggttctaggtctttgaggatttcaccagtcttccacaatggttgaactaatttacattcctaccaacggtgtaaaagtgttcatatttctccatagcctcaccagcatctgttgtttcttgactttttaataatcaccattctgactagcatgagacagtatctcattgtggttttcatttgcatttctctaatggtcagtgacactgagctttttttcatgtttgttggctgtataaatgtcttcttttgagaagtgtttgttcatgtcctttgccaatattttttttttttttttgagacggagtctcgctctgtcgcccaggctggagtgcagtggtgtgatctcggctcactgccagctccgcctcctgggttcacgtcattctcctgccccagcctcctgagtagctgggactacaggcgcacaccaccatgcctggctaattttttgcatttttagtagagatggggtttcgccaaattagtcaggatgatctcgatctcctgacctcgtgatccacctgcctcagcctcccaaagtgctgggattacaggcatgagtcactgtgcctggccctttgccaactttttaatgggttttttccttgtaaatttgtttaaattccttgtagattctggatattagacttttgtcagatggatagattgcaaaaactgtctcccattctgtaggttgtctgttcactctgacgatagtttcttttgctgtgcagaagcccatttgtcagtttctgcttttgttgccattgcttttgatgttttcatcatgaaatttttgcccatgtctatgtccttaatgatattgcctagattttcttctagggtttttatcgttttgggttctacatttaagtctttaatccatcttgagttaatttttgtataaggtgtaaggaaggggtccagtttcaattttctgcacatggctagccagttctcccagcaccatttattaaatagggaatcctttccccattgctcgttttgtcaggtttgttgaagatcagatggttgtagatgtgcagttttatttctgagatctctattctgttccattggtctgtttttgtactagtaccatgctgttttgattactgtagcctcgtagtatagtttgaagtcaggtagtgtgatgcctccaggtttgttctttttgcttagaattgtttgggctatatggactcttttttggttccatatgaattttaaagtttttttctaattctgtgaagaatgtcaacagtagtttaatgggaatagcattaaatttataaattactttgggcaatatggccattttcatgatattgattcttcctatccatgagcacagaatgtttttccatttgtttgtgtcctctctgatttccttcagcagtggtttgtagttctccttgaagaggtccttcacttcccttgttattaatagctatagttctgggtattttattctcttttagcagttgtgaataagagttcattcatgatttggctctctgcttgcctactgttggtgtataggaatagttgtgatttttgcactttgattttgtatcccgagactttgctgaagttgcttatcagcttaagaagcttttgggctgagacaacaaggttttctagatataggatcatgtcacctgcaaacagagttttacttcctctcttcctatttgaataccctttctttctttcttttgcctgattgccctggccagaatttccaatactatgttgaataggagtagggaaagagggcatccttgtgccagttttgaaggggaatacttccagcttttgcctattcagtaagatactggctgtgggtttgtcttacatggcttattttgaggtatgttccatcaacacctagtttactgagagtttttaacatgaagggatgttgaattttattaaaggccttttctgcatccattgagataatcatgtggtttttgcctttagttctgtttatgtgatcaattatgtttattgatttgcatatgttaaaacagccttgcatcccagggatgaagctgacttgaccgtggtggatggataagcttttgacatgctgctggatttggtttgccagtattttactgaggatttttgcatcgatgttcatcagggatattggccttaagttttctttttctgttgtatttctggcaggctttggtattgggataatactggcctcataaaatgagttataggggagtccctccttttgtatgtttggaatagtttcagaagaaatggtaccagctcttctttgtacctctggtagaatttggctgtaatctgtctggtcctgggcttttcttgcttggtaggctatttattactgcctcaatttgagaacttgttattggtagattcaacgttttcctggttcagtcttgggaggtcatatgtgtccaggaattcatccatttcttctagattttctagtttatttgcatagaggtgtttatagtattctctgatagttgttcatatttctgcagggtcagtggtgataccccctttatcatttttattgtgtctatttgattcttctttcttcattactctagctaggagtctattttattttattttatgtttttcaaaataccagatcttgggagtcactgatatttttggaagggtttttcctgtctctatctccttcagttccactctgatcttggttatttcttgtcctctgctagctttagggtttgtttggtcttggttccctagttcttttagttgtgatgttagggtgtcaatttgagatctttctagctttttgatgtgggcatttagtgctataaacttccctcttaacactgctttagctgtgtcccagagattctggtatgttctctttgttctcattggtttcaaagaacttctgatttccgccttaatttcattatttatccaggagtcattcaggagcaggttgtccaatttccacgtaattgtgtggttttgagtgagtttcttaatcttagttctaatttgattgtgctgtggtgtgagaggctgtgtgttatattttcagttcttttgcagttactgaggagtgttttacttccaattatgtgatcaattttagcctaagtgcgatgtgctgctaagaagaatgtatattctgttgtttctgtatagagagttctgtagctatctatcaggtccagagctgagttcaagtcctgaatatccttgttaattttctgcttgatgatctgtctaatattgacagtggggtattaaagtctcacactattattgtatgggagtctaagtctctgtgtaggtctctaagaacttggtttataaatctgggtgctcctgtattaggtgcatatatatttaggatagttagcttttcttgttgaattgagccctttaccactatgtaatgcccttgtcttttttgatatttgctggttcaaagtctgttttgtcagaaaataggattgcaacccctgcttttttctgctttccatttgcttggtaaattttcctccatccctttattctgagcctttgtatgtctttgcatgttagatgggtctcttgaatacaacagcatactgatgggtcgtgattctttatccagcttgccgttctgtgttttttaattggggcatttagcccacttacatttaaggttaatattttttatgtgtgaatttgatcctatcatcatgatgctagctggttattttgcagacttgttgaggtaactgcttcatagtgttactggtaaaagaaaacagtgtgtttctgtagtggccagtaagtttttcctttccatatttagtgcttccttcaggagctcttgcaagacaggcctggtggtgacgaattccctcagcatttgcttgtctaaaaaggattttatttcttctttgactatgaagcttagtttggccagatatgaaactttgggttggaaattctttaagaatgttgaatattggccccgaatctcttctggcttgtagggtttttgctgaggtccactcttagcctgatgggcttccctttgtaggtgacctagcctttctctctggctgcccttagtattttttccttcatttcaaccttggagaatctgatgattatgtatcttggggttgatcttctcatggggtagcttactggggttctctagggatttcctgatttgaatgctggcctgtcttgctaggttggggaagttctcctggctgatatcctgaagtgtgttttccaacttgtttccattctccccaattcttttaggtacccctatcattcgcaggttcagtctttttaaataatcccatagttctcaaaagttttgttcatttcctttcattcttctcttatcttgtcagcaagatagtcttcaagctctgaaattctttcctccacttggtctatttggctattgatacttgtggttgcattatgaagttctcatgttgtgtttttcagctccatcatttatgttcctttctaaactggttattctggttaacagctcctgtaatgttttatcatggttcttagattctttgcattgggttagaacatgctcctttagctcagtgaaattcattattatccaccttcggaagtctacttctgtcaattcatccatctcagcctcagcccacatctatgcccttgccagagaggtgctgtgatcatttggaggaaaagaagcactctggctttttgagttttcagcgttttttcattgattctttctcatcttcatgactttacctagctttgaactttgaggctgctaacctttggaggggttttggtggggacctttttgttgatgttgttgttgctttccatttgttttgcttttaacagtcaggcccctcttccatagggctgctgcagtttgctgggggtccactccagactctttgcctgggtccctcctgtacctggaggtgtcaccagtggagactgcagaacagcaaagatggctgcctgttccttcctctgggagctccgtcccagaggggcaccaacctgatgccagtgggaatgctcttgcataaggtgtctggcgacccctgttggaggggtctcatccagtcaagaggcacaggcccacctaacgaagcactctggctgccccttggtggagggggtgtgctgcactgggggaaatctcactcatccagactgcctggattcctcagagccagcaaggggaaagactaactctgctgatctgtggagactgtggccacccctcccaccaggggctccatcccagggagattggaattctgtctgtaaacccctggctggagttgctgaaattcccgcagagaggccctgccccgtgtagggggatgagtcagagttcagcctaaagagtcagtctggccatgatgtgccaccaccactgtagggtctgcactgtagggaattccttctgggtcccaaccgcccagtctctccagcaccagcaggggaaaacagcagactggagctgcagtgatgacagcaacccctcccccaaggaactcagtagtcttatgtagtctccagccaaagggctaccaagaacctacacagctctgtgcttgggacccaaggccctggtggcatgtgctcatgagggggatctcctgaatcacaggttgcacagatccttggaaaaagcatgatttcctggacagggtagaacaatcactcaccacctcccttggcttggggtgggagctccccttgccctttgcagctcccaggtgggctgtcgctccaccctgcttttcctcactctccatgggtcatgccaaccacctagtcagtcccattgagagaaggtgaatacctcagttgccggtgcaggattcactcaccgttttcgttcttcttgttggaagcctctgattgcagctatttctagttgtccatcttgtcccctccccagtatttcttatatctttaaaggaaatccaggaattactaacaaccagtaccaaaataatctttcaagaaggagactaattacaaaacccaagaaaaaggtagaacaggaagataacttgaagggatctaaaaatgcataaaccaataccactagccatgtgtaattaagtttcaatgtaatctaaataaaattttaatggcatttaaaattcagattaaaatactcagaaaactgtgaacagaaggtgatagggtttggatgttttgtcccctccaagtatgttgaaatgtgatccccaatgttggaggtggggcctgattgaaggtgttagggtcttggatccctcatgaatggcttggttccctccccacattaatgagtgagttctcgctctatcagttcatgcaaatgctggttgtttaaaagagtctggcatctctcttgctccctcctttgacatgtgacatgcctgttccccctaccaccataagtgaaagcttcctgaggtcctgaccagaaacagatgctggcacaatgcttcttttacagctatgcaactgtgagccaaataaacctcttttcttgataaattacctagtttcaggtattccttcatagcaatgtgaaatggactaccaaagaagagaacttccccaacatgataaagggcatttatgaaaaaccaacagctaacatcatactcaatgggaagagactgaaagctttccccctaagacaggaacaagacaaggatgcctactttcactgttgctattcagcattgtagcagaagttctagacagagccattacattagacaagagaaagaattaaaagcatctaaattggaaaggaagaaataaaactatctctgtttgcagatgacataaccctatacatagaaaatcacaaagaatctagaagaaagctgctagagctaataaataaattgagcaaatttgcagggtgtaagatcaacaatcaaaaattaatttggtttctatatatcaacaatgaacacaccaaagaatttccatctataatcgcagcaaaaataataaaatacataggaaaaaatttaaccaaggtaaaatactttacaactgaaaactataaaacactgctgaaaaaaaaataaagacttaaataaatggaaagagatcctttgttcatgaacaggatgacttaatagtggttaagatgtcaatatcacttaaagtgatctaaaaatctgacacaatccctatcaaaattctaaagccttttttttgcagaaatagaaatgccaattgttaaattcatatgaaattacaagggacccagaatagtcaaagcaatcttgaaaaagaagaacaaagctggaagactcacacttcctgatttcaaagcttactataaagctacagtgatcaaaacagtgtggtattgccataaggatagatatataaaccaatagaatagaactgagagtccagaattaaacccacacgtgtattgctaattatatataccaaatttctaagaaacaggtaaaaggtgaaagaaacaaaaaacaaaggagaaatcctagggtatcatgttgattcgatgggggaagtaatagtctctttatggtgctagaataactggacttccagatgcaaaagaatgaagttgggcccctacctcacatcatctataaaaattaattcaaaatggatcaaagacctaagtataagagctaaaccctattatattcctagtagttacaaaactcttagtagaaaacataggggtaaattattcatgaccttgaatttggcaatacagtctaaaatatgacatcaaaaaagcatgagcaaggacagaaaaaaaataaattggaacttaatcaaaattaaaaatgttttatgtatcaaaggacattatcaagaaagtgaaaagacaacccacaaaataggtgaaaatacttgcaaatcatgtatctgataagggtctaagatatataaagaaccaccactgaacaacaaaaacacaaacaacctaattaagaataggcaagacttgaatagacatttctccaaagaagacatacaaatggccaataagcagatgaaaagatgctcaaaatcattagtcatgagagaaatgcaaatcaaaaccacagtgagataccactttgtaactacttgggtgactattaaaaaaaaaaaaagaacaagtttggagatacaggaatcctcatgcattgctggtgggcatgtaaaatggtgcagacactatggaaaagagtttggtggctcttcagaaagttaaacatagagttaccatatgatgcaacaattccactcctaggtacataaccaaaagaatcaaaagcagggactcaaacagatgcttgtatgacaatgttcactgcagcattattcacaatagccaaaggtaaaaacaactcaactgtctactaacagatgaacaggtcaacaaaatgtgggatatattaaatacttacaatggaatagtattctgatacatgctacatcatggaagaaccatgaaaacattatactaagtgaaataatccagaaacaaaaggacaaatacagtataatatgattctacttctatgaaatttctagaataagcaaatccacagagacagaaagaacagaggttaccagaggggagaatgggaagttactgtttcacgggctgagtgtttccatctgcggtgatgaaaaaattctggaaataggtagtagtagtgattgtacatcatgaatgtaattaatgccgctgaattgtaaacttaaaatggttaaaatggggccgggtgcagtggctcgcgcctgtaatctagcaatttgggaggctaaggtgggcggatcacttgaggccaggagtttgagaccagcctggctaacatggtgaaaccctgtctctactaaaaatacaaaaattacatggtggtacacacctataatcccagctacttgggaggctgaggcaggagaatcgcttgagcccgggaggcggaggttgtagtgagccaagatcatgccactgcactccagcgtgggcaacaaagcaagactgtctcaaaaaaaaaaaggttaaaatggtaaattttatgttaaatacatttaaccacaaaaatattttcaattcaatttccaagttaaactagctacatttcttttttttcttctccacaacgttactgctcaccactagctgcatttcagttgcttaataattagccacaggcagctggtgcctataaccaccacattggatagcacagatataaaacatttgcaataccacaaaagttctagtacacagttcttacttacaagcccaaaccaccaattccaaatgcaaaatgatcaataaataaggaaaacagggagaaaactggacactcaaacaatgagtaccttctagagcaagcttttccaacccagggcctgcgggctgcacgtggcccagggctttggatgcagcccatcacaaatttgtaaactttctgaaaacattacgagattttttttttgcaattttttttaagttcatcggctatcattagtgtattttatgtgtggcccaggacatttcttcttccaatgtggcccagggaagccagaagattggacacccctgttctagaggttgcatttaaatatcataaataagtgacaggtgcatgtctttcaggctgaaggaagagggtatgaggccaatacattctccaaaggttttttaaagaggagttctgcaaattagaagaacagcgaagaacagaatattggaaaagaaattgtggcctatgtgacaggtagctttggattatattctctgggtcttggtttccccatctattaaaaacaggggattcaactagatgttttctaattaactttctgatctcattggtacttttcaaaaaaaatgaatagagattactaacatcttcaagaccagccaagattaaactaaaattcaactgggttaaactctagttgtactcaacactagctgcaaactagaagactgtgctttgacccatgacaacaaaatggagtctttggggtggtccccaggcatctagagtttttaaaagctctgcaaagtgattctgacacactatgagggttaagaaccactatgctggaacacaagtgaccgtatagttcaggcaggaaaagataatgggaaacattttcctcttgtcaggcaatcaaagctgtatctacacagatggcaacttacaagagaaaggttaagtatattacaaataaaaatcctttgaattcgacttttacaatccaggagagaacatctgtctgaaaaagagccaagtagaataaaataaataactaaaaccaaaattttgaaatgaattctcatgtattaaaaaatgaatcccttattaaaaagtttaaacactaggttgtttatctaaagctcacagaagaaaaagacctaagcacaaagggaagatttcctacaggcagaaagttagcatttaaaagggtcagggaatagacaggtgtctgtgagacaggaccacaaaggtacaagactcacactgcttcgaaaactttctaacactagtctgccaaggagttccatcctttcctacctatcacagaattaaaaacaaaacaaaacattaatgattcataggtagacaattaagtgagaaggtgaaggggtaatctgttttgcaaggccattactgaacatgatggctaacatttactggcaggctcgtctcagtactttccagttattttctggctgaattcttacgacaaccttgtgagtatgtatgattattatcattttacggttaaggaaactgagagaaatagaggttaggaaacttactcaaagttacatagctggaaataaaagagctaagatctaaatccaggaaatctggctccagagcatgtgcttaacctgtatgttatactgcctttccctctctgccaccttgtgtgtctacaccggcatggaggtctgtgactgactaaatggtagctggagatacagacacaagaagaggaaggggagcagggaacagagaatagcatcaggacagcagctactctagaggacaaagcaaggatgggactctgagatatgtacctgaggaaagggggaagtatgaattttccctaattctcttaccttggactgtaatatatatataccaaatttctgagaaacagatataaggtgaatgaaacaaaggacaaaggagaaacaccaggtattaaactaatttaaaatccagaggtagggagtaataaggtaagctaaatacagggagactgaactctgttatcaatcctaatattcagagagaaagaaacagctttacctgagaaatagaggttttttcagttcataatgaaagtacattctctctagcagaagatagttagaacacgtgggtagatatcatgaacatcatagccattacagaagtatatcccaaactgtaagcaagtgaattgacattctggtttataaactcaattagtttatttaggtaagggactaaaatggcttttagatctctaggcataatagatcagaggtagcatgtctaatattgcctaaccaaaaccacctgaaggctagttaactcaattctattaaaaaaagaaaaaatccccaaaactaattctagacatatattttaacaatctttctcacctaaacatcttccataagtagaactgatgagagttccaacagaccacatttttcatgacattaatactaaaccatgaaacaagcataccgcagataggaaaggagctaaaataaaggggctataataaaccataaactagacagtaagtcttggagtaaattagggtttggctgcaatctgggaaaaagttgtgctggaaaaacaaaagtacattacatggtaagcttttcacttcttgcttttactatttgttgtcaaacaacaaacataacaagtaagcagtatatcactgcaggtaccaaacatagcccttttaatacataaacataacagcaagatgcccttcatttataaatgggcatcttgtgctcattaagtgtttatacaagaagactaaaactgtcactgggatctggagtttctcatgagtatgctcaggtctcagaactgctgtgggatgattaataagggactgttgcaaaaagaagacagacttgatgggtttttcaacttatgaggaatttttccaactcacaaaagtaaactgaagcctctttcttggcaaggcaagctactcagtttgaagaaagacctcataatgcattatctagactataaaagcaaaatactgagagtcttccctagagataagtaaaaggagtatacacccatggacactggaatacagataagaaacaagaatccaaaactttttaaaggatacggtctgtaccaggaaacaatgttcttccagtcaacagctcggccattatgcatcccactgaccaaatatcaactggcaaaattaaaaagaagtaaaagtatatgcaatgtcactgttacaattcttggcaacaaatgaaaccgtaactaggggtgaaatattcaaattactatttaagacatctgaggctcaacaatcatactcatttttacagaaataaatagcttactaagatcttcacctgactaaagggctgttcaaaggtggggtaagtcaaaacacacttaagagaaataagctgtttaaaaaggggcaagtttcttattagtagaatggtagattcttccaagtaacattgaggggttaaaattatggactaattgtctttaggtataagtactcagagaatatattcaaaatctaaataaataaaaacccaattgctaaatcacaaggtttaaaagctgtgtataaaaccccacttccccatctgaggaagtgaaatatttttacttgcaggctttaaaaggatcactgagggaagaaaagacatttcttcccactcccaccatctctatttctgagaatcccaaatgcatccaacatggaattaaataaggccctaaataaccaaggcgagtaatacctgtctggttgtaatgcatccagttcagcatgatctcaggagccctgtaccacctagtggccacgtagcctgtcatttcatcatctgtgtgccgagccagtccaaaatccagaatctaaagggcagaagaggaacagacaaactgctaagacttagaaacaggcagggaaaaaaaaacaaaacaacaacaacaaacaaacctctgttgccttattaaaaaggagaacaaaatagcactttcataaagagatttcctggtccatacttagaatgtatggtaaatatacagcaagaacttaaaatgaaattacaaaaagcaaaacaaaaatgtcactcccaggtatttaatcaagtgcaatgagaacttacgtccatacaaaggtttgcacataaacattcacagttgctttacacagcctcaaactcaagcaaatgtccatcagcaggtggatagatttaaaaattctgttatgttcataaaacaaaatactattaccaataaaaaggaagaaaccactgacacacacaacaataccgaatcattacaccaagcaaaggccagacacacaaaaatacacactatatgattccatttacatgaaactccagaaaagataaacctaatctatagtgttagaagcagatccatagttgcctggagccagagttaggggtggaggggtagggattgactaggaagggacacaataaacttttttttttttttttttttttttgagacggagtcttgctctgttgcccaggctggggtgcagtggcactatctcggcgcactgcaagctctgcctcccaggttcacgccattctcctgcctcagcctctcaagtagctgggactccaggtgcccgccaccatgcccaactaaatttttgtatttttagtggagatgaggtttcaccgtgttggccaagatggtctctatctcctgacctcataatccacccgccttggcctcccaaagtgctgggattacaggcatgagccaccacgcctggccataaactttttaaagtaatccaaatgttcttggctgggagcaatggctcacacctgcaatcccagcactttgagaggccgaggcaggtggatcacgaggtcaggagatcgacaccatcctagccaacatggtgaaatcccatctctactaaaaatacaaaaattagccgggtgtgatggcgtgcacctgtagtcccagctactcgggaggctgaggcaggagaatcgcttgaacccgggaggcagaggttgcagtgagccaagatcacaccactgcactctagactgggcaacagagtgagactgcatcccaaaaaaaaggaaaaaaaaagaaatggtctttatcataaatgtgagttaagtggatatataattttgccaaatgaaatggtgcattctaatgtacagacattttttcaagttaaaaaaatgaaatggaacaaaagttctagagctgcttgctatttagaaacaattaattcacttattttttatttgaattattttgagtgagtgggtttctgccatttctcctcttagaaatgtatttaatctagttatcacctctttgggcctacttacttgatatttgactattatcctcctttattatgactaatatatcaaatttataatttaactttatgttaaaataaaaacaagtgatgccactttcaatgtcacttagcttactcagaaatggtttaaatttcaaagtctgataataaaaataatacgaatttcagatagtcatggctcacaaagctactccctaagaaagtctgcctgcttagtcaaacatataatctcaaagtaaagcaaacaatgaatactgtctcttcattttaccttcagctcacagtcttcattcacagctagattactaggttttaggtcctaggaagcaaatacagggaagacaggatcaactttatgatgcatgatcaattctccccctacaggtaataatgaggatccagacataaaagacttcatccagctatcaaaagacaatctccatcctacagtcaatatccagtccaagttagccttacatagaaaaaaactacacatcttctttctttaatcagcttaaacctacagtaaagttgcaatcaatcaacatttcaatggctaaagtttagattaggatcttggctaaatgccattcttccactctcaccccacttccccaaaataatgtaatcaaagtcacaatacataccctgtgaattatgtcagctgaatgtatatactgcaaaagagaaaaaagtcaaagttacctccaaccttctattgtcatattatataacatatttgctgcacattttcatgaatcagtaagaactgctagtgttaatagtaagattagaaatcagcataagtaactatcagtattgtgtacatttaccattactataatttccacagccattgactccactcagttgagcttttaatctattttctggttggcactctggagctcaataaggactcaaagcagctaaatatcaaagatgggtttaattttaaaacactgtttatctgcccctccaacaaataaattagtctttcttgaggattttttgaaaatctcaacattacgctgaccagatattagattacatcaataaattattgtttagatgtaagaatgaagagtccttatctttcagatatgcaaactgaagtatctatggatggtattatataatgtctagacttgctttaaaataatccagggcttgggaaatacaaaagaaacatgattggccatatgtcggtaactgttgtcactgagtgaacatggcagtttactgtactatatgacctttacctgtgattttatgtgtttgaattttccattagaaaagttgtttacttgtttgtttaagccctaaaaggaggggagaaagggagaattcattttaaaaaattattacttgtattatctgtacctttagacctcggagaatttggtagataaggaactgaacatggtcatctgtaagcttctgacatttcacaatgttgttcagatctgcccccatgagatgggtcaccagatacctagaaattagtgaaaagttacataacaatctagaacccctaagaaagttcttatcttcagaagacttttataagttttttggtttttttggtttttgtttttgtttttgaaatggagtctcgctctactgccaggctggagtgcagtggcgcaatctcagctcactacaacctctgcctcccaggttcacgccattctcctgcctcagcctcccgagttgctgggactccaggtgcccaccaccatgcccggctaatctttgtatttttagtggagacgaggtttcaccgtgttggccaagatggtcttgatctcctgacctcatgatccccccgcctcagcctcccaaagtgctgggattacaagcgtgagccaccgcacctggcccgacttctaagtttttaagggaaggctacccttcccttaaaatggtagctgtaccacgatgacagctaaaagctaacaactactcattttttggggggaagggcacctcattacctcattttcaacatcgctattcttttacttttcttttttttagagacagggtcatgctctgtcatgcagtggagcaatcatagtaattcactgcaacctcaaactcctgggctcaagtgatcctcctacctcagccttccgagtagctaggactaaaggtgtgcaccaccacgcacagctaatttttttaaattttcctgtagagatggggtctcactatgttgctcaggctgggctctaactcttggtctcaggtgatcctcccaatttagcctcccaacattactattctaactttaactacctgccatctgttctaaacatttacatacttattcctacttgacatatctttttccaggttatctcaagaaaaaagaaaccaggccaagctttgtggctcacacctataatcttagcactttgggaggctgaggcaggagtgtgagatcagcctgggtaacacagggaaaccccatctctacaaaaaataaaagagaaaagaaaacaaaaacagcaaaggtagggattagaaagatacatgtgtcagtatcagttttcttacaaatgttattcttgcatgacaaatatatagtataacttactgcatggctataattaagtatcttgtagttttaaatccaccgctacattttcacctcattataagtcttccacattacaggttctaaaataggagtattttttttattttccaactgtaattctttttcaggaatgactagtgaaaggattttgttcattgacaatattcctgcatttaccttaaaggaaggaggaacatgttttatctggaggcaagatgaggcattccagaatttctcctcacaggtgtggtgctggttattaatcccatctttatgtggtaagattagggaatgattacattcaagtccaacaggttcaccacacatattctagacacaatgccttaacccactcattactgtattacacagctatggaaacatagaaagtagatcggttctaaaaaggctgattttttttttttttcttgagacagagccttgctctgtcgcccaggctggagtgcagtggcacaagctcggctcactgcaacctccacctcctgggattaagcgattctcgtgcctcagcctcccgagtagctgggattacaggtactcgccaccatgcctggctaatttttgtatttttagtagaggcggggtttcatcatgttggccaggctggtctcgaactcctgatctcaagtgatccacccaccatggcctcccaaagtgctgggattacaggagtgagctaccgtgcctggctaagaggctgaatttttaaaaataagtgtaagttttatttactgtctaagaatcattcctattcctgagattgggtaataatatatatcagctgagctataaagaatgctgatttcatttctattttcatttttttatgaattttggagggaagaaagcaggtcagtaatttagatctattattaatatattataagaataaacgtgtgtgtgtgtgacctctctttatatacctacacacacaactaatacactatatttattactttctgtcctccaagaggaatggaatttttttctctgtcataatttcctggtagggctgccatggtcagttctcaatttcatgaagatcaacaggacttaacctagttgcaaccttaagatgttagcatttcatatttttaaaacttgcatgtttatacggccttgaggaaagagtagactctaaatgtaattaataagtaaatgagactgaaacgttttaagaaatgttccaatctcaacacaacataaccaaaggcactaactagcacttattctgtgtccagcactgcagcaagcagtttattatgtccatgtactcattatgtctcatgtactcttcccaataactctgtgagataatgtccattagcgttcccatttcattgacaaggaaatagagacagaataaggataagccatctactcaaggtcaaaaagagtagtaatgtcaggagttggatctaaaactaactgaccccacagaccatgatcttaatcacagcacatattcttccaacaattctttcagctgatacaaaatttacatcaagggaatgacctttttaaaactctttaaacgtcacaataactagggaagcaatatgtctgaataatttccttagtaattctcaatactgtatttactatcaaagttaatcttaacaaagttctcaggctggcaagaacatagcagtattctgtcctaatcacagttactgtattttttaaccctaaattgatgcataagctgaggaagacagaatctaatttcggtcatataagactactttgcacataattatattttttgacattggataataagagggttattctttgaacttttctaaataattttatggagaagagacaaacataacttatttttaaataaaaataatactagtcctaactaataggcctgagccagttcacaaaggttaggcaaaactactaatgaaaccatagcaacttcaagtacagctattatgtgtaaatggttaccagtgagttaagaaatcttaggcagccagaggaccactgactgcatggcaacagagagagagagagagagagggaaagagcttttaattagaacagtttaccactatgtaatttctctcaaatcctttccccctcagagaccacatccattttatcaccaaaatttagaacgagggtgagactgccaaaacattatgtaagtttataagattaatcagtctatatagtaataactatcaagcattactactaagctacaatgaaataaactgaaaggcattatttatggcagaagcatcttgcaggaactaacttaatcactatacttgtttccaggaggcccaaagaccaatccatgaccaccaattgttacattctaactcccatatagaaagattttcaaaataagtcttacaacaggggacaaaagcaagcatcatgcaaagttgctgattgtttatggaagatgcaccaacttctaaaaataatgaacaggatggggggcaaggaatataaatgagcacattttaagaagcacattccaaaagaggcattaatggagagtcacataatttctatagtatttgtttctggaaagcatagtcaattacattttagtaaagacatgcctaatattgtcaatgtatataacacctaaagtaaattaagtaaagtaaattaaagtaaattaaggaaggttagacttgagtatggttggaaagctatctagttctcacatctttacaaaggaattaagttaagttggactttattaggctaaaagctgaaaacaatttcatggactgatacaaatcttgtttttcacttttcttgtgaagttggtcttctttaaatttaatcaaagtatagagagcacaaatcacatttctcaatgtgactcctgtgagtaaaatgtactgtgacagcaagaaggaagaactctgtcataaatgcttttcagtactctagacagcaccccattttacagcttcatttatacttcttggataatacccaattgttaagaccagcaccactgcccccgccctcttcctccccacctcccactttttaaagcacagaacaatcagaaagaacctatgtagaaaaaactcttcgatatctatagactggcgtctcttactactatcagtcctattcaaagcaattatcaaaaggcaaaaaacaaaacaaaacaaaaaaacccatttattccatatttaaacagggtgcttaaaacaatcacagggattgacaatttgtaagcacaagcttctgcaactcacctattgatccttgggacttactacagtctattctcaacacaggggaagagtgtttctttagaaataaaactcagatcagggcactcctttcctcaaaaggctccctattttactaagagtaaaacacaaaattcctttcaatggcagataaagccctacctaatccagtacactgcccctaattatgtctctgatttcatagtctatgtctctgtcccttgctcttactcagctccacactggcctccttgctccagttccaatatatcatgcagtctgcctcaggacctttgcactgacttcctcttctgcctggaatgctcttcctctagatatccccaggtctaattcctctacttcttcacacttttgctcaaaattcatctcaataaggcctatccatttaaaatttcatcttccccccacccttgtactcctaattcccctttcctgttctacctttctaccttttctttttagttatagcattattgtctgctaacagactatgtaatttccttttttatatgctcactgttgtttattgttatctgcttgtacaatgttcgtggaggacagggttattttttgttccctgtagtatctaaagtaccgagaacagtgtctgatagatagtaggcactcaattaccactgaatgactcaggacaactcacacagcactactagtaagataagacaagggctcattttattgaaatacatgtgccaaagatcttactggtaagcagaccagactgttctaatttaggggtaaaagaatcattcagcagccaagtaggcagcttagtaggcttatttcacaacaaattattctcacttgaagcaaagattactaaaagatgccctctacattacctgcatcagtgaaactagactcaatattttaccacacagtctacattacaggatgaaaacaaaaaagctagtcaaaggagagagcactgagcatgctttcagacaaccaaatcatcaaccagttataaacagtgacagcacaaagttattcactcattctatcactccatcaacaaatacgtatttctgggccctggggatgcagcagtgggaaagacagatacagcctttagatgaaaggaaggcatatatgaatatataatcataataaagggacatacggtgatggagaacacacaggagagggtcccagcacagacttaggaagaagtgaattagagagagattgctgaaggactcaaactctaagctaggccttgaagcttctttaccttttaaaactagctaatctgagaaaaaggtggcatcttattgatcatgtcaggcaaaaactgaatgatattttcttaagagatatgtaacttatttagatttcaaatgtgagtttgtaaaaacatctacaaggagtttcgccacccaccatctccatttcagcagacctctctgataaaaaaaaaattgtaaacataaatgttaatagttaactcattaatctttttcctagaccacttctcttcctgtgttcactatcttgagcacttagcctagtttcaagcaactaggctagtatttctttcagcattatttccaaaactaccatgtttattagctaaattaggaaataacctgtaagtccaagcaactcggctaggtatttctttcaccattatttccaaaaagatcacatttattagctaaatcaggaataaccctacacatacacacatacacacatacacacacacacacacacccagaattcatcaatgcacaatttttatccaagtacaaaagaagtatcaatagttattctcatttaacactctccattccatacaaatctcttttctgtacactttacatatttccttcattctctgtctggaataaatttcaacttccacatcctatccctatttgtttcttcggacacagttattaccttctttagaggcttttctccactaagcttctctaatattctgagtttcatgcagcaccctgtaagttgtctagacattacagatttgactcagcccttcagttattttaggtaagcatttcttaataagaaatgcctcatttctttaataagaccatagcaattggaaaacgagacaggcccttagttttggcatcttacatagaacttaacacaatatttactcaataagaaggggtagcagactttcaaataataatcatagccttagatcagaaaaatgtgatgagaaataggtttagagccaaaagaccagggagagatgcaattttgtatgtgatattatacaattaggttcatctctctcaacctcagttccctcatctgaaaattagagataataccatctgtttcacaggattgttgtgtcaaataagattatgtgaaagccctttgtaccctccaagatgttactgaaaaaaaaagagtttttatagaactgctcacccacatgttttgtcagtttcactcataagcataagaccctgttttttgaagaaaggacatagttgtaatgttggcaagaagtcaaaccaaaagaaattaaagtcagatattaacaatgagaagcatcattacataaatttaagttcccagaaaagtcttatatccatttcagattttcaactagtatgctcatccaaaatatttcctaatgtgttaaggatccaggagaaaactgcctctggtaaaatgatatctttttatcacacactatggaatgtgtttgtgtggggaggaagggggagagagttgtaactatgtcatcccacataaaagtaaaacctttcatcctttttccaatcccatttccagttcccagtaccctttgatctcttctctaaagcaaccaccttaatgaggcttagcttataaagccccaaagatctagtccctccccattccagcttcatcttttgccatatacacctctattcccaccaaacacacacacacacacacacacacacacacacacacacaccttttctgccctcagctccctctctcggcccctggatgaacttgtactttccccacctttccaactctccttcatccgttaagccctctgtgtatacattttttttgcagaggctttcctgaagacaccccatgtctgggttaggtggccatactatgcagtcctttagcactctatacctgccctataatggcaattcttgtgttcacctgtttaacaaacaatggagtgcatatactccaataatgattcagcaacgaagaaaacaaactccgtgcttgaacacagcttacaaagaaagggagaagacagacaataacaaaatttgctaagaacaaagcagggtaaggagtaaacagtgacagtaggggtactatttcagttagaatggtaacaaaagaagagcttctgatgagaagacccttgggtagagtcctgaaggaaaggagacagtcatgtaggtatgtggggaaaaagttccagggcaataacagaaactggtgcaaaggtcttattgcaaatgtggttgtctgtactcaaagaacaagaggccagagtgactggggtggagacagagtggaaagaggactaggtgaggttagattagagagtacaccggagaccaactcatgtaggacctttcaggtcttaccacatggtattttgtttgatcatttacattgttcttctctcccattaacagcctcagctcttatttactgttatattcctcagagactattactgtgcctagcataaggtagatattcaaatatttattgaacaacatcaggttaaaatgtaaatccagaaatttcctttaccaattcagtgttttcagcaacttttacattgaaataaaaaagctaaacttattagttgagcaatcattgttagtaagtggaagaagtgatctcttctcattggctttcactaaaacaaaggctgctgaatagccttgttgtaggtcttcccttctatcatggtagaatccaaaaccccacttccatttccctcttcaagaatgaggcagagataaggaattcagtataagaaacctgggatgggaacttgtaaaataaaggaaaaagtatcagaagactaatttccacttaactcatgacaattcagtttccatgaaatttgaggaaatagttcccaggaggaatcaaaaaattcttgtctactatgcttgcgcaaagaaccactacagttaagaaaaaggggtgggggggggcatggtggctcatatctgtaatcccagcattttgggaggccaaggttgggggattgcttgagtccaggagttcaagaccaaccaaggcaacatagcaaggccttgtctttacaaaaaaataaaaacagctgagtctagtggtgtgagcctgtagccccaactacaaaaagaaaacaaacacacacacacacacacacacacacacaaagaaaaggcaatattatagtaatactgaattacagcttgctctggtgttaggttcaaatattggctatttaagatttttgcatttctactggtaatatctgctgaatacacaggaatatatatgcatgcagtatcttgccaaacattactatcaagaagccaacagaaaggcccaaaggatttccagtcatttaagagatctagatgtactgtatctttacaaaattttgccatctgtacaaccacatcctatggtggtcaagagcaacttagtatatccatcttttaacactacattttccaaaaatcatctccatccagattcagtaactgtatattgttcctaatgttcaaaatgcactacctattgttcctttctcaaaggtatagtcttcatttgtaagaattaaaatttaaaacatagcaaaaatctgaagtagtcatgtaccacataacaatgtttcagtcaacagtggaccacatatatcactctgtcacctgggctggaatgcagtggcgcaatcatggttcaatataaccgctgcccctgggctcaaatgatcctctcaccttagactccccagtagctgggactacaggcatgcaccactatgctcggctaattttttaaatttttttgtagagaaggggtttccctatgttgctcaggctggtctccagctcttgggctcaagtgatctgcccacctcggcctcccaaagtgctgggattataggagtaagccactaagcctggcctacagtaccatatttttactgttgttttctatgtttagttatgtttagatacacaaacacatagcatcacgttacagttacctacagcatccagtacagtaacatgccatgcaggtttgtagtatgggagcaacaagatacaccatatagattaggtgtgtagattataccatctaggtttgtggaagtatactctatgatgtctgcacaatgacaaaatcacctaatgacatatttctcagaacacatcccagtcattaactgatgcatgactgtatataaattaaaagtgctaaccgaaacataaagggacaaatacacgtatcacatgattaaaagccaactgtaggccaggcgcggtggctcacacctacaatcctagcactttgggaggctgaggtgggtggatcacttgaggtcaagcgttcatgaccagtctggccaaaacagtgaaatcccacctctactaaaaatacaaaaattaaccaggcatggtgatgtgcgcctgtaatcccagctacttgtgaggctgaggtaggagaatcgcttgaacctgggaggcggaggttgcagtgagctaagatcgtgccactgcactccagcctgggtgacagagcgagactccacctcaaaaaaaaaaaaagaaaagaaaaagaaaaaaaaaaaactataaatctgaaagtaattatagagattttgctaattagcatttaaaaatttgtgttcaaattatagcctgctctaaacaggcagcttgtagaaccactctagcctaaattatgtctggtttggccagaagtgtaggttttcgtttgtttacttgttttgtttcaatgtgaatttgaatacttttaggaggtgcagatgtattttgccacagaccccaccactcccaattgtgtaacactgaacctcatttatgttctttgtgtgaccctgaaggtatttaaatttgcaaaccctgcaagtgtaggtgaagatgtttagtttcttatgcatatcccaaaataactttagaaaatactgaaatggctgggtgtggcggctcatgtctgtaatcccagcactttgagtggcctaggagggcgaccacctgagctcaggagttcgagaccagcctaggcaacatggcaaaaccctgtctctaccaaaaatacaaaaattagctggacatggtggcccattcctgcagtcccagctacttgggggactgaggtgggaggattgcatgagctgggaggcagaggtggcagtgagccaagatcttgccactgcactccaacctgggtgacaacagggcaagacgctgtctcaaaaaaaaagaaaacactgaaataactatagtcgaactacagtgattttttcagtgatatgaacatcacaataaaaagtaaacaatggaatatttttcttagggcaaacaagttcattctattttcagagactttctgtaatttaaaacacttcagaagtcaacgacctcaattctcatcattttacagtgaaatgactgggcctacagtggtaaagtgacttgtccaaggtcatatggccaattggtagcttggatacaaaagtgctttgaattcgtttcccccaaccagacactttcatcaaaaggaagggcgactgtttctgattattctgagcctgtgctaacactctgctcagtgttctgcattcagtaagtagtcaacaagtagtaatgagatttgcttccaagaggtaaactcagttattgtttataaaaaacagtatccagctagagttaaatagaaagaacggattcctgctcaacagccatagtatttattgaataaatgaatgaatgaatggttgaatgaatgaatgaaaccttagttcaaaggtagatttgtagttgctgggtccttacatggatgaaggagccaaacaaaggcaccactatcagtaacacttaaccttctaaatagacactggccttaattaaggtcttttcacataggaaaaataggttcttaatccggttccagaatgcccaattaggccaaaatacagcattttgcactttgcacaagtcagcaaatcatttcctttgttatataaatccatccttagtatacctaaaattttgggatacagctcagatctaactcaaatgttttccaaagtaattcacaaacacattacttcagcatttcttctacatttaggaaaactatttttaaaaaccatcattctgtaacattcccttttccaactatagcatacagtagggctcaacaaactgtaatatacatgcccctgagtaacatccagtaatctctggaagcctccatattgttgtatcaagcagggctgcgagaagaacaatttttcttagttattggctatttttttcctttgtttcttaaactttcattagcaggatcaaggttaatgtagccaaggagatcttgtaggtggaccaaattctcctctcttaacttctactcttctactctcagccatacactgttccaactaaattcaaatggtggagaaatgtttttgccacctttcctccttccctttccatttcatcttctttatttctttctccctttccttagacagaacatagaagttcaaacatatcccctttgtgttctgtggggaaggagtaaacggtgtttgcaatcagcccaggataagaatgggagaaactgaaaccaggataagggtgaggagaaactggttaggttcagccctggggtcaatgggggaatggaggttaaggaagagaagtcacgatcttcagttctgttttggctttcataatagtaacactctccatttaggaatgccaaaatttcaatgtgaccaaaagtataactgtgtttaaggtttttttctctttcatggtatagtgtatatgtgaactgggggcagggagagctgtgtcaactcagatactagaaaagctactatagtagagagttcacacatacatgggaacacttgctggaatctgtcttatggcccaccaatgtgcaacctgggcatgtgaaggcactaatgacatacgtggcaacccttgccaatggggtcaggagccagtgtattaatgatccccatctgaggtgcattacgtacagcttcttagatcttggcagttttcagcccaattgtccatagtggtgaccaactcaacatatactcatagaagctttctctcctttcctgtttcattttccctagccccccactactggttcctgagaatcccaggctctgctttctaggggtatcccaggctaaaacaacagaggtggttacaaagctgagagaagaagcctttctcaacaggtagagtctgccccttatcccagtatagaaatctaatacttcaaggatcagcatgtagttctagtatcatctcccacatgcatgggcgataaaagaggagggagtctatatggctggggatccgttacatttcttgaagagcacctttaaaagttgggatcggccaggcatggtagcatgtgcctgtagttccagctcctcaggaggctgaggtgggaggatcactacagcccaggagcttgagtccagcctgggcaatatcacaagaccccgtgtcttttaaaacaaaaacaacaacaacaacaacaacaacaaaaccaaacctgggataaacactttgaaaagaaaatccatagtcaaaactctctccactcctttctccatggaacttttgtaagaattcaagactgactcttcaatggggtacaatgtgcctgaaatgatgtaaatactaacacgcaccacccataacatacatcttctggtatccatccctacacccaaaaagaggtgcatgataggaataaagaattttttgaagtctatatgttgctaaatggttcaggaatagaaatgggctattagtcttcattctgtagaccaggaaggcaaatgcaaaaaatttactcacacatcattgaattcctccagagaccttgcaggtgtaaaaacgtccaacagaccaatcacctgtaagaaaatataaaaattaaaaagtaaataaatattaaactcagtatagtacccatcaggtcttaatcttctttttttttaaagagtcagggtctaggccgggagcagtggctcacgcctgtaatcccaacactttgggaggccgaggcgggcggatcacctgaagtcaggagttcgagaccagcctggccaacatggtaaaaccctgtctctactaaaaatacaaacattagccaggtgtggtggcgggcgcctgtaatcccagctactcgggaggctgaggcaggagaactgattgaacctgggaagcggaggttgcagtgacccgagattgcgccactgcactccagcctgggagagtgcaggtgcagagtgagactctgtctcaaaaaaaaaaaaaaaagagtcaggatctcactcttgacacacaagctagagtacagtgacaccatcacagttcactgcagctcaagcaatcctgtctcagcctcccaagtagctgggactataagcacgtgccaccaccatgcctagctaatttttctttttttgtacagatgtgtctcactagattgcccaggctggtcttgaccttctggcctcaagcgatcctcccacttcagcatcccaaagtgctggcattacagcagtgagccaccacggccagccacgtctcaatcattttaataggaactaattcaaaaccagctacctcagttccataacatcacatcatatacttaataactccaactaattttctacccaaattatgcttttgttttctacttgttaacatcaattctcatattaacccactttaccattaaaaatcttcatctctttagaatttattcatatgtagtcagtagtttatcagaaggcaaaaagatttagggtccttgccttacgtatgtactaatggtctaatgaattaatccaacaggtgaaaaaggtcacacatccatggttgttaccgtaatattgtgttttttaaaaatgtattccacgaaaaatttccatattaactgtatatgcttcaaaactgacatttttaaagtctcaaaatattctcagtatattcttggtattattctcacaaagtcttaatgtatagggtatttaaatcagacaatttaaaaatgaaaaaaaaagtctatttttacacagggataaagcaaagagctacttaatactcaataacccatggtctttgagcagtttttctgatcaggaatttatactgatttatccacatacagcaccctccaacccctacctcccatctattttccttaaaacccaggccattcatttctacaaagttaggcattgacaaggcaaataagaaatatataattcatttgtaatacgcccagccatatttgagagtatctggttatgaagcaagactgtggcctcactagcacactgttctaaactgccaacttaaacacaaagctctagaagtaagatatgttaacactcaaaacattatcatgaaaaagatcttctaattaggatgttactccactcatccaaatatcagacttttttttttttctttgagacagagtttcgctcctgttgcccaggctggagtgcatggcacaatctcagctcactgcaacctctgcctcctgggtataagtgattctcctgcctcagcctcccgagtagctgggataacaggcatgcaccaccacgcccgactccaaatgtcactttttaaaagcaactttaattttacagtctgaacctgaaaaggaggtggtgggacacatacttggaattcaagaataggtttcaagtccttgaaaattgttccaaaggaaatagaatcactttcagatcttacccagacaacagtacataagaaaaccaaaattacccataattataccacccattataactatcattaacattttgagatatatttcctttgattttctgatgtacataaattaaattggggttacaccatgcatagttttatatcctgcctttttacttaatatttaaatatttgtatacagcatatctatcatttgtgtataccataacttaaccaatttcctatctctagacatttaaggaatactgcaagaaaaatatatgtattttgcacatctcatattttcttccaggaaataaatttcaagaaacagaattacagaatcaaaggacaccaatatatttaaggatcttaatattgtcaaatggtcctccatagaggtaaggccaacttacatgcctcccaatagagtacctgtgacctcattcacaatagtgctttaaatttaagtcaaatccatttccttttaccttctccatctaaaccataatcgtttcccttgagtttggtatactcctggcttaagacctctggtcttttaatcactctcccttatacccacttctacttaaggtaactgaggtctagaagctaactttattcaccgttccaatattttctaatcaatgattcttgttatctgagatgcccatctcctcaaaacaatagaaaagtttaaaactatttacattgttttacagtgtttccattgtgattgtgaaaatcctcctatggaaataaaactaaatcattagagatctgatttacacatgcaagagttacctcaaaagacaaaagtcaaaactattttcaaataaaaactccaatttcaaactgaaaacacaacagacattttggaaccaagcagctgtaagtttgaaccccagtatcagtttgtgatttcttgggtccaagagcttataatttcttcattccaataacgctggcacttggaatggagcctggcattcagcaggagttcaatgaatggctgttatgtaaataataattggcaaatacatttggtatcttctctgagtcccattttcctcatatgaaaaacatgaggacatcattgcttattttcacagtactgacagcaagactgagcagacaatgtatctgaaggtgcctagtacaaaaggctgacccactgtggatcatcaaaataagtggtgaccacagcccacacagttgaatagacaattacaaaatacaatatacctaagcaaactatctgaagcagctacttccattaacagaatatgagacataaagctcaactattcaaatgattaaaaaccatgactgcaagaagaaaaataaagtaacctgaaaaaaaatagagaaaagccaactagtaaataccctaccaaattttaatttcctaaaaagggcaatatttacaatatttaatgtgtttaacataagcacaccgaaaataacaattttgagattaaaactacccatgctaaatcaaagtacttaaatttttgatgggtttttacaaaatatccctcactccattaatcatacttatgaatattaatcataaggaaaatactgtaaaacaaaagcttatcagcattaaaatagatctggaaaatattttaggaatctattcatttctcatttcttttttttttttttaatataataatagagactggtttttgccatgttgcccaggctggtctcaaacttctgggttcaagcaatccacccaccttggcctcccaaagtgctaggattacaggcatgagccactgcgcccagccatttctcatttcttaaatggaaattcccttctaaatcaagtcatattttagtctatttccttaactccttctgctgttacatgacttcagtcacctcaaagtaacccaggaatcaaatttttagaaaagacattcataatacaaataagcagcaaatatctctaatgattatcccatcatggtccaaagcctggcaaatattaagtcgtatttttattaaattagcacacatccaaaaaaaaatactttaactcagtatccagagacaatatttagcatatttaacaaaagcacaccaaaacaatctcttggtctacaatggtaaggttaaatctaaggctcccaaataaaatttacaaaacaatttccttgatcatttttaaattctaaaatgtacagatctctaggcccatatatgggccatctctgtagtgtctgcccagacagcaaaggatgcagctggcaggctgcctccctttaatctttccttagagcaggtgttaacgagatcaaggtcagaagttcaatcaggaatggtccaactaactttgttcagagagaaactctcacagtcacagaggacatcccctagcttcagtcactcacctaataaatgtttatctattattcatgatcactaacagaagagacaattcaagatgaactaccgattgtgggtcagaggcatttttgtgtaaaagatcacatgtgccctctggcacctgaaaattgtatttgttaccaacacctaaaatgttcacaagttttaagcgcctgttgctgctgcctgtgggaggtttggccgctataaaaattggatggtgacccaaaacagtaattttttaaaaaagaagaggagggtaaacgagatgaatttctctgaaaaccctcaattaaacttaccggaagttttggttctttattgggtaaaactactttgacattataagcacctaacaaatgttttcaaaataggctaaaatgcaggaatttttctacattgagtcaagtcttttggcttcaaacatttgccaatggaatagagaactatgagacattcagccatgtgccttattttgtttaaataacaaatcactgatatctaggtgaccaccaactgttagaacttaaacatctttatataaaaaaaagactgctagtaagcaagccacttataaaacaatgtatagaaattaaaatcctatttttctaataccatgatccctaaacattggcttaacatatttatgaagaaaagcaaaacaatcagtgtagcactgataatctcctaaaccagatgttcttaaattagcatagccacatcaataggatcctagtggctcccaaaggtgctctggggttccataaatgtttggcttgcatttcactttcaaaatatcctttatacttgcaaagctgtgacactgtctctgtcacatataataatgtgtaatgaaaaacagcatacacacttaaatgtgttaaaaatcaaacgcaaacacatcccttaaagctgccaggccactttgattttatgcagacctaggaataaagtttctgctgccagctttttccgcatatctcaacttcttgtaaacatgtcactgattaggaaggctgcagcttcacactgaacattcttaaaactctggtttgcacatagctacttaagtaaaattatactcaggaatagaagttgtctgtagaaataggatttcctcaatagcatacaatcaaaataaaatgtgaaaataaaaagcagcagctgtgattataatggcatccataatccaattacaaatttaagtcttaatgttctcaatttagaagaaatttgcactaatgaaacaaatgtacgctaatgaagagtcacttatctgtgacttttttctcgctatgaagaagttaaattactaaaacagtctaaatagtcaaataataaattcacagattttgaattttcttccacaaggtaacaagcagtacagccagaggactttgaaatctctatggccattgtttccacaatgctacaaacttcacagtacccttcatatagcagtcacagaaattcataacttgattttgaaattcagtaaaataagtgtcttcagtcaactgtctttttactttcagttagtattccaattatatccacttatttatcgtattagaatttgtaagcatctttgcagaatggcaactgaatcaacaaattggtaaaaaagaaaaagttatatttaacttaaacaatgcctctgacatatttattaaaatacgtgaatctggaaaaaaagaaaaattattaacaaatatataaaataatagccatctctgataggactttcagtgagcctaaggcactctttctcagatttttccacttaaaaatattaaggctatattatgagaatatgggagtctgtggctattttgtcttttaatagccacagactcccatattctcataatatagccttaggaaaaccaggcaaagaatacataacttctttttaatattttctcttaaaaattattgtgaattttgtgttgtatttcataacatatcctttaattttaaaattttaaagagttctttctcctctaaaaatctttgagtaaaactaaaactccaggaagatgcatcactttcattccaagtctttgacctgacataaccaagtggccactaacaccccaggacaaggagcagggaccaacgtttgatgcactccagcgtatttccatctgcagtaattaaaacatttttccccagtctattcaagatcaaaatgtattcttccttgaatgaataacttacattttcatgtttcatatgtttaagtaaccgcagttctctgtaggttcttttcgcatgaatgatggactgaaatggtctggagagcttcttcactgccacacgtaaccccgtttttgtgtcaaaagcagcactaaggagaaaaaagggaaaaaacccaccattaaaaagctgttctaaatattattttggggtatttataaggctatttccaaattaaagggtctataacaaaataccaaaaaaaagcataaagataaaaagcaaaatgacctattatcccattatccaaataaagcttctgttattatttttggtgttttctccttgtcttttctatgtatctaaatcagaagtcagcaaatttttttcaatgaagggccagatagtaatattttcaactttgtaagtaagacctctgtcacaactactcaactctgtggttgtatgaggaaagcagccagaaaataagttttaaaatgggtgtggctgtgttctaataaaatttacaaaaactggcagctgcctgatctagatgagccaacagattaataaacagagttgaattctgtcttccctgcctaggcctcactgtcgtcaccttgccacatctgctgcctgctcagagtcgaggcccaggaaaccatgttttcaggacaataaattgccacaaatatttcttgagcacctacaaagtacttggcaccttcagggaatgggggaagagcagaacagaataataaaataatttcaagtagtgatgaaaatactatgactaaataaaagggtaatgggataaagagtgacagaaagccagtggagttataccactttagctaggatggctgaggaatgacatctgagctgagaaggaaacaatataatgattaaattccctatataaatatataagaaaaagagcttcaagcagaagaaataataataatattaatgtttatagagtctttacccacacatacaagaaattgttctaagccctttacatttatttgtctcaattcagcttttgtatttccccgaatcccctatgaaataagtactattatcattctcccacttacaagtaagaaactgaagcagagagaagttaggtaacttgaccacggtcacaaagcttaaaagcggcagagcagggagtctggatccagagcttatgctactgaccacttgactctgctatctctcagaagagcaagtgcaaacaaacgaaaaaagaaacagaggtaggaaacgtatggcatgctggagtgagtgacagaaagacagaaaggctgtgtgggtagagcacagggagcaaggggagagtgggaagggatgacgtaagagatgcaggcagcagctagatcatggaggacatctatagcaaaaatgcgatgtgtattttaattatttttagaaatcgtcgccaggcacagtggctcatgcctgtaatccagcaccttgggaggccgaggcgggaggatcacgaggtcaggagctcgagaccagtctgaccaagatggtgaaaccccatctctactaaaaatacaaaattaggcgcagtggcaggtgcctgtaatcccagctactcaggaggctgaggcaggagaatcacttgatcccaggaggcggaggttgcagtgagctgagattgcaccatcgcactccagcctggcaataagagtgaaactcggtctcaaaaaaaaaaaaaaatagtaataacagaaattgtctgggccagttccattatgcctcatcctccagtttgtctcagtctctaacatgtatccaagactttctggtcatctgttatcaccaaactctctgcctgccaaacttgcttttacaactctgtacctactccagtgcccttcctttcactcccaaacttttatggcataccctcaatcttcaaatcccaatttgtgataaactcctataaatcttcaacctcttttctgaacctcccctccatctctgaaactaggccatttctagaagacactgcttctcttatagccctgccattagaaagcattctctaatagcccagatacctcctggctagcaggtgcgtaggagtcttccttggcagccgttaccacttcaggaccattactttccgtttgttctataaaatacctcctgctcacaaccctgataaactatccctctctgctgcaggtatccactgacctgaaattttccatcattcattgaaaagttagtttctatccagaagatctctctacactctcaacttctgtcatcattcttggcaacttcaacatccaggtgaacggcacacccaacatcctgtttcctgacctctctaggaaactccaccacacccagccatcttcatggtcacattctagacctttattcctaccaaaaactgccccacctacaaaattttgaatgccagcagcatttgcttttcatcaaaaacctagttacctctagtttacttgtaccctgactacaacaatttgttaacctcattgtcattgcttgtttctatccttcagccctcttctgtcttcatctcccttcctgttccatgattataatcactcccttgcacttctctctctctgtctgtctgtctctctgatgtactcacctggataaagtctaaccttgggtaatctcaaccacttaattctccatgactgaatccaaggaactgaggttgaacaagaaagactgtagaatcagattttcattcttagtttctgaccttaatctcaaagaggctctcaataaagccattttcttctagtaagttcattttcctactcgaaaatgatcgtttgacatgttctctctcaaatctccaattcaccctcttccctcaagagttgcccttgccttcactgagaaaacagaaaccatcaggaggggagctccatttgcttagccccaaatctataaacccatcgtctccaccttccctcttgctataactaagaatatgcccctgcttatcaaaattcaagaccacaatacatgctttggagccacctccctcatcttctcaaggatttcacttcttcattcctcttctctcttgcatcatcagtgtctccctatctactggaccattctcatcagcataaatttgctctacttgtttaccgccttcagccaacaaacaaaagacttcccttaacagttctccatcacagttaaaattctccaaaaaagtcacctacaccagaggttcccagatcagcagcatcagtttcacctgggaatttataagaaatgaaaattctcaggtaccaccccagagttaatggaataagaaactttgaagtgggtctaataatctgtattttatcaagctctccatgttattctaatacatattacagtttgagaaccactaatttatacctttgctattcaaagtgtgctccatggaccggcagcattgacattatctgggagctcattagaaaatgcaggatctctgcagacaacaggaaaggaaaaaagaaaagaaaggaaaaggaaaggaaaggagatcttgggccctaaaatagaatttactttttgacaagatttccaggtgattaatatacctcttaaggtgtgagaagcacacatctacacaactgactcatttcaatcccattctttcctcaatccaattccactgaaactgctcttctcaaggtcattaatgacctctgctaccaaatccacttttctaagattagtaattgacatagtcaccactttctctaaatactgtccatcctggagtctatatcaacacttccattggttttctatgacccctctggcagctccatctctgtctccactgcatgtgctgcttctactcaaactctgtatgttggagttcttcaggacttggtactgggccctcttctctctcccacattctctttctagataatctcatctatgcccatgactttaaattaaatgccatctatatattgaaaactcccaaatttatgtctctcactgaaatctcttctctgagccctgatgtctccataagaaagacacataagcacctgaagcgtaccaagttcaaaacacccagaactattcttctccatggctctgttatctcaataaatggactgttcatccagttgctcgagctagacatttgattgtcatccttgatttctccctttcctcagtcctcattcaaatctattggcaagtctcatggttttcacctccaaaagacgtctcaaagtcaactgctcttcatttcaccaatatcatattagtccatgtcactggcctacctccttctaatatgctttccaaatgcatccaatacagtcttttaaaaatataaattatgccaggcacaatggctcaagcctgtaatcctagcactttgggaggccagggcaggaggattgcttgagcccagaagtttgagatcagcctgagcaacatagcaagaccctgtctctgcaaaaaataaaaaacgggttgggtgcagtggctcacgcctgtaatcccagcactttgtgaggccaaggcgggtggatcacttgaggtcaggagttcaataccagtctggccaacatggtgaaacccgtctctactaaaaaaatataaaaattagtggggtgtggtggcacacacttgtaaccccagctacttgagagtctgaggtgggaggatcacttgaatccaggaggtggaggttgcactgagccgagattgcatcactgcactcaagccttagcaacagagtgagactctgtctcaaaaaaataataataaataaattaaaaattaggcagccaggcgcagtggctcacgcctataatcccagcactttgggaggctaaggttaggagtttgagaccagcctggccaacatggtgaaaccccatctctactaaaaatatatatttaaaaaaattagctgggtgtggtggcaggcacctgtaatcccagctactcgggaggctgaggcaggagaattgcttgaaccagggaggtggaggttgcagtgagctgagatcatgccattgcactccagcctgggcaacaagagcaaaacttcatctcaaaaaaaaaaaaaaaattagtcaggcatgggccaccatgcccagctacttgggaggctgaggcaggaagattgcttgagcccaggaaggctgaagctgctcaaccttgttgtggtgcgccatgatggcaccactgcactctagcctggaagatacagtgagactgtctcaaaaatgaaaaataaaaaatagcaataaaagtacaaattagatcacaacactcccctccttcaaaccattcaaggaatctccttggcatacagagtaaaatgcaaatttctcatgatggcctacaaggcccaggtgatctggtcaccactgattattccacctgttcctgtgctactctttccctctctctcagctgctatgttctgctagctcctttcagttcttttaactattcagacaggctgctcctggttcctaggattttcttctcctccgcccccatcccaccccatagctaaatccttatccttcaagtattggtttaaatagtcacctgctcaggaacctgttagggacctctaagaagccattactctgtcacaacaccctcactgactccttccttatctcacataaaagagggtggtggttctcttcttttccactcccattgctcctacaaacccataaattagtaacttcttccctctcaaaagtagcaagtaaatgtatactcatctctaaacccagttctctaaactagctctggtgagactggaaaaatggccattgcccctgtgggacccagcttcttcaacttcccacctcagagtttgccttccacctgcaagctgaacactttcttctctcctccattggtaagcctgctggggagcaaggaacagcagcagttttctagctgatctgactgattaagtgtgcaagttcaattaactggggaagaaataagaagcccacttgagttgcccgcccaaggcactctgcatgccagctttactaataaaagtaaatatttttatctctatttgactcctgaatctattcagcaaaaggcaggctagaattaatcagtaccctatagaccccaacaatcacaatttattattacatgtttataatactccaacagagtgattaaataagagctgggactttggaattagactatctggattttaattccagttctgccacttaatagctatataatcttgaggatgttaattaaattctttcatgaaatgagaattatgtttatatttcatctgttggatatgttaggattaaatgtaataacttttatagtaggtttggcaaggagcttggtccatggcaaagctcaaatacgcctctcaatcacatctgtaaaagtagagctacaagtaaaaccttgttttcatgaacaacatcataaaatgaaattatctttatgataaacaggttctccaaactaaaattcaggacatactgtttaacaagtttttcccccaattgtgaatttacatgaacttttccaaaattatcaaattaattcacattttataaaatcattggtatagtaaaaaataactgaaagaaatataaaaattagaagcagttattacaatattaggatgtcattctcactcatctactgctgaccgtgaatccagtacataacacacaaggataatcattaaataaacttcaatgttttgttacacattcatacttgcctccccttgtgtcacacacacatagaaaatgtgggttactagattcttcatatatcctaatataattctgtttaacttctaaatttattgatgtataccttcctttattcacaatggatttaaagcagactggaattatatatataaaacctgacaaaatggtaagtgattaagggaaaataagaaagtctgtacagctgaggttagcatatatcatgaggtcctttctttctttttttttttttttttttttttttgagacagagtcttgctgtgtcacccaggctggagtgcagtggcgcgatctcggctcactgcaagcaccgcctcccgggttcacgccattctcctgcctcagcctccccagcagctgggactacaggtgcatgccaccacacccagctagtttttttgtatttttagtagagatggggtttcaccgtgttagccaggatggtctcgatctcctgatctcgtgatccgcccacctcagcctcccaaagggctgggattacaggcgtgagccaccacacccggccagaggtcctttttaaatacccattagaggtaggcctcaaatttggctcaaagctcactaaagccattaacaaagagaacagaatcagttaggacatgaatcacagaagccatacaataaaaaccaaccaggtactcaggagagctgaagagaggcataattattcctgtaataaaccagggaaaagttcattctgtgtctgttcaagaaggagacatataatgtggtaaaaatgtcctaatcaacatctttaaaagaatataatagtgggtttcagatggttttctttttagagcatccatcagtacagattgctgtcgtaaggccaaaatacagttcattattagcaaagagggtaggagtacaaaatattacggtgttgctttttttttttttctttaaggtctcactctgtcatccaggctggagtggagtcatgtaatcatggctcactgcagcctcaacctcctggcctcaagcaatcctccaaccttagcctcctgggtagccaggactacaggcatgtgccaccaagcttcgctaattattttgatttttgtagacacagggtcccactatgttccctaggctggtcttgaactcctaggctaagtgatcctcctgccttggactcccaataagtacaggggttacaggcatgagccaccatacctggcctctctgacagacttaatccaagaggaaatcttaaatacatttagaaaaacagataagctccatattcttcagacaatcctccaaagatgactggagctatcaatgagctttttgtttattatttttaaaattttcttttgtagagatggggccttgcttgttgcccaggctggtctcgaactcctggcctcaggcgatcctcccacctcagcctctcaaagtgtttgggttacaggcatgagccaccatgttcggctgtcaactgagcttttgataggtatagagatatagggaacttgtgtttatattccatgatgggcacctgacttgtagattttctgttataaggtaatggcagatcaataaatttaacatcagctgagtagagaaagggagacaacctcttaagaaaggtaaggtgctggacaagtgcccatgtccacagagtattaaagtacaaacgactgcaccatgattttcctcaaaaaacaatctgtgttttcatcaacagaatatgaagaatgagtaatcactcagcaagtctttgagtaatttgtggggatcgtaagtgattttacaatttctttcaatggtcatagatgacttctaagaagataaacacaatttggtttacttttggaagttaatggaaatatttaaatatattgaaatctgtagttacactgaattagcaaagtctcattaatacattaaattcattagaatatctataaagtgagggccgggtgcggtggctcacgactgtaatcccagaactttgggaggccgaggtgggcagatcacctgaggttgggtattcgcgaccagcctgaccaacatggagaaatcccgtctctactaaaaatacaaaattagccaggtgtggtggtgcatgcctataatctcagctacttgggaggctgacacaggagaatcgcttgaacccgggaggtagaggttgtggtgagctgagattgtgccattgcactccagcctgggcaacaagagcgaaactccatctcaaaaaaaaaaaaaaaaaaaaaaagaaagaaaaagaaaaaagaatatctataaagtgagaagaaataatttgcaaaaacatgacacctcttctccggatcatacaatttcaggctttttttccaactgaatcaggataattaataatagtcttcaaaacttgccttctaaataactaaataattaagaccactaacttggaactttctctttacctgtagcacctggaacaaatttcaataaatgacatactggaaatatttttctgcacatgttacattctattacagaagcctagcttttcttccttccatattcaagtaaatgtgcaaatatcactgttgctctgaagcggatgctctgtcctgccattttggaaataacgtcttgaaaataaaggcaactttatgcaaaaattggaacttaagttttgatttaggaacctcaaaaaatattcttcaaacctagtgaaatagaaaaattaaaattatatacatttatcttcttcagagtagcaggagatttaagattgactttaaaaactcaaaatttaaaacattagctttaatatcttcgctaactctcaaatatcttgttttaatgtcaacacaacagtatttatttaatcacaaaacaatttcaccactgtaattacatatatagtattttttaatgaaacttactttcatttttaatttttttttttgagacggggtcttgctctgttgcccaggctagagtgtggtggcatgatcacggctcaatgcagctttgacttcccaggccccaacaaacctcccacctcagcttcccgagtagctgctactactgaggcacaccacgacgcctggctaatttttttatatttttggtagagacaaagtttcaccatgttgcccaggctggtttagaaatcctgagctcctgagctcaagtaattcacctgcctcagcctgccaaagtgctgggattgcaggcacgagcctgcaagttccaaatgaaagtagaatgattttataagatgtttcctgctaggtgcggtggctcacacctgtaatcctagcacttcggaagtctgaggcaggaggaagcttgagctcaggagttcaagaccagcctgggcaacttcatgacatagtgagacctcgtgtctacgaaaaaaaaaaaaaattaggtgggcatggcggcacacacctgtagtctcagctactttgggtggctgaggtaggaagatcacttgaactcaggagttcaaggctgcagtgagccattgactgcgtaactacacttccacccaggtgacagagcaaaaccctgtcccccaacccagccaaaaaaaaaaaaaaaaaaaaagatattccttcactgaagctttaaaagctgattgtttatgacctcaaggaactaagaaatctagccgaggagtcaaaatgaacagaggcacacataaatttaccagactttgacaaagcaatacatttgtttcctctaatccattctttacactccaccaagaccaattttaaaacaattttcctccacagttcacaactcaagaaactccaacagctctctactacctaaagaaccatttgtagactttttagaaatgcaactgcctaagtcccactccagatctcattcttaatttccagaggtatgtttaaaagttccacaagtgagtctgaagcacaacaagaatgagaaccacaactgggttcaccctacctgagatgttcctcctgtcagaacagtccttttcatatctattctcttggtttatgttttctcttgtctgaaaatgtttccttttcttctctccaaatacccatctttctaaataatcttcaaatcctttctgctccataaaaccatactgaccactataactcacaatgtctccacttctctgtacacatcaataccttcatacatatatacacaatttattaatattttaggtctatttcttttacacattggtgggcatttaacactgatggacgactggcaaatttccttcactacagtaaatctaaaatataagcatcaatatttatacctatatatttcaaactttcaaaattatgttgcattaatacctagagttattgaaaacttcaggtaaattggttcattcctgattgtaatttttataactactgtcagtcatcagtgctaatgatgacatccgcttcacatatctaaactgaaccattcaagcttgtaacatgaatcccattccaacggaagttagtgctacatctctggtatcttcaagaagtgtgtaggaaagtaatcaaggaaaagcatgaaacattacatctcaatagatttagaatccaaaggatcagtcattcttgagattaggtttgaaagtacaaatttggaaggatagtatatgaacaagaccattgttgagactatcagataatgaattcaaaaagaatatgcacagaaagagaaaagaaaatttaagaatggatcatggagcagaaagaaaagaggaagaaaaaactgaccaatggatgaaataggagaattagagaaacacaaggaaaaatctgaatagcagagtactttaaggtggtgtttaaaaaaaaaaaaaagagcacaataaatgttaagatgtatacattgtgacactaaagttagttactgcctcacacccttaaagtaattaaagcagtagcaatgataattcaggaaaatgcattgtatcttctaaggtaccagaatacataatgtgcctaaatgacattctaaatcaaagaaggctgatcttcctgagttactgctacctgagatccacaagatcttcaaaatttcagtctgttattacctaatatttttaaaactaagcaagccttcccagatgcaagaaccttcaaaaacatacagaaaattaattcacaatgtactacttcttgctccttagtttatgtgcagctctctttgtggtcttctaaacagcattttatttctaggagtttgaaaacgctaaatactgaaagaagacaggagagaaaggacacagaataccagaagagacactagggaaaatgctacctacctaccaacttggacttcatgctaatttcctttccagaaaaaattcaaaacaccctaagttggggccatgacaatgacaaaacacaattattcatgaaaattgggtctccctcactaattagttgtttctcaaatgtgccagtgatacacctggcctcttgcaaacatgcttgtgcaagttctcccatccattaagcttattgggttatagctaggaccttgaccattagaaatgctgttactctcctagaaataacaaaaatcatgtttagagaggcccaatttataatgcagaaagtatagcatttctgcctttttgcaggtggaaggttcatgttatcccatctagtttttactcaatcaaatatacagggttatcaatccaaatatatagggttatataagtggttctcaactaaaggtgattttgccctccctacccgtcaagagatatgtggcaatgtctagacatttttggttgtcacaactgggaattgctattagtatacagtgagttggagacagggatgctgctaaacatactacactgcacaggtcagtcccccacaacaaaacattatcccacctaaagtgtcaataggttgaattaccctgggttatacaggttgagtatccctaatctgaaaatccaaaacctaaaatgcttcaagatccaaaactacagaggacttccaaagccatctatgaggaaacataaatatgtctcctctggactgatactttctttttttttttttttttgagactgagtcttgctctatcgcccagacaggagtgcaggggagtgatctcggctcactgcaacctccgcctcccgggttcaagtgattcttgtgcctcagcctcctgaatagctgggattacaggcacacaccaccatgcccaactaatttttgtagagatggggtttcaccatgttggccaggctgatctcaaactcctgacctcaagtgatccgcccaccttggcctcccaaagtgctgggattacaggcgtgagccactgcacccagcctggactgatactttcgaaaggagggacccttcttttttttaaaatctctgtaaacaaaatatctagtatagtgcactggaaatattaaattaatgaacttacgaaaacaaagaacaaaactggtatgctttttttcttcacatgctcagattgtgtggtgtctacattttaagccataagtttgaaaatgcaatcaatacacacttttgagtagaatgacagtaagacacacatactcacacacacacacaccttccttcatatcacaggcacagtgacaatatcaccaaggcctaagagaagtaagttttgaggaaaataaggaatttgtaaccacatattcaaataacaggagccaacatgttcagggtctaatggtactcagacagcaggtctagacaaaataaacatttgttctattacctttttgttatgttgccatgggaatctatgtttgcaggaaaacttattttctgcaacctgatgatagagcagtaaaagagggggagctctgatgaaaagaggagaggggtttacatctgtaaaggcagggaggacaataaataatatgggtttttataggatcacatgtctgtagataatctttcaatctatatgatatatttaagtttaacagagaagtccttggggcctcaaagctaagacattaatgacagataacaatggtctaacctctactaaaagtattataatggggaaaaggcagaggaatgtaaagcagaaaaagggtcaaataaaatcaaataaaacttaaatgtttaactgttgaaagaaggtaaaaatgacttttaaaacatgatccaaaagtaagaaaaaccctaaaagccaaagaagttaaaaaacactcaatctgccagcagactaatcttcctttttcagctaaactcaagagctaatctctgctccttccttttggcaacaaaaacctgaaaaagtaaagtcagcccatgttatttaaagagctggactggaataccctaaatttctagggcccaacaaaaatactggctctggcactctgggactgctggaatgagagttgtgagcatgggtcagggcttgcaccaattcatctaactccaccgttctatcctattcacagtagtggtttagggtagaatgggtaaggaaccgaaacgaaaaacttgggaccctagagcacagtaatctgttaaaacaagatttaggtcatgtccttcctctggtcataaccctccaaggcttcccctctcacttaaaggaaaagtcacagtctgtacaaaggcaaataagaccctacatgatccctgcatatctgcaaccctctcctcaccccacttttctccctatatttggcccctggttcatttagctctagctgtactggtctcttagctatttcctggagcacagggcccttacctcagggcttttgcacacttgctaatcctcagcctagaatgttatcacatcctcacccatgtccaaccagtgtcctatatcaccttcttcaggtttttgctcaattgttactttatcaatgatgcttaccgtattcacctttcttaaaagtgcaacagccatcctagcactcactctccttcccttcttgcattttctccacagcacttatctgacacactatatattttgtttattatctacttccactgccatccccattagaatatagcttccttttttttttctttttggagacagggtatcactctgtcacccaagctggagtacagtggcaggatcacagctcactacagcctcaacttcccaggctcaagcaatcctcttaggctcaagcaatccctccacctcagcctcccaagtagttggaactacaggagtgtgccaccaagcatccctaattttttatttttattttttagtagaggagcctccccatttttcccaggatgctggtttctaactactgggctcaaggaaacctaccttggcctcccaaagtgcaggaattacaggtgtgagccactcactgcacctggccagaatatagcttcttaaggcagaaatttttgtctcttttgttcacatttcatctccagcacttacggcaaaccatacatggtaggcactcaaggtataatgagtcctgtcctcaaggagattaccatgaacctatgctccttcccctttctctctacaatcttgtaccctgtaacactcttttgtaactttgtaacacaaagttcagaaaatggcactaaaatatatccatttgcccaaggccaaaacttagaaatcctagactcctcactctcctatacttctttcccccaacattcagccttggagccaagcatgcccaaaacccagtatccatttgtcaagtacagaatttacaaaccaccacttcttcttccctataataaattattaaaagacttgaacactgcacgggaaagctggttaattttgtaaatccttaacacatacatacaggtgtacctcaaagatatcatgagttcagttccagacaaccacaacacagtgaatatcacaaaaaaatgagtgacataaattttttggtttcccagtgcatataaaagttatatttacatgatactgtagtctattaagtatgcactagcagtatgtcaaaaaaatatatatatgcacataccttaatttaaaaatattttattagccgggcacagtggctcatacctattactctcagcactttgggaggccgaggcaggaggatcgcttgaggtcaagagtttgagaccagcctagccaacatggtgaaaccccatctctattaaaaatacaaaaattggctgggcatggtggtgcacacctgtaatcccagctactcgggaggctaaggtgggagaattgcttgaacctgggaggtggagggtgcagtgagccaagatcgtgccactgcactccaggctgggcaacagagcgagactccatctagaaaaaataaataaataaataaatatttttttgctaaaaaatgctaagggtcacctgagccttcagcaagttattatcttcttgctggtggagggtcttgtctcagtgttgatggctgctgcctactcagggtgatggctgctgactactcagggtgataactgctgaagactggaatgactatggcaatttctaaaaataagacaacggtgaattgctgcattgatttattcttcctttcgtgatagatttctctgtagcctgcaatggtgtttgatagcattttacccacagtagaactactttcaaaatgggagtcaatcctctcaaaccttgctgctgctttatcaactaagtttatgtaatattctaaaccctttgttgtcatttcaacaatgttcataagcatcttccccaacagcagattccacctcaagaaactactttatttattcattcctgagaagcaatttctcatctattgattttttttttttttttttgagatgtactcttgctctatcgcccaggctggagtgcagtggcacgatctcggttgccacttggttgcagtggctcactgcaacctccacttcccaggttcaagcaattctcctgcctcagcctcccaagcagctgggactataggtgtacaccacaacaccaaaaaatataaaaaacaaatttttgtattttttctagaggcagagtttcgccatgttggccaggctggtctcaaactcctgacctcagatgatctgcctgcctcagcctcccaaagtgctgaaattacaggtgttagccaccgcccccagccaccttgcactataagttatgctatggagacaggttctttccttaaacctatgaaccaccctctgctagcttcaaacttatcttttgcagctttctcacctgtctcaaacttcatacaattaaagagagttagggctttgctctagattaggctttgacttaagggcatgttgtggttggtctgatcttttatccagaccactaaaactttctccagctcagcaacaaggctgtgttgctttctaatcattcatttgtttactggaatataatttttaatttccttcaaaaacttttcatttgcattcacaaattggctgtttggtacaagaagcctagctttcagcttatctcagttttcgacatgccttcctcactatgcttaatcatttctagcttttgatttaaagtaagagacatgcaaacattcctttcacttgaacattcagaaaccactgtagtgttattaattggcctaatttcagtattattgtgtctcagggaataaggacgccttaggagatggagagagggaacagctggttggcagagcagtcagaacacacacaatgtttatcaattaagtctgcctatgggcatggttccagacacctcaaaacaattacaacagcaacatcaaagatcagtgatctcagatccccataatatttaataataatgagaaagtttgaaatattgcgagaactgccgggcacagtggctcacacctgtaatcccagcagaactgccgggcatggtggctcacacctgtaatcccagcactttgggaggccaaggcaggcagatcacaaggtcaggagttcgagaccagcctgaccaacatggtgaaaccccatctctactaaaaatacaaaaattagccaggtgtggtggcacatgcctgtagtcccagctacttgggaggctgaggcaggagaatcacttgaaaccggaaggcggaggttgcagtgagccgagatcgcaccatggcactccagtctgggcgacagagcagaactccgtctcaaaaaaaaaaaaaaaaaaagaaagaaagaaatattgcgagaattaccaaaatgtgacacagagacatgaagtgagcacatgcttttggaaaaatggtgccaaaagactcgcttaccacagggttgtcactaaccttcaatttgcaaaaaaaaagcaattatctgtgaagcataataaaacgagttgtgcctgtgcttaatttatggaagcactgtgaaagacaaactactctgaatactgaaagtttcttttacaaaaacatttccaagtttaaagaagtttttggttattttcctgacgaaacagctgcatgacttccatagcagccatgagaagacatccctaagttccaagtcaggggagcccactttataatgaggcttttctgagcactgcagtaattatacctcttagataagaacaaatcagttttaccccaaattttactgcaaaaagcaaaaatctaatgtattttcaaagggctggagaggcagttatttctatttatatcctatacttatgtaacacaaacatgtacagacagtcccaactttacataaatgtacactgaagaatttcaatccaataggattcataaattcaggaattaactatttgcactgcctaataattccttcagaaaaaattttaatctgggcaatgagtgcatttttgatttatcagttctgaggaagagacatgactctaatgggttaaatgggttaagtcattacccctcacataaactgggcaatgacactggtggaactgctttcctacactcaagctctattccgagtgactcagcaacccctttttcacaagaggaggttaactgcataagagaaggtgccaccgcgcaacctcagcagcccacatctatcagaaaggagactactaaaagtagcattgacaagtatgccattcctttaatgaatgagtccagctccccatctataaaatggagttaataaatatgagcctccatggagctagtgagaactgattgataatgctttgaatgaaaacactttataaactgcaaaaatccctaaaaatgtcagttaattctaaagtgagggtgatctaccccagtgaattcttccatctttgaattctaggccccaggggctcagcaatatctgcactcttgcccatgaaaggcaaagtcaacacatcatctctgagactgggctagaaagaaatcaaaagcagagtactcctcagtatcaagaaatcaaactggcagaactgaaaacctggagatccaggataagcttattttaaagaagaaccagtggaggctgggtgtggtggctcattcctgtaatcccagcactttgggaggccaaggtgggcagatcacaaggtcaggagttcgagactggcctgaccaacatggtaaaaccccgtctctactaaaaatacaaaaatcagccaggcatggtggcacgcacttgtaatctcagctattcaggaggctgaggcaggagaattgcttgaactcgggaggcagaggctgccgtgagccgagattgcaccactgcgccccagcctgggcaacacagcaagactccgtctcaaaaaaaaaaaaaagtggaaaaatgggatttgataataaaatgactttatagccagcttcgaatgaactctttcttaaaacaatctttatacatcaataatacaaatgcttgccgttaattatgtttaaagacttcttattgactggcactggtaacatacaggcaactaccttacttttggttacaaagaaaagaatggaaagctcagcatggacctactatcactactagaaaagtaaagggcacacccttctcactggtcaggagtcaagaaagtcacccttgtatacttaataatcatgcacttttatttctttgtgccctggctcattctaaaaaaaaaaaaaaatagatttaaaatggtgaatggccattaatagttaaaaaaagttagcttcacttatttcttttatactagaataatcttgttccacaaagcacttaggaagttgtatttgatttcttagcaagttttgctatccttttaccaaaggttttgttatatactttttatgctgatgataaagtgcacagcacaatgctagaacatagcaagcaatccacaaaatgtagttattaaacccactaggctgtaagttccaggagagaatggattgtcttgtttctgtcttgtttagcactctatttccagaacctagctatctggcccatggtaggtattcaataaacactgttgaataaacagttgaataagatctaagagtaattctcaactgtcacctcctatttcatggttaccagtgtcccacctcctctaatcaacagcaagggcctggaagaaccctaccccagaggaaaggcacttaagttcctgtttgtatttccttaaactcaccacaaagattctccccttctgtcccaaaaccccaaaatcaatgctttgcaacaatgtattcttaaacaattttgcttcatttcccctcacagacaatgcataaagttccttaaaactgcaagacctagtctagttccctttaccctttaacggaaaggcatatttgtaaaactctattttgattcatagttggttatcacacaggcttctacttgtttttttactatacttagtataaattaaaataatataggcttaaaataatttgtaaatgttacaaagtataccacactttagagcaataaaattcggaaactgacaaatatttcaatgaatgaattttattcattgaaatattctattcatttattttcattcttgaaaataaaattcaggggctgggtgtggtggctcatccctataatcccagcacttcgggaggccaaggtgggggaactgcttgaggccaggagtttgagaccaacctgggcaacacagtaagaccctatctctacaaaataaataaataaataaaataaaattcggagatttttttggaagtagacttcaggtccagttcaagaagtcacacaaaaaattatgtgttgttactttatagttataactcctatctgacctaaaacagtagtatcaccaacctgattgccttatctttcttatcagacttgagtccaaattccctaaattatttggattcaaatgaactgttattccctaaaatcaaatctgctctcaaaaaaatgaagatggatggccagagacggtggctcacccctgtaatctcagcactttgggaggccaaggcaagtggatcacctgaggtcaggagttagagatcagcctggccaacatggtgaaaccctgtctgtattaaaaatacaaaaatcatccgggcatggtgttgcgcacttgtatcccagctacttgggagcctaaggcaggagaatcgcttgaacccatgaggtggaggttatagtgagcagagatggtgccactgcactccaacttggacaacagaatgagactctgtctcaaaataaaaaagaagaagaatatcacaggctccaaagtggattctaaaagaagttccaaaaaatgttttctgccacacctaaaaaggtactcattgaaagaacaacttcaggctgggcaccgtggctgaggcctataatcccagcactttgggaggccaaggagagcagatcacttgaggtcaggagtctgagaccagcctggccaacatggagaaccccgtctctactaaaaatacaaaaattagctgggtatggtggcgggcacctgtagtcccagctactagggaggctgaggcaggagaatcgcttgaacccaggaggtggaagttgcagtgagccaagatggcaccactgcactcaagcctgggcgacagagtgagacttcgtctcaaagaaaagaaaaacttcaaataactacgctgaatctctgaataagataacacttaattgtaaatctaaattctggtattttcattccaacattagttataatttgtttattgtcaattgtcatacaatttcagtttcagttgtattttctttcaccaatatgctgtaggttacatcttaaatccctttagtagaaagactactaaacaaacaagcaaataaaaaaaactgcctctctggaaagacacaagacacttaacagtgcctgtctttgagagagtagagtggctggagaacaaaaaggaaaggagacttttcactgaatatcttttttttttttttttttgagacggcgtctcgcactttcgcccaggctggagtgcagtggagcgatctcagctcattgcaacctccgcctcccgggttcaaatcatcctcctgcctcagcctcctgagtagctgggagtacaggcgcccgccaccacgggcggctaattttttgtatttttagtagagacggggtttcaccgtgttagccaggatggtctcgatctcctgacgctgtgatccacccgcctcggcctcccaaagtgctgggattacaggcgtgagccactgcacccggcccactgagtacctttgtaaaactttcaaattttatacaatgtcaatgtattttaaaaaatctgttcaataaaataaaagtacttttaagtgtcagatactgctggcttctataccacagaaaagtataccactaaagaactgtggagttaattttaatggtacttcactgtaaatctgaatctcctgttccagtgcagagctagtcaccaatagtagcgaacccttgcaagcaattcaattggagttcacccaaaccctctatagttgagttattctgctgtatcactccattaaaatttaaatagcattgaaaacgaaaacgtgatactacagaaatgtatgtcaattcaagaatgaaaaaatggaagtatattaatgagctataaaatattaaaagagcaatgatccaaatacgtctttgaaaattagcaaatcaactagatatatataatatgtatatactgaatgtatatacctatataatatgtatatactgaatgtatatacctatataatatgtatatactgaatgtaaaatgctgcaaaccaactacacacacacactctctgaatgtaaaatgctgcaaattcctttaaaatgtaaactgccatgctgtaaaaatgggagaaagatgtcaagcacggtgctatctgcaacataacttaagcaacttgaactagaaaatgcaatatgatctgttgctggacacaattgcacaatctcaattacccagaagattctaccaaacaggaaattcatgatgtgactttgggaaacacagaaatcatatttaaagattaacacatccaaaagcctggaatttgttccaaaacaaaaaaacgattttacaggcccgttttcaaatgacgcatacaatacgaattactaaaacacagaaaaagctaacagttaaatctgatacttagtttaagatccgtagctttcaaattatagaaaatctaaaatacagggtataaaaccttggaagttaagagagcagttagtgaaatatttcaggtctggaaattatatgctatcgacttaatttaaaacacactcacggtgtaaattaaagctaaaaagtatctcttcccttccttttctatgtggttccatatccttacgaaaaccatcgtgtacctcaggccataaatgcagataactagataactccctgcaagctctctaagggacttttaaaacacagtattcgcaggaattatctcaaaaaatatttacaatacctcccagcactgttaataactttttgatcttgagggcgccttacagatctgaatctttcttgctccaaatgagaaaattgttttgtcgaacaatacttaaatgagcagtggtatgtgactaatcagtgagcctgccagtttctcaagctgcagtgttcttgcaggcactaccaccgccgcccctccacggaaaggaaatacgctttcaaccgaatcggaaacacaccactcaagctggcacagtgctcaccgagataaagtcggtattttaagctctatggatcgctgttaattcaagtgcgaattcaaaaagaacgcttttcaagatgggatttcgacagagttttgaaaaaaaaaaaaaaaaaaaaaggcccggagagagctcccttcctggtcagttttgttcagatgaccgcagtcttcgggttgggctgtgcccttctgcttctcccggcagttccccgagcttgtctgctcagaggacccagggtccggagccccagcgtgggcgcatcacgggagagggtccttctgctccaggtaggcagggagacccccaaggaagcggcccttcccccggtgcctgttgccgagcagcaaccctccgagaggggaaggcgcagggtgctagccagaaccgagctccagcaccaccacctacctctcgcagcggacctgagtgctgcacacggtggaccgcatacctgcgtgagtgcagggcgaggggtgctggaggtgcagaacgggcagagctcgaaggggcagcaatgccctcccccgaggaaaattcctgccacttgacgcaacgctgagcagtggagcaggcctggccctcgggcgcgaggggccaccctgcccacagcggccccaggcccagcgacactcaccacacagagccataggcgccagagcccactggagacaggttctggtaacgctcgggcacctcccagattgtcttgttcagctcctgccggtagaacgtgggcctctcctgagacattttccagcggcagccgccgggcaagaaggtggccctgtggggcccccgcctgcacccgcaccctctccccggcccttgctgcccgcccagccgggcggggaccttgcgctggtcgcccgcgcaggtgcggctgccgcgaccccgcagactcccgcgcgcgcggctgctgtcagccgcagcggctggatgtgcccctgcgactggggcaagccccgctaagggcagggacgcgctccggcgctcaagactgcgcccgccgcgatctccctgcaccttcgcccctacaaggccgactccgggctgcgtcgcagtactcccgttccagctgctgcgcccgctaaggctccagtggtcgcggttccaagagccagcaaacgggagcctcccgcagtactctcgcgagaacagctcccgggactctccgagagccgagattttacccaatatggaacctctccgcgggcggggcttcgtgagagaagaggatgggaggagcagttctcgcgagaagagaacaataactggagaccaaaggcagaaactcccagggactgtctccttaagggcgcgaaggcggaccggggaaggaagagagaagctggcagcacacgcctcgcgcgcctcaccgtggccggcggggcaaatacctggctctgtggtggaaaacgacactgacaaatagcgtgtcggggaaagagtcaaaagatctttaactgcgagtagttaccagcagcagagcacctgctcacctgaacccccaaattccaaaaaacacttgcataaaaaagagacaagtggccgggcgtggtggctcacgcctgtaatcccagcactttgggaggccgaggcgggcggatcacctgaggtcgggagttcgagaccagcctgaccaacatggagaaaccccgtctctactaaaaatgcaaaattaaccgggcgtagtggcgcgcacctggagtcttagctattcgggaggctgaggcaggagaatcgcttgaacccgggaggcggagttgcggtgagccgagatcgtgccattacactccagcctgggcaacaagagcgaaactccgtctcaaaagaaagaaagaaagaaagagacaggttccggccagaaggctgttgcattcccatctgctcaaggacatatgggttactctttgagatgctgacgaaatatgtcccaaaggcaaatgttaaccctgcatcaaagctgaggctttccaggggctgggctcagtggctcacacctgttatcccagcactttgggaggccgaggcgggtggatcacgaggtcaagcgatagagaccatcctggccaacatggtgaaacctcgtctctactaaaaaaaatacaaaaattagctgggcgtggtggcacgaccctgtagtcccagcttctcgggaggctgaggcaggagaattgcatgaatccaggaggcggaggttgcagtgagctaaaatcgcgccactgcactccagcctggcgtcagagggagactccgtctcaaaaacaaaaacaaaaacaaaaacaaaccgaagctttacattaaaactctcccagttaaacttacatgcagaaaaatcaccctgggagtttaagatgcaagttcccagaactcacagggagtctaattgggtaggtcagaggaggtcttgatcaagagcatgcatttttataatacatcttaggtgattctgattcaggaaagtctctgatatctccctttgagaagcatttaaaaaaccgttacactgaagatttgaaactgactcctatcctgaagagccatcagtgaagaggattttaagcatttaactcaggcctcttcgagtaaggagaatagggcaggagtctcatcgaatttaggcaagtcaactgacctttcctgaacctcagttccagcttctacgagagaattcctgccctgcattcccgactaacagagtcatttgtaaaaaccaaacaagataaatgtgaatgggcaaggcattctaaccccatgcctacatccattatcaacctatgcctatgctaaagcttgttacaatgagcagaagaatcagatcctgtctcattctcttagtttcttgtattagaaataactagatccaagccaggacatttctcaacatttcccgtgattattctattttgtgtcatacacaccttggagggctcagactttgcatatcttgtcccaacatctagcacaatgtctagaacataaaacatgtgtcataaatatttgttgaaaaaattatgaacagtgaccatgatttcaagtggtacagtatcctcagtcctcttcaaggaaagcaatataaaaccaaaaaacagatagtcatgggtgattcatggaaagctgttttggatccaatgtagcttaggctggaattctcttatctacaaaaacatgttgcttgagaatgttccaaactagggaggataggaagctttctaagaagtaatggagggtgaaggggaagtaagagcaaaaacatgattgtgaagacatgagggatggggttggggggatcaagggaatgagggaatggttacaaagggtgaggaggaagcttggaagtaggaatcctcagaaatgcacatttttatcctacaaattgggatgatgaggtgagggtgaatgaaagggtaaagataaagtaagcagtatattcatacactcattcaaccaatgtgtattaaatgcctactaggtgtcaaacacttgcagtttaaaagtgattaaaaactacagttgctgccggtgtggagcttacaatcaatgggagggcaatcattcaacaaaaattaattgaatacttcctatgtccaccacactgctgtaggcactgataataaaacagttaatgaaagggataaaagtccttgccctcataggggtaagatgatttacaaaaaggaatacataaagtgcattataaggtagacattaacacagtcatcaaacaaacaagtgtaaaactgtaactgggccaagcaggaatacaaggtggagtgagagacagtgctagggacagggatagggtgggaggagggtaaagggagtgagtgcagatggcatgtctgcatccagagcagatctgggcaggagggtgtcattcagtggggagagccgggtttgtggggcagacagcctatggttggagacctgggtgaccctcctagcctccatttctttttacctcttctgacctgaggaaggcttaagtcttccggagacgttagtgaattaccgtctgtgcagtacacatgtgacacatgtgcactgctgtatgttcaggacacgaggcctggcaccaaataggccctcgatcaagaatagcaaaacctcggagagagaaggagccttggtatacaggtttaccaaataccaaggggatcccacgactcaggtatgaggagggcgacccaggtaccactttcctggctccctagcccagctgctcatgctcctcttcctcgtcccctcccccactctcatctcctcagcccgcccggaacgcccgcgggctaggccacaacggctcgggaaccgccgccggtatccgcgtccgcagcgccgccagccaggcgagagccgtgtgggatcccagcgcccgcactcccgcccccgccaaggagccaggtgagccgctgctgggagacgcctgggcgccgggggctgcaggtcccagggcgggggctgcgtccgtcaccggcaggtacccaggtatgccgcagagccaggcacgccgtgggcactcagtcagtatctgtggaatgaatgaatgatggtcgtccctgggagcttatctctgaggtattgtctctactttcaaaggccgtgtggatggcaatgacaagagacaacagtgtgtgcgttttgcaagctgcatcctttcaaattctcctgtctatattgtcaaaagccccagaactgacgtgctacctgcaccccaccgcctaccccatccatttcctcctgaggcctgactgcccggccgttcctcttcctttcagaccccactgcttttgttaattttgttccctgtgactgaatccccacccccacctccttgcccctttcttttcatgtcaaatgccgttgatgtgtcaggggccccgtgaagccttctccagcacccccaccccaataatgagcatctctccaacacaccatgttactctatccacattgcatggaaggtggttgtcctatgtttatgtgtccaatggtcatccgcttaaggactgtcatcttactagtcatccctagccactagccagagtgactaaaggatctaaaggccaggctctttgcttataccttttctgtattcccaatacattctccataaaaacctaggtagtaacaggtgtagggttgtttctgatggaattacaaatgcttattttgaaaattcggaagtaaattttgcctttccgtgattatagaaaacataagaaagttaacaatatcagggggaagatattcctgcaactaaactagctttcaagatttcatattatttgggtcaatagctaaaaaattggattgtatttaaactttttattcttgacttttttttttttttttttttttgagacagagtcttgctctgtcgcccaggctggaatgcagtggtttgatctcggttcactgcaacctctgcctcctaggttcaagcgattctcctgcctcaccctcctgagtagccaggactacaggcacgccatcatgctcggctaatttttgtatttttattagagacggggtttcaccatgttggccaggctggtcttgaactcctgacctcagctgatccaaccgccttggccttccaaagtgctgggattacaggcatgagccactgagccatgtctggcctattctttacttttaaagcactctgaacacagataatgtaaataattagataaatggatggatggatggatggatggatggatggatggatggatggataagggtactatggagggtgaaagagctaggccaaaagtgcttgtattttaacagggcccccaaatttagcactgaaaggctcatgaaagataatccactatatttatagtggtagtcatactttaatttttatcagaatcacctggacagcttctttgctttttttctacctagcaagacctactgaatcagaatctctgggggcccagcagtctggacagcttcttaaaacagactgatggcccccagagtttctgattcagtaggtcttgctaagtggggcctactcaacagtaggagtttctggtcattgcatcttcttgggaagtgtcctgctagtacatgaaaatgagccactaggatttctatgaaatcaagaaagacataatggagctggagaaattccaaagaaaattacttaaaaaaaataataaggaaaccatgcgtttacccttgctgctgttagccagacatttgatggagttccttaaagacaactttccacctgctcctcctagccatcctcactgtggtcgtaggagtttatgacttgataacatctcctagactaatattaatggtctccaattggctgttttgcctcagtctctcctatctccactgtccaacaactttttgtgatgatggaaattttttatatctgcatatctgcactgtccagtaaggtaaccactagccatatgtggctgttgagcacttgaaatctagctagtataattgaggatctgaattttttattttaagtttaaatagccacatgtagccagtggctaccatactggacaactcagctctagaacataacactggcacatttcatcttcccaaaatgcatctctgtgcgtattactacttctgctgaaagactttaaataggccaggcgcagtggctcacgcctgtaatcccagcaatttgggaggccgaggcgggaggatcacctgaggtagggaattcaagaccagcctggccaacatggcgaaaccctgtctccaccaaaaatacaaaaattagccagatgtggtggcacatgcctgtaatcccagctactcaggaggcaaggcaggagaatcgcttgaacctgggaggtggaggttgcagtgagctaagatcgcgccactgaactccagcctgggtgacagagctgtactccatctccaaaaaaataaaaaataggccgggcgcggtggctcacgcgtgtaatcccagcactttgggaggccgagggaggcagatcacgaggtcaggagatcaagaccatcctggctaacaccgtgaaaccctgtgagctgagatcacgccactgcactccagcctgggcgacagagcgagactctatatcaaaaaataaaataaaataatatacatatatatttatatgtatacgtaaacatatgtaaagtaattgacaacatttaaaagccagaagattccacataaaaatctggcattatggcttctcctggaaaagatcagatctaagccattccgggccccacattgaccgatggcaaaaatggctagagctaagcagcttctgctgcctttgccagccccactgttcccaccactccttgacggtcatattttgcctattttacaccaatcctcctttaatgtcactttcagaacaaaatgctgggttctagactctcgatgtgacccaggatatcagttttgtcattagcagactaattaggcttgtttaggttgctgggaacaaagagactactcatggaagtacattggacaattatacggggaaagtaaggaagattgggtctgtattcctatgggtggggaaagaaaggtggggggggattccttacatttcaatatacagttctacctttttttctttttgtaagagacatgaggcactaattatcttaagtaatatattgtaaaatacctctcccatcctcttctgtattccccagtcacctcactggtttagagaatttgtgatctttagttcatggttgttatacagcatattacttctacccaatgctttgagggtaaaaatacaatatataattatggcccaattacttacattttctaaaatcttggttttacacctgtaaaatgaaagaaatagtagtactggtattgttgtggaaatttaatgacataactcgtgaagaaatctagtgcaatgcatggcataggataaatgcccaataaatgttggcaatgatgatgatgatgattcttctgaaggaaaacaaagttgctgacacattaaacttatctgcagcatcacccatcatctatataattgtgtaatctatataatttgagggtttaccaatatattttataggtatgtggtttatacatatgcttttttacatttatgtggaagaattttagagtttatgctttttttattgttcaaaaacatagattattaagactggttatactttctcccagagatggatccctatccatcctcatttactctatcttttcaatcttttaaaaaagcaggataatatagatttttttttcttttagagacagggtctcgctctgacacccaggctggagtacagtggtgcgatcccagctcactgcaacctccacctgctgggctcaggtgatcctcccacctcagcctcctgagcagctaggactacatgccatgccatcatgcccagctaattttgtttctatttttagtagagacagggtttcaccatgttgcctagtctagtcttgaacttctatagctttttctgctacaccatgaggccactaactgtatacttggcagtcattcaagaaacacttgttaagggcctgctaagttgctaagtgaaagccattcttttgggtcctggggctgcaactgtgaatagtcacagtcctgcttcctggtcttacattttatgggggaaacagacaatggacaaacagacaaataatgaatcaggtgctggcaagtgccgtgaagaaaagtaaaaggtaaagggataatgatgtctgctattttagaggagttacaagacttgtattgagcacttaacccttcatctggacttcttcatatatgctggatagtgagcattttcagtgaaaattgttgattaatactgtccacctcttgatcattttcctacaacataacacaactgaatataaagaaaactaggcctcccagcaggacacctgggttctagtcctggctctaataagtatcaaacagcaaagactgtttaaacttctgggttttgttgtctccatttgaaaaatgaaaagaatacacataaaattatacaactttgagaaagagttttttacaactgaaagatgctatgcaagtgtaaaacattattatataggaattttatttccttaaaaatatgccgaggatctggattactgaaaatgctcttttatttgctctctttccactcatccaggaatggcacaactagagaggagcgccatctctggcttcagctctaagtccaggcgaaactcattcgcatatgatgttaagcgtgaagtatacaatgaggagacctttcaacaggaacacaaaaggaaggcctcctcttctgggaacatgaacatcaacatcaccaccttcagacaccacgtccagtgccggtgcgtgtgtccaatctttcacctgctgccgagccgggcaggactgaaacctaacctgactcctttggggtccgtttctctttcttgtctgagttcctgtaatcagaatcatgcagtttattgtgcaatttttcttcagtcatttttgtggtttgtcttgcagtaccttttcgattgtaaacttcctgggcataaagatcttggatgtccctatggtacctaaggaggatatttcataattccattgttcaatcaaccatgactaccagactcccgaccaaaaataagatagccagcaagacgcaatggctcacgcccgtaatcccagcacttcaggaggccaaggcaggcagatcacttgagtccaggaatttgagaccaacctgggcaacatggtgaaaccccgtctctactaaaaatacaaaaattagctgggcgtggtggcacgtgctgtaattccagctgctcaagaggctgaggcatgagaattgcttgaacctgggaggcggaggttgtagtgggtcgagattgtgccactacactctagcctgggcaacagagcaagtctctgtctcaaaaaaaataaataaataagatagccatggtggactgattaatggtaggggaatgagattcttctagtctcatatccaacagtgcccacatggtggtactcatggtcactaaggtagaatctaccaccaccacctctgatacccgctgtgactagctaggtcctacagttcaggggctcttaccctgtttttgtgctttgaaccttctagcagtctgataaagttaatcaacatctttcagaataattttttaaatgttttttattgtggtgaaatatgtataacataaaattggctattttgaccatttttaaatatacaattcagtggcatgattgacattcgcaatgttgtgaaaccatcaccgctatttccaaaactttttcatcacctcaaacagaaattctgttaagcaataattccctatttccccacccctcagcccaagtaacctctcttctgctttctgtctctatgaatttgcctattctagctatttcacttaagtagaatcatacaatatgtttgtctttttgtgtctgacttctttcacttagcataatgttttcaagattcatccatattgtagcatgtattagaacttcatttcattttatggctgaataatattccattgtatttatataccacatttttgtttatccattcgttaacagacatttgagttgtttctaccgccattaggctactgtaaataatgctgccatgaacattggcacaggagatctgtttgaagtcctataactaggactagaattgttgaatcacatcataaatctgtggtaaatttaactttttaaggaactgccaaactgttttccacagtagctgcaccactttacattttcactggcaatgtacaatttttccatgtgctctccaacatttgttattttccatttttttaaattatagccaacctattaggtatgaaatgatatctcatcgtggttttttgtttttgcttttgttctgcattttcctgatgactaaaggtgatgagtatcttttggtgtgtttattggttaattgtatatcttctttggagaaatgtctattcatttcctttgtcctttgtaaaattaggttgtttgtctttttgttgttgagttataggagttcttcatgtattctggatattaaatttctatcagatagatgtttgtaaatcttatataattttgtaaatattttctcccattctgcaggttgtcttttcactctgttgatacagtgtcctttgatgtagaaaagttttttggtgttttgttttgttttgttttgttttgttgagacggaatttcactcttgttgcccaggctggagtgcgatggcatgatctctgctcactgcagcccctgcctcccaggttcgagcaattctcctgcctcagcctcctgagtagtggggactacaggcaggtgccaccacgcccagctaatttttgtatttttaatagaggtggggtttcaccatgttggccaggctggttttgaactcctgacctcaggtgatccacctgcctcggcctcccaaagtgctgggattacagacgtgagccaccgcacctgatgtagaagagtttttaattttgatgaaatccaatttatctgtattttcttttgttgcctggacttttggtgccatatttaagaaacttgtcaaattcaagatcatacaagatcatgcatcttttcttttcttttcttttctccttccttccttccattcttctttccttctttctttctttttgaggcaaagtctcactgtcacccaggctaccatgcagtggcacaatctccgctcactgcaacctccacctcccaagttcaagcgattctcctgcctcatctcccgagtatctgggattacaggtgtgcgccaccacacccagctaatttttgcatttttagtagagacggggtttcatcaaattggtcaggctggtctcaaattcctgacctcaagtgatccgcttgctttggcctcacaaagtgctgggattacaggcatgagccaccgctctgggccaagatcatgcatattttcatctatgtttccttctatgaattttatagttttagcttttaaatttaggtctttgatcctttttgaattaatgtttgtatatagtgtaaggtaaaggtccagctttattcttttacatgtagatattctgttttcccaggacaattagttgaagagattgtcttcacctagtaaacggtcttggttgaataattttttaatgcataaaataagcaggattataaggaaaaccagttacattgaaatacagttatctaaatatcaaaaataccaaaattgtgttatttaataacatgggtctaataactaccataatttcaaagtagtgatgaatgtaactaatatttcaagatctctttagcaattgtaatgtaatatagaaatgtttgtcatttctactggtgacaaagtcaagttctgctgatactactgtgttttgttgccaacattcataattgaaggaaatgctaaagaggttagtgaaataaagatataagttcacctatataatttcacatatgtccccaaatactatctacagactccttgggggtccacaaacctcaggttaagaaccctggccgggtgcagtggctcacacctgtaatcccagcactttgggaggctgaggtgggcggatcactgaggtcaggagtttgagaccatcctggccaacgtggtgaaaccccttctccactaaaaatacaaaaattagctgggcttggtggcgcacagctgtagtcccagctacccgagaggctgaggcaggagaatcgcttgaatccgggaggcagaggttgcagtgagccgagatcacgccactgcactccagcctggtgacagaatgagactctgtctcaaaaagaaaaaaaaaaaacaaagaatcctttgtgacctacatcattatagtaatcttaattactcaagttgtcctcagtcacactctgaatttattagtccttcttgtcccctggtttatcacccacaattggcacatgttggtatgttggcatgttggtgacaagtgtggaaagtcctacacagccctgctccagactgtcctctccttgagacattctcctttgtccgcattctgccttttgcaagttgtgttcttggatatcccccccagtcctctcacttcctctgctccatgatggatcgggggacatgtgccaaagagggtatttgggggcaacattggctttgtctctataaaatgatagtctttttccctaactttaccctcattataaataagtattcccagtgaaatttcaacctaactcctttctaccttccttacttagccttgccatccggacacttaaatctgacccattctgcctcccataagctttctagcaactgttactccctacttctaaaacatacaattctctccacttctaaattttaaccagaaaggtagcacagcacaatgcttgagagcacaattctggctgggcacagtggctcatgcctgtaatcccagcactctgggaggccgaggcaggcagatcacgaggtcaggagtttaagaccagcctggccaacatggtgaaaccccgtctctactaaaaatacaaaaattagctggacatggtggcacgtgcctgtcattccagctactcggtaggctgaggcaggagaattgcttgaaccaggaccggaatgcaaaggttgcagtgagctgggattgcgccactgcactccagcctgggctacagagtgagactccctctcaaaaaaaaaaaaaaaaaaagcacaattttgaaactgggctgcctgattttgaatactagtcctgctgcttttcagccttgtgaccttaggtaagctattcaactctgctgtgcctcagtttccttatctgtaagatcaacatgataatagcacctgcctcgtaaagtgattgtgaggatttaaagagtatttgtaaagcaactaggaaatagcactagataagtgaggttttttttctcttttttctttttttttattttgagccagagtctcgctctgtcatccatgctggagtgcagtggcgctgtctcagctcactgcaacctcagcctcccgggttcaagcgattcttctgcctcagcctcccgagtagctgggactacagacctcgtttatttttgtatttttagtagagacggggtttcgccatattggccaggccaatctcgaactcctgaccttgtgatccgcccgccttggcctcccaaagtgctgggattacaggcatgagccaccgcacctggccataagtgagtttttttaatgtaaatgaaataatcttttaaccccatctcttcctttctgcagaaaacctcttaatagctttcctcattttcttcctctttagcaactgcaaatcccccctcttatcaaaatctcccttgtgctttcattttgattcttccatttctcacttttaagatgtcttaactgaaatccagattcatgtctaaatgctaatattattcccccgtcagcttcaacttccattcctctaattccctccttagtttctgtcactcttaaagcctcatcactccgtgtccattgtatttttcaccatggggaagagctttgatgactttgccttgggtggctggctggtctttccctaagtgacacacagagaggaaggcagactgaaccaggtgaaggaacaaactgttccagtgccatgctctactcttctccacagaggctcataattagaaagagcatattttgtacacctgccacacacccagggactctcctaagaacagcaatgtgatgttccttccaaaccaatggtcttactcatggctgccgagcagcatttcacagctgccaataggaaatttggaggcaggagagtggctagaacactgagctagaaatcaaggaccttgtttctagccccatctctactcacacttattcctgtgaccttggtaaagtcatatttatttggcattaattaccttagcaatagtaatgccatagttgtaacagtaaaacataagtaaaattactttttgtctgagcatgcacttcagccctgactacgttaaagttatatttgttgttgtagtcaaatcccaattatctagctcagtttacacatgaaaaatcttcatactttttactttcaacccctgctaaaatctaaataatgaaaaacaatttaaaaccaaattggttttcttggttgattaatgatgattctgttgttttagatgatctaaaagttaaagcaggttttctcaatctcagcatcattgacattttggaccagaaaattctttcttgtggagaattggcctgtgtattctgtgatgtttagcctctacccacttgccaattgcaagaatcaaaaatgtctccgggccaggcacggtggcttatgcctgtaatcctagcactttgggaggccgaggcgagcagatcacctgaccagcctggccaacatggtgaaactccatctctactaagaatacaaaaattagccaggcatggtggcgcatgcctgtaatcccagctactcaggaggctgaggcaggagaattgcttgaacccgggaggcagaggctgcagtgagccaagattgtgccactgcactccagcctgggcgaaagagcaagactccatctaaaaaaaaaaaaaaaagtctctggacattgccacatgtacacaggggaacaaaactgcacctagttgagatctactgggctaaaggataataaagtcttattttataaagttgtttccttacataactaagtccttaagcacaggacttcatattctctattttctactaatttctacatgtcacaggtcaaggccagacagagtaaatgtttggtaaaaattttagttccatgctctcctctcctccacagagggtcataattagaaagaacacactttatgcacctgcctcgcacttggggactctcctaattgggaataacatgaatgtgttaactgcccttccacctatcaatgtcacacctcaaaacactgtccttgtcaaaagaaaacaacagcagtccatttttctactggaaaattggtaggtttaattcttcccaaatatcctgtgaaaacacagaactgattacatgctggacgtatatggcttagttcttgacatatacatagcacttggttctgaagctaaggtgatttagtcccccagggaacatgtggcgatgtctggagacattgttattgttagctgtcacagctgaagcggggagttctactgatatcaaatgtgggaatgtgtagagacgagggatgctgctaaacatcctgcaatgcacaggacagcccaacaacaaagaattatctggtccaatatgtcaaactctcattagtgctgacaagactctactttttcttggctatgtgggccaaatgccttttcttggctatgcgggcattttctttggagaaactaaccaagtctctgctcctctctctcacagctgctcatggcacaggttcctacgatgcgtgcttacaatctttcccttcctagaatggatgtgtatgtatcgattaaaggattggcttctgggagacttacttgctggtataagtgttggccttgtgcaagttccccaaggtaaggaagatatgaagcctgttcatccaaagacaatgtatcagaccttgtccacgtgcccagggtaaacaattacttgtgctacatgaatagaaaaaaaatattgaattttattcacagcattaccatttgttcccttatctgccagatttctaacctctccagggtggttccaaaagacttggtttactttagacccctgaatgctttccagagtatttgtaacacccactctttgttattttttcccttcactagttatttcatgcttatggctataatacatctcacttggcattggttttacctagaaaggggaaggataggtgggcatagtggctcatgcctgtaatcccagcactttgggaggccaaggcagacagattgcttgagctcaggagttccagaccagcctggctaacacagtgaaactctgtctctacaaaaaaatacaaaaattagcggggcctggtaacgtgtgcctgtagtcttagttactctggaggccaaggtgggaggatcacctgagcccaggaggtcgagactgtagtgagcagtgatcacaccactgcactccagcctgggcaacaaagcaagaccctgtctcagaaaagaaaaaaaaggtgaaggataggaaacatagcatgccagcatctctccagcaagtgacaagcaatccagtgctcactctttggtcttccaagtagcagttcagatgtaagacaacaagatcacacagataggtgtgggagcttatctgggctttaaaaactcatttcccaaataggaatcaacaactttgtaacagtgccataaatattgcttccagagtcccacaatgggcaagtccagttgtaagagtcactatgctcagagaatcccaaaggtagggcttccaactggatatttatctttcattcacagtcctcttggtccagatggaatatactatttgggttcatttttaccataagcaattctgcccggtaacacagctgacgttctaccattataaggtttccagggaaacagagctagaaagttaaccccagatcaaattcatcctcaaaaaatagaatgggttttataaatcctttactcacagtagtttatagttccccagatagtctttaaatacctccatttctctatttttctgaggctcaacaggcagggttgaagcttgtgatcgggcaggttgtggatagcacaaaagaggtcaagaacatgaacaagctgtggctgaaatccaactctagcacagcactgttaattggggaaaacagataactttttaaatctttatttacttatttgtttctaaattatcaaatagtaaaattggcgctttttttccccttttggtgtatactcagattgattttaacccacttggctgggactggtggctcatgcctgtaatcccagcactttgggaggcctgggcaggcagattgattgagatcaggagtttgagaccagcctgggcaacatagtgaaaccccatctctactaaaaatacaaaaattagctgggcatggtggcacacacctgtaatcccagctacttgggaggctgaggcaggagaattgcttgaacccaggaggtggaggttgcagtgagccaagatcgcaccactgcactccagcctgggtgacagagcgagactccatctcaaaaaaaaaaaaaaaaaaaagaatacatatatagatttgtgtaaccaccaccacaattgatgcagagtagttccatcacctccagaactctctcatgccatgctttttaagccacataccccccaatctataacccctagcaaccattgatctgttctccagcaccataattctgtctttttgagcacatcatataaatggaatcatacagtatgtaaatttcaaaggctggcttctttcattatgcattgtgcctttgagattcacgcaaattgttgtgtgtatcaatagttcatttttattgcttagtaatattctactatatggatacatcgcagcttgtttatccattcacttgttgatagacattttgtttccagttttggtctctcacaaatgaagttgctatgaacattcacgtacaggttttgagtgaacatagttttcattttactaagctggagctggatcactggtcacatggtacgtgtatgtttaactttataagaaaccaccaaactgttttccagagtggtttttctaccattttacatccccagctgcaagcataagaatttcatttcctccacatcctcatcagcacttgatattgtcaatatttttaaaatcaaactttctattttgagataattatagattcacatgcgtttgtaagaaacaacagatagaacccatgtaccctttacccagtttccccaatggtaatatcttgcaaagctatggttcagtctcacaaccaggatatcagcattgtttcagtcaagatagagaacactttcaccaccacaaagattcctcaagttgtctttctatagccaccactacctgcctcctgtccctaactcctcttaatccctagcaatcattaatatgttcttcacttctataattttaacatttcaagaaagtcatctaaagggaatcatacagcatataaccctttggtattggtttttttccctcataattctttggtgattcatccagattgttgtatatatgaattgtttataactttttatttttgagtaatagtccatggtatagatgtatcacagttcatttaaacatttacccattgaaggatatctggattgcttccaggctttattattacacatatagacgatatgaacattcatgtgcaggtttgttgttgttgttgttgttgttgttgttgtttttgagaggcagtctcactctgtcacccaggctggagtacagtggcacgatctcggctcactacaacctctgccacccgggttcaagcaattctcctgcctcagcctcctgagtagctgggattacaggcgcacgccaccacacccagctaacttttgtcttttagtagagacagggtttcaccatgttggccaggctggtcataaactcctgaccttaagtgaccacccaccttggcctcccaaagtactgggattacaggcaagagccacagcgcctggcctcatgtgcaggtttttaaaataaatgttaagtcttcatttatctgggataaatgcttaggagtgtagtacattgctggagtatataggagttgcctgttgccttttttcaccaacctgttttccagagtggcttaacatattaccttcccactagcaatctatcagtgatccagttgctctgtatcctcaccaacatttgctgttgtcactattttttattttagctattctgatagtcatgtagtgatatctcattatggttttagtttgcattgtcttaatggctagtgatatttaacaccttttcatatgctaatttccatctgttattttcataaaatggctcttctcgtcttttgcccatgttctagttaaattatgtttttactgttgagatctgagaattctttgtagattctggatactagttattttgtcttttgtgttttgcaaatattttctcccagtctggagcctgccttttcatactcttaacagtcttccagagcaaaagttttgattttgataggctcgtttttagtatcttttattttagccattctaagaagtacgtagtggtatctcatcattgttttaatttgcatttccctaatggttaatgaggttgaacatcttttcatgtgcctaacttgctatcctcatatcttctttgaagggtctgttcaagtacttagcctatttttccactgaggttttatttttttcttgttgttaatttttgagcttttgttttgttttgttttgttttgtttttagagacaggatcttgctctgtcacccaggcaggagtgcagtggtgtgaacatagctcactgcagtctagaactcctggcctcaagcatcctcttgccttggcctcctaaagtgctgagattacaggcatgagccaccatgcccggcctcaacaccatttttttttttttttttttgagacggagtctcgctctgttgcccaggctggagtgcaatggctcaatctcggctcactgcaagctccgcctcccgagttcatgccattctcctgccttagcctcccgagtagctgggactacaggcgcctgccactatgcctggctaattttttgtatttttagtagacacgtggtttcaccgcgttagccaggacggtctcgatttcctgacctcgtgatctgcccgccttggcctcccaaagtgctgggattacaagcgtgagccaccgcgcccagcctcaacaccatttttaaagaatatcctccagtgaattgtttttgcacctttgtcagagatcaaataggcatcttttgtgtgagtctcctaaattttcttcattctgttccattgatctatgtgtctatccctttaccaataccatatcttgacagtgagttttaaggttgagtgatatgcttcctccagctaattttttttccaaaattgttttagctattcttccgtattcattttataatcagcttatctaaatttaccaaaaaaggtttttgtttagattttgataggtattccattaaatctatagattatttcaggaagaattggcatctttattatgctgtcttccaatccatgattatggtgtctctccatttatttaggtcccttgatttccttcatcagccttttgtagttttcagcatagagatcctacgtgttttgttagatttgtgccaaagtatttcattttaggggtttaaatgatggttcagtctccaattattcattgtttgcatataaaaatacaattgatatttgtgtgtttttcttgtatcctgaaactcctttattagttctaagaattttttgtagattccctggaattaactacattgacaatcatgtcatctgttaatagggacagttatgtttatctttttaatatgaatggccttaatgactttttattgcttgttatactagctaagacttccaatactatgttgaataagggtggtgagaatagacattcttgccttcttcctgaacatagggggaaagcattcagtcttttaccactaagtatgatgttagctgtaggatttttgttgatgtcctttattaggttagggaagttttcatctactccagtttgctgagaaatttatcatgaatcaatgttgtattttgtgaaattttttttgcatctattgataaggcccatgtggtttttctctttagatgattaatatggcaggttacattaattgatttttttgaatattgaaccagccttgcattctcagaatgagagtattcacactaagttaccatatgtgctagttgcattcctgcaaaaagaaattttcatgtggcagctacaaccaaaatggcccatttgtattaacatagtcactttatttctatgaataaaatttctagcatattcctatggtgctgcaatgagacagctaaactcttggaattgatgctttaactatgagccccctgccagtttctacttatatttaaataaagaccaaagttggaggatatcccattgctaaattaaaaagtcatcagtataatcttgtatcaaaataagaatggcattagagtaatatctagcattcaccacaacacctagcacatagtaggtactcaaaagatgtttgttgaataaaaatgattgcataactggttatggtagctcacacctgtaatcccaacactttgggaggctgagggaggtgaatcacttgaggtcaggaggtcgagaccagcctagccaatatggcaaaaccctgtctctactaaaaatacaaaaattagccaggtgtagtggtatgtgcctgtaatcccagctactcgggaggctaaggcaggagaattgcttaaacctggaaggcagaggctgcagtaaactgagatcacaccactgcattccagcctgggtaacagagcgagactccattggaaaaaaaaaagatttcatagctatatgaatgaatgaatccaaccagctcttaatacttgattaagggattgaacattagtttaattgatgtgaataataagataatttgtagtgtgaataattcaaaaattgtacttacatttgaatacctgatgacaataattttattcaaatgaaacaaaaatactatatgatgaagaccttattaaaaaggtgctggatcttccttacagtagaattccaatttataaatgtagaattaaagaagaaaatacaaaatcaccttcatgaaaacactacagtaataattgtacataaaatctacccagtggatgctaaaaccagtgggtgaaaatttgcaaactaagaaacaggatttgcatattttcaaagtatctccctcgagatatttattaactaccccaccactttacaatagaaaacctaggagaaaatagcttaactaagtgattaatgtgagcatcaccagtagtaaaatatatggatatcatgaatcctgtgatatgatacaatgagaaagatacaacatcatttctgtagtattcttgccaaaagtgtataaccttagtacaatcataaggaaatataagacaaaccgaaattgaggagtgtttgacaaaataactgatctattaatactcttaatttgtcaaagtcatgaaagacaggtaaaaattaaggaactgttatagattgcaggaataaggggaaataacaactaaatgaaatgtgagactctggatagaatcctagaacaaaatgaaagacattagtaaaaaaactgatgagattcaaataaagtttttaatttctaatgttaatttcctagctctgatcaatatactatgactatataaaatattaacattaggagaagctgtggaagggatatatggaaactgcattatttttgtaacttttctgtaattctaaaattagtttaaaatttttgaaaattttaaggtgttggaaagtttggaaattttaattccctctatttcactatggcctaaacttaaatgagactagataacttaattctcagattgttaacccagtaattctcttaccttcccagcattggttagttatttaaaactaacaaaagattttttcttcatgctacacgctgcttttcaagagtaaatgggggccaggtgtggtgactcatgcctgtaatcccagcactttgggaggccaaggcaggcagatcgcttgagctcaggagttcaagaccagactgggcaacatggtgaaacccttgtctctactaaaaaaaaaaaaaaaaaaaaaaaatttaactaggtgtggtggtgcaagcgcctgtagtcccagctactttgggaggctgaggtggaaggatcacttgagcctgggaggttgaggctgcagtgagccaagatcgcactccagcctgggtgacagagcaagacagtcacacacaaaaaaaagaaaaaaagtaaataggggctattcaacattacaacattataatggagtgcatacacagtatattaaagcaagaaaaagaagtacaaagtataagaattataaatgaataaagcttcattattcacagatgatttttatgcaaagaattcaaaagaatataaagaaaattgatatgacttttttaaaagcaaaaaaaattttaaaaaggcataaaaaaagaaaaacaaagaaaatagtaagattttatgaatgttgctggatactaaatcagcatataacaatcagttatgcttaggtgcaatggctcatgcctataatcctagcactttgggaggttgtggcgggtggactgcttgagcccaggagctcaagaccagcctggcaacacagtgacaccctgtctctatgaaaactacaaaaaatctagatgggcatggtggtgcatacctgtagtccagctacttgagagactgaagtgggacgattccctgagcctgggaggttgaagctgtagcgagctgtgattacaccactgcactctagcctgggcaacagagcgagactctgtctcaaaaaaaaaaaaaaaaaaagcagaaataaaattgtgttcagtataactcttaatataaagttcaaaatgggagcaaattaaactgtattgtgtagggatacgtacactactggtaaagaaaagcaaagaaataggccgggcatggtggctcacgcctgtaaccccagcactttgggaggccgaggcaggcagatcatgaggtcaggagatcgagaccatcctggctaacatggtgaaaccccatctctactaaaaatacaaaaaattagctgggcgtggtggcaggcacctgtaatcccagctactcaggaggctgaggcaggagaatggcgtgaacccgggaggcggagcttgcagtgagccaagattgtgccactgcactccagcctgggcaacagagtgagactctgtctcaaaaaaaaaaaagaaaaaaagaaaagaaaagaaattattatcataaacgccaaaataaggaatccttctgtggggagaggtggtgttgtaatcaaagacctgggtggtacttacgtaagtgtttgttttataaatattaagtaaccttgacatctattaatctattttaatgcattttctacatgcatgttatatttcacaataaaaatggagattactaaattaattaccaaaactattactaaagtaattagagcaattaacacagtacaatattgcagagatagacaattaggccaatgaaacagaaaaaagagtcacacgtatatgaatcacatgatgtgtatcagatatgtcactacagagacaggctgttaatgacaaatgatgtaaaacacttgggtctctataaagaaaaacatttcaggcctttacctcacaccatacacaaaaatctattcctggttgattaaagacctaaatgtaaaagttaaagcaaaaaagacattttggaataacataagagaatatctttatgatcctgaggtagaaaaaggtttcttaagtaagacaccaaaagcaaaaggaaaagcccaaaggaaaagaccgataaatctgaggtaagtacaatttaagaacttctatctattcaaagctgctataaagtttgaaaagcggccagtcacactgatttatgcctgtaatcccagcactttggaaggctgaggtgggtgaatcatttgaggtcaggagtttgagaccagcctggccaacatggtgaaaccccgtctctactaaaaatacaaaaattagccgggcatggtggcgtgcgcctatagtcccagctactcaggaggctgaggtgggagaatcgctcaaacaaggaggtggaggttgcagcaagccaagatcatcactgcactccagcctgggagacagagagagatgccatctcaaaaaaaaaaaaagattgaaaagcaaatcacaaaatgggagatacttgcaaaacaatacgcaacaaaggctttatttataatatacatactcctataaatccataaaaataactagacaagggtgctcaacattattagtaataaaatggaaaatgaaattgaaatgagttaccaccatacacactaaaattaaaaatctagcagtatcgagtgctagcatagatgtggataatgggaactgtcatacattactggtgggagtataaattgcacaaccatttggaaaacagtttggcactatttagtaaatgccccagaagttgaaattcaagctatatattctcaagaaacttgtaaatccatgtaccaggagacatgtacaagaatattcatagcaatattgttcataatagccccaaactggaaacaaagacaggataccatgaaccctggaaacaaagagaatgggaaggtagcaaccttggattctgatggctttttagttcggttccagtctctgatgaggtctaactgccctttgtacccttttaataaatttcctattttgcttaagctaatttgagtagattttctgttacttgcaatcaatagagccttgcataggggaaaaaatgtggtgaaaaaatcctatagattacaagagacttaagagacatatcaaccaatgtgaggaccatatttgggttctgatttagacacacagattgtgaagcaaagcacaacatgtaacagcaaataattttttaaagatcaccccaaaactcatcatacctctggttcgaggtctctcgtgagattgcagttatctcaagggtctactgaggctggaggatctgcttccaggctcactcatgcagctgttggcaggcctgagttcctccccattctggcttctccatattcacaacatggcagctggcaggaccaactatatgtgttgggcccaatacaaaataaaaacacagggcccttagttcaaaaattattcagaatttcaagacagtgacagcaaagcattaaacgaagtgcaaagtccttctaagcccaggactctgtcttgactgcatagattacaaacctttgaagccacctctggcaggtaatgacctgaatgagagagcaaccaagatggaaaccaaagtctttttgcaacctaatctcagaagtgacatcctgtcatttttgttatagtctactccttagaaacaaattggttaagtctattccacacttaatggggaggaaattgtacaagggcaagaagacaattggcctggctgggcgcggtggctcacgcctgtaatcccagcactttgggaggccgaggcgggtggatcacgaggtcaggagatcgagaccatcctggctaacacggtgaaaccccatctctactaaaaatataaaaaattagccgggcatggtggtgggcgcctgtagttccagctactcgggaggctgaggcaggagaatggcatgaacccagaaggtggagctcgcggggagccgagatcgcgccactgcactccagcctgggcaacagagcaagactccgtctcaaaaaaaaaagaaaaagaataccaactggccattgtggatcatattagagaccctctaccacaacaatcatttgtaagataatcagggaaatttgaacactgagtggataatgatgatattgtacttaaattagaagagtattatcatttagagacacataccaaaatatctacagattaaataatcgaatgccttggatttgcctcaaagtaatatagggtgagagaggagtagaagcatagattggttatgggttaaccattgttgaagtggatgatgggtatatggaattcattatactctatttttggatgtgtttgaaatgtcttataaaaaggagccttgcttatctaagacaataaaccacctcactaaattcataactgaatttagatgagtatatcagtatgatgtaaattgaggacagactcttagggaaggaaataggggcttgaaacatcaaaaggatgacactatgcctgttagtccatttgcttcaaaatttccaaattctcatggtgcttcttagaaaagaaagtaagtattagagaagcagctgaaggaagaggctggagtgattggcctatggaagagaaccaacacataccaacttcaagtcagtgaagtgtgattcttgccttgctctccagttttatcttcagccctggagaattcccacggcctgcttgtgctagactaggcataaggatggggctgcttttgagctgttggaattaggggtcttattgctatggtatttgctttacatgtttagtattaagaccttgcagtgaatgatgtttcagcctatgatattgaattaaagtgtaaaagcatgtggcaaaataggaagagaagctaggaatcaaagaagataataaaaagtgctaatgaaggattgtatgtccagaaatactattaccacactcagtcagctatacacatggatgatttttattttaaatattctttacagtttttatttaaggtgacttttaaagacaagctgctttttcttaaattatcttgtttttcaggcctgacacttagtttgctggcaaggcaactgattcctcctctcaacatcgcttatgcagctttctgttcttcggtaatctatgtaatttttggatcgtgtcatcaaatgtccattggtgagttcagcactgaaatacacatgcggtggatgaagtttccatcttgatcatatacttattgctaaggtacccaacataaagctttaagatagaaagaaaggaggcaggaggtggacattctatccatacagttagtgttcagattgtagaaataaatacttctagtgtatcattattgtcaacaccagaaaacaggccagcaagatgtttcccaaagaaattaaagggcagaggtactttccttaagaaatcatcacacattggaatctgacttccctcaacccagaagatgcaggaatgattgtgtcaatactcctagagcagatacttctttcatctgaaccataataaccaaactccatgggctgacttgtaatacagcatgccagcttattaatttacagtgagaaaatgttatcacagtaatcaaaacactgacatccataggataagtacttcccttccctgagtcaaaagtccatctactaatttataattagaaataactattacagaggccagactaattaaaggtcatatgatcagcacatttacttcacctaggtgagcctgcatagaaatcaaatcacaaaattcccccataagtttagaaggtcattgccaacatttactcagtgatgtgccttttcctggatttctccactgaactgaccaatccaccaacatttaccattctgaatgacacattctttatatatgtttttatgttcagtctgattaacatcccatccttccagacgtgaagtgctacttttccttttttaagaatagcttggccaggtacggtggctcatgcctgtaatcgcagcactttgggaggccgaggcaagtggatcatgaggtcaggagtttgagaccagcctggctaacatagtgaaaccccacctctactaaaaatacaaaaaattagttaggcgtggtggcgggtgtctgtaatcccagctacttgggaggctgaggcaggagaattgcctgaacccgggaggtggaggttgcagtgagccaagatcacaccattgcactccagcctgggcaacaagagcgaaactccgtctcaaaataaataaataaataataaaaataaagaatagctcatgtctttattcaatctgctatgtgttgattttacatttgaacaccaataaaacaattttattcctatatttccaagtttctgaggaacctcacaatcatttccaaatacttataataagggttgttagagatttatttatgttaggtaaatttaaagttaagatatatctttgctctcttatgtgttatgacaatatgaggactaaacaaaacaatgtttgaaataagtttaatttacctcagtgtcagtattatttttcttcctattgttattgattgcttcattatcttttcttttcttttctttttttttttttgagatggagtttcgctcttgttgcccaggctggagtgcaatcgtgccatctcgactcactgcaacctctgcctcctggcttcaagtgattctcctgtctcagcctcctgagtaggtgggattacaggcatgcaccaccatgcccagctaattttgtatttttggtagagacggggtttctccatgttggtcaggctcgtctcaaactcctgatctcaggtgatccacctgcctcagcctcccaaagtgctaggattacaggcgtgagccaccatgcccggtgattgctttcttttctaatattttcactgccatctcacttttaaccttctctaagagcagacacagcagctgagcctgacacccatttcagtcaacttctctattccactcaacatacccataacacaaagagactaaatacctaaaccaccaccatctaaatcccatgagttggtcacaatatgtggagacacagttctcttttttgatttttcttacttctcaatggccactttcaaatgagaaaagttattcagttgaaggacaatccagaattcaaccataccttgcttttgtcaatatcagtttacctggacttgaaacttcaccttctacctaacatcttcttccacaggttccttcttcctggtgagtgctctgctgatcaacgttctgaaagtgagcccattcaacaacggtcaactggtcatgggatctttcgtcaagaatgagttttcggccccctcctaccttatgggctataataaatccttgagtgtggtggcaaccacaacttttctgactgggattattcaggtaggatctgagtcttcaaatccctgaaaaggaactgaataaaggggctataaacagaccccttccttatactgctcctgtgatccactgtgatatacctggaacttcagtgatttattttttgaaaaatcagaggctgtgtgaatagcgtgtctccttagtgacaaaacttctctctcctcagaaatcatctaccactgatttaggatgagatattaaacattctcttcagtcctttcacctctaagacaaagggtctaagggatgatggtccagagcagtggtccccaacctttttgaaaccggggaccagttgcaaaagaagacaatttttccacaaatggcaggtcggggccagggagggtggtggttttgggatgaaactgttccacctcagatgacctggcatttgattctcataaggagcatgcaacctagattcctcgcatgtgcagttcacaatagggtttgtgcttccctgagaatctaatgctgtggctgatctgacagaaggtggagagctcaggcagtgatgcttgcttgcctgctgctcacctcctgctgtgcagcacccggttcctaacaggccacaaaccagtaccagtactggtcggtggccccaggggtctggggactcttagtccagagctccactcctgatcttaccttttcaaaaattgcttcatattctttttttttttttagatggagttttgctcttgttgcccaggctgtagtgcaatgggacaatcgtggctcactgcaatctccgcctcccaggttcaagtgattctcctgcctcagcctcccaagtagctgggattacaggtgcatgccaccacacccagcacatttttatatttttagtagagaaggggtttcaccatgttagccaggctggtcttgaactcctgacctcgggtgatccacccacctcggcctcccaaactgttgggattataggtgtgagccactgcacccagccaaaagttgctttatattctatcaacaagaatggactcatttagctgggcatggtagcatgtgcctgtagtcccagttactcaggaggctgaggtgggaggatcacttgagcccaggaggttgaggctgcagtaagctgtgatcatgccactgcactccagcctgggtggcacagcgagaccctgtctccaaaataataataataataaaaataatgatggcctcacaggctcacacactatctttgggttagtaagctttagagccagatctggaatcctttttctgcattgacaaggaccacagctaaaggacaataatatgaatgactcattaaaatctcaaaacttattttggctctgtctttaatttcctctgagagtctatcaccaaaagttcatctactgaactagtcacatcctccaggcttatttctcttttttctcaactaacccagtctctagttgattttcactgatctcccctgggactgtctttcactaagtaaagatttattgggtacctacaaaggcaggctatcaaagtgggcagactccagccctgacactatgagctgtgtgaattttggtaaattattttaccttggtgggcctcagtttcctcatgtataaagcaggaataatatttgttttgcagggttcttaggaggatttagtgaaaaaaatgcatgcaaagtatttagcctagagcttgtcacatagtaagcatcaataagttataattagtgggcacagagaaatgaatttggtactttaacagagaccaaaaatttaaaaaacaatatatagtttcctgtggttaaaaagtttaatcttgtgggataagacaaaatacacaagcaaccttttaattatcaaggggcctcatgcatgctttctcttctccttcaagcctcagcttttttcatctaaaaaaggaagagggctgggcatggtggctcacatctgtaatcccagcactttgggagactgaagcaggaggattgcttggggccaggagtttgagaccagcctgggcaacataggcaaactctgtctctacaaaacaaaataaaaaaaaaaaatagctgggtgtggtggtgcacgcctgtagcacactactatggtccttattttaagaaaacaagggcatagagaggttaagaaaattgcccaaggtcacatagctaagacaccaaactgggattcagttttagggttgtctgattgtagaatctgtgctctaggaaatcttaagcataaaataatattcatataagagtttagtgccaaaagaacatgaagttaaaaaataacctctagttgagtcgaagttatctgggaaggaaacaactatttattgagccctccctttcattcattcaacatttagtactggcttcctataagaatggcagataggtttcatctcacaggccaaccctgactgattaacagtggctgcctagaatattatgttaacactgaacgtgatgccatattacagtgggcaagaaagagttctaaggcaattgcagatttttgccatttacaagatggaaggcagggatggtatgaagaagagtaacatatatttgcatatatgagtgatacatatttgtcactattttcacatctgagctaggtattttacatgtgtgatgaaatttaatctattcaaaacactttacattgaatattattcacattttatagatgaggaaactgaggttcaaagagttaacttgcccacacttacacagccaatgagtggctgggccaggactgaagccagattctccaagcccaggaaccatgcttttttcaccacactccttaaaggagaggaattttactgagctcttgaaagatgatgcaggccagccacagtggctcacgcctgtaattccggcactttgggagaccaaagcgggtggatcacttgaggtcaggagttcaagaccagcctggccaacttggcgaaaccctgtctctacttaaaaatacaaaaattagccaggcgtggtgctgggcacctgtaatcccagctactcgggaggctgaggtgggagaatcacctgaacctgggaggcacaggttgcagtgagccaagattgtaccactgcactccagcctgggtgacagagcaagactccgtctcaaaaaaaaaaaaaaaagagatgatgcacatggattggcagagatggaaaaaagaggggctcatgcataagcacagaagtaggagtcagccagtcacgcaagaaataggaagcagactggcctgactagagtaaaatagaacattgggcggcaatgacaggagattaagggagagacagttggcagggcgcagtggctcacgcctgtaatcccagcactttgagaggccgaggcgggcggatcacaaggtcaggagatcgagaccatcctggctaacacggtgaaaccctgtctctactaaaaatacaaaaaattagccgggcttggtggcgggcgcctgtagtcccagctactcgggagactgaggcaggagaatggcgtgaacctgggaggtggagattgcagtgagtcgagatc

SEQ ID NO: 2158 - DNA, 371 bp, Homo Sapiens
  misc_feature (77)..(77): n is a, c, g, or t
  misc_feature (137)..(137): n is a, c, g, or t
  misc_feature (322)..(322): n is a, c, g, or t
tggaatcgggctgattcatcgccggtttgcagacagagccgcgtcgggtgtgcgccgctgctgctgttgcctctgtnttcgcgtcaccacagaggcaagacaagggtccatatcgcggcatccggctcccgcccgtnttcaggagagaaagaaaaaataaaatatacttggggaagttgtacctgccagaattagcaagagctttctttaagaagacatttgtcaaactcaacaaattgaaggttaacaccttaagagttgtagttactgaccagaaatatggacagacttcttagacttggagggaggtatgcctggactnggccaggggccacctacagatgctcctgcagtggacacagcagaacagt

SEQ ID NO: 2159 - DNA, 725 bp, Homo Sapiens
gagttgtcagaaatttttatttaaagaagtaacattggttattgattggacatatatcattatggtttagggtatgagatacagtgtccaatgtggtattatcagtttaatatacatctacttgtggcaatagtgaacagtttcaagagatgaatacatatttcaaaggaggagaaaggcgtaactgcactttcatttcaatgtctgagtttgataaccaaaaggacttgcatttttagataaaaattttctatttcccaaatctcaagacctagatacaaaatgtagagctgcagatttagggcccgaatggctggagtagcagcaggtgttacctgcacatttgtgaacattttaccaagagaaaaaaggggaaagtgaagattctcatgtctgaatgtgtactcaatgaaaacgttactctgattaggtttgtgggccccatggtctctgaatcagtttaaggtctgaagatacaagagtcattgagataaaactattgattgttgccctgtgaagttggtagaaatttggtttagtctctctagaagtgactgtagaggactatagataccaaataggcagaaacacagttctgcttgcatatttaggggacagcatgcactttgttgcacaagtgtgagttgactggaagtctgaaaaggaaagtcccctctagagtaaattccactcgtgccgaaattcctgcaaccccgggggatcct

SEQ ID NO: 2160 - DNA, 348 bp, Homo Sapiens
tgaaactaacccctctttttctccaaaggagtgcttgtggagatcggatcttttctccagcaattgggggaaagaaggctttttctctgaattcgcttagtgtaaccagcggcgtatattttttaggcgccttttcgaaaacctagtagttaatattcatttgtttaaatcttattttatttttaagctcaaactgcttaagaataccttaattccttaaagtgaaataattttttgcaaaggggtttcctcgatttggagctttttttttcttccaccgtcatttctaactcttaaaaccaactcagttccatcatggtgatgttcaagaagatcaagtcttttgag

SEQ ID NO: 2161 - DNA, 156 bp, Homo Sapiens
  misc_feature (129)..(129): n is a, c, g, or t
gttcggaagttttcgcgccggggtggagtcatcctgggaactccacgcgactttggtggaggtagttctttggcagcgggcatggcgggtaccgtggtgctggacgatgtggagctgcgggaggctcanaaagattacctggacttcctggacgac

SEQ ID NO: 2162 - DNA, 473 bp, Homo Sapiens
  misc_feature (300)..(300): n is a, c, g, or t
  misc_feature (338)..(338): n is a, c, g, or t
  misc_feature (396)..(396): n is a, c, g, or t
  misc_feature (418)..(418): n is a, c, g, or t
  misc_feature (425)..(425): n is a, c, g, or t
  misc_feature (431)..(431): n is a, c, g, or t
  misc_feature (452)..(452): n is a, c, g, or t
  misc_feature (460)..(460): n is a, c, g, or t
  misc_feature (465)..(465): n is a, c, g, or t
agcaaagcaaaacaccagtgggggctctggaaagtaaaaggacagactacagtagaaggactgatcccagagtgcctgtacaaggcctaaatctggcaggcaaaagcatcccacactgtctgtcagcacccacatggcctttttgcctgccttctataacgggtaagtggacctacccttggagatagagaagaaaaattatcttctctgatattcggatgtaatggtcatctcagttcagccccctagggaaacatgttttattttccatggggaaaatatcagcgttaaagctctatncaaatcaaaacaactttgccaacatcttctcttctggntacctttttaaaccaatttaaataccttttcttctggatatttttgtccctttcaggntccggaggaccttttaaaggantgtgggnttttanttttgtgttttacattccttngggtttgnattanttggcttg

SEQ ID NO: 2163 - DNA, 469 bp, Homo Sapiens
ttttttgatgtttacttaagctttatttatatatatagtgcgtaggttcctggagcacaaagaagaaagttgctcagatttatccagacctcacataagtttatagatttcaagtagccactgtattttattacagaaaatacattcttcaagaggaaaatgttaaggccatagaagctttcaccttagctatctaagcttgtattaggtcatcattaaatagtatctgtatcattcttatgtgttccgtaagttatgccacaaataccagaccaagtacactcagtctagaaacaaaaaagtgggaaataaaggttaaaacattctaataggtgtaatgggctgatagatgactttatattacaaagctacttaagacaattctacttttctagaatacaacgcattaatataaacatttgaaattcagaagatttggcctgtggatgctttgtttctcaatgcaatt

SEQ ID NO: 2164 - DNA, 365 bp, Homo Sapiens
tttttttttttttttttggggtcagttcttgttttagtatgacttgggaagagggcttcagttgaagcgaagtccttgctggagagttgttcttcagatttctgatgttatcaaggaaatgggaccaagaggtcctcattctccctactggcctgaagctcttgatgctggtggctgccccagggtatagcttgggcacactctgggtagaagatgctgaggcctccacagtttcaccctcttgttcttcgggctgtaatgtttcgagatccttccttcaagtgctgaactgattgtaactgagtttccagagggacaagaggtttccctgtggttctgcttctcagggatggtgtgtggagtga

SEQ ID NO: 2165 - DNA, 313 bp, Homo Sapiens
gaggaagcgcagcaactcgtgtctgagcgcccggcggaaaaccgaagttggaagtgtctcttagcagcgcgcggagaagaacggtgagccagcatcatggcagaacaggatgtggaaaacgatcttttggattacgatgaagaggaagagccccaggctcctcaagagagcacaccagctccccctaagaaagacatcaagggatcctacgtttccatccacagctctggcttccgggactttctgctgaagccggagctcctgcgggccatcgtggactgtggctttgagcatccttctgaggtccagcatg

SEQ ID NO: 2166 - DNA, 350 bp, Homo Sapiens
ggccacccacgatagaagagacatagaagatctcccagctcttcctgggagcaaagctgtgcaacccagagcctcaagctgccgctttggcaggaaagccaactcccgcgtgctgaagtcactgaatgcacaccagagagaaacccacttcgcaggaagcaaatgctttgtctcatttacatttttcgcaggtgttctgggatgtgaaggggacgtgtccaacgtccaggtccttcgtcacagccataaaggaggccatgcgtgggacacgcctcattccaggcaatgtgagagacgccttcaccttgaccgtgttgctgcctctcgttccaaccgtgctcagaaccagg

SEQ ID NO: 2167 - DNA, 4454 bp, Homo Sapiens
gtggagatgaatggcgggcgcggcgaccgggagccggacccctgggaggtcggagcttgtcgagggatgcggctggcgctgcccggagcatggcgaccgcgtggctgagctcttctgtcgccgctgccgccgctgcgtgtgcgcgctttgcccggtgctgggcgcgcaccgtggccaccctgtgggcctggcgctggaggcagcggtgcacgtgcagaaactcagccaagaatgtttaaagcagctggcaatcaagaagcagcagcacattgacaacataacccagatagaagatgccaccgagaagctcaaggctaatgcagagtcaagtaaaacctggctgaaggggaaattcactgaactcagattactacttgacgaagaggaagcgctggccaagaaattcattgataaaaacacgcagcttaccctccaggtgtacagggaacaagctgactcttgcagagagcaacttgacatcatgaatgatctctccaacagggtctggagtatcagccaggagcccgatcctgtccagaggcttcaggcatacacggccaccgagcaggagatgcagcagcagatgagcctcggggagctgtgccatcccgtgcccctctcttttgagcccgtcaagagcttctttaagggcctcgtggaagccgtggagagtacattacagacgccattggacattcgccttaaggaaagcataaactgccagctctcagacccttccagcaccaagccaggtaccttgttgaaaaccagcccctcaccagagcgatcgctattgctgaaatacgcgcgcacgcccacgctggatcctgacacgatgcacgcgcgcctgcgcctgtccgccgatcgcctgacggtgcgctgcggcctgctgggcagcctggggcccgtgcccgtgctgcggttcgacgcgctctggcaagtgctggctcgtgactgcttcgccaccggccgccactactgggaggttgacgtgcaggaggcgggcgccggctggtgggtgggcgcggcctacgcctcccttcggcgccgcggggcctcggccgccgcccgcctgggctgcaaccgccagtcctggtgcctcaagcgctacgaccttgagtactgggccttccacgacggccagcgcagccgcctgcggccccgcgacgacctcgaccggctcggcgtcttcctggactacgaggccggcgtcctcgccttctacgacgtgacgggcggcatgagccacctgcataccttccgcgccacgttccaggagccgctctacccggccctgcggctctgggagggggccatcagcatcccccggctgccctaggggccaggaccggcgtgacagcctccaggtacgccgcagctgcccagtctcgcctaatctacctagatcagcgtggctggtccccttactgcctgcttcttagggccctctccctgccccagctttccccgaccaatcacgcctacagtgctttgaaggtttcctctcctaggctagtttcaaacaggccctaaacaagtctgctgctgccctctcatcagacctccgcaccctcaccccaccatcacttaaactactttaatccagttccttcaaagtgatacccccacaggtaagccctcagcatcctgaatacatcatccgcagcctgggaaccttctccctcgtacagcacaggaacctgacacatagtaggcacacagtaaacgtttgtgaatgaatgggagtcatccagtcctgactcttctgtctcttgaggtcccttgaatcttccgcttcctccccaccgatttcagcgtgtccacatcacagctccctccagaagctgcaagagcttcttagcagttcctggtctgaaccctctcccagtcctcatcttccaccctaaaactagagtgatcttcctaaaacttcacttaacccctcagctatgaaaaggcttccaggagtttccatgaaataacaaaaaaaaatacaagcgcctcaccttagcattcaaggcttgtctagtctgcccaaaattacttatcctcacctagctcctaccactcttcttagagactctccagtcagaaatgtgtcgcatagttccacctccacacctctctgctgccagcacattcatgcagaaaagtcttttcacctgtctcagtcttccgcaggcttacctgcgccaggaagtctaaccaaggaacaagaatctcactatcagagccacaaatctgggacctgtctttccaactaaattggaggctttggaagggcagctttgtcctatactctctccaccctgaaaagttcccagaaagccccttccctcccaagcagtgaattaataaccagcaggtgcctatcactgagtaacagaagagctgagttaggcgggcctcacaggtcacccagccagatctcatctggggagtctgaggtcctgaaagaaagcagagctgcgtaaagttaccccggggtgatataggggggccagacgtgtgccccgttcacccacccccaggcaagcatctgacctgtcccctggcccagcccttaggcccagctttcaacctgcttactcatttctcaggggattttgggaaggaatcagcaggtgacagttgctaagcaaccaaagggcgtggtgtttcccaactgtcttgggacaaaaagggtaagagcacccttagatccagatgttgccaaggaaacccagagtgcccagctgtctggaatgaagtgacagaggtagaaaacagtaggccctcacaggaggccaccttcgctagcagggagtgggaggcttctttccagggatttgtgtctccgttctgaaggttctgcgtcctgttttgtcaattccctagacggttttgaagttatattctgttaaagcatcttcataggtgcttggtgggaggccaaggtcgccgaatcctcgtggtttaaatagactttcagtgcattagtttgaaccatataaaactgacaattttcaatagtttttgagttaaaaatggcacttttgatatgagacaatgtagcagaataccaggcagacagaaccttgcaaacaccttaacttctaaccaaagactttaaaactctggctggacagagttttaagcactatgctgcaggaatcctgagaaaaaggggaaattaattctattaggaatggcccaaactgaattgtgacaggcagagggtgttcctgacagagggaagatgaatacacttgaccccaacatttctgcccatccctgatgaccaagacctcttcccagacccacagctgcaggggccaagtaataacagctcttaatagtttataatgcactgttttaatgctttacgactaaactcatctgatcctttcatcagccctagagggtagaaagttttcccaattctacacatggcaaaatggagacccagagtcacttgcccaaggtcgcacagctagtggtggagctggagtctgggcccaggctgtgagttccaggtctgtgctcatggccaccaggccatactgctcagggtgaatgcagctggtctctggccagtgcctggtgctctggcccctctcgtggagctactgcccatgatgctttcctagtgcctggttactctgcgagacttgagtctacctttggactgccttccttgggggtctgagatgaggccttatggcccagaggggaacttgattcaaaaatttgggattcatgtagcagagacagagctagactgtaaaggtcacaaactagctgtgtcaaggcccgtgatagccagaaagcggcagtttcagtccatatcaattgtgtgaccagggctagtcactttttacttctcagtgccatctataaaatggggataatagcactacctaccaagtgctgtgaggctcaaatgagccaaaggttataaacttgccttaaaactatagtcctatacaaaaattagctgggcgtggtggtgcatgcctgtaatcccagctactagggaggctgaggcaagagagttgcttgaacccaggaggcggagattgcagtgagctgagattgcaccactgcactccagcctggggacagagcaagactcttgtctcaaaaaaaacaaaaaaaacatatatactgctgtatcatgccaggatttatcagcattcccaagggagcttgcacggtactgaccgagtgctgagactactggtattcccagctgccatgtggcagcagcaggagctactagaatattctcagcacaggaatgaggcttccttggtttccatgtctgtaagggttactgatcacttaccttcttctctttcagacttgaatctgtagacatttctttattgatatggcaaattgcttgcagatatttttaaatgacagcaattttctaatatttggtttaataaaatgtgaataatgtccctttt

SEQ ID NO: 2168 - DNA, 709 bp, Homo Sapiens
cccggtgttatttcatccaggggctgggcttcgttgttacgattagatggcctgttgggcgctacgactgtacaccggagcgagcggagcagcccgggtctgaccccggcccggctcccgctccgggctctgccggcgggcgggcgagcgcgggcggtccgggccggggggatgtctcggcggacgcgctgcgaggatactggatgagctgcactaccaggacacagattcagatgtgccggagcagagggatagcaagtgcaaggtcaaatggacccatgaggaggacgagcagctgagggccctggtgaggcagtttggacagcaggactggaagttcctggccagccacttccctaaccgcactgaccagcaatgccagtacaggtggctgagagttttgaatccagaccttgtcaaggggccatggaccaaagaggaagaccaaaaagtcatcgagctggttaagaagtatggcacaaagcagtggacactgattgccaagcacctgaagggccggctggggaagcagtgccgtgaacgctggcaacaaccacctcaaccctgaggtgaagaagtcttgctggaccgaggaggaggaccgcatcatctgcgaggcccacaaggtgctgggcaaccgctgggccgagatcgccaagatgttgccagggagggcagacaatgctgtgaagaatcactggaactctac

SEQ ID NO: 2169 - DNA, 300 bp, Homo Sapiens
  misc_feature (295)..(295): n is a, c, g, or t
tacttttttaacctatcctatatatttttaatatgtgccataaataaatgagagatcattttttagttatgtgaatatatgtcttagttatttttggaagctatactcaggtaatcaagtgaaaataaaatgatttacctaaaggaaaagaaacagaaattaggattggatgtctgtattaaataatctaggatctttgacatagcctgaaatatctaatagtttcaaaatacactgaaattcggattagggcaaatttttacaatatggttttattgggactatcatccacagnctgat

SEQ ID NO: 2170 - DNA, 182 bp, Homo Sapiens
ttattttgtgtaggcactatccccagctcagagtgttggaatcatggagattcacaatcagacagggatggctcaaaaatgaatagatgaaagttaggtaataagttgagctcattgatttgtgtttttttaaaaaataatgtattagaggactttcaccaagttgttcttaggttacaagt

SEQ ID NO: 2171 - DNA, 371 bp, Homo Sapiens
tctttctggtctcggccgcagaagcgagatgacgaagggaacgtcatcgtttggaaagcgtcgcaataagacgcacacgttgtgccgccgctgtggctctaaggcctaccaccttcagaagtcgacctgtggcaaatgtggctaccctgccaagcgcaagagaaagtataactggagtgccaaggctaaaagacgaaataccaccggaactggtcgaatgaggcacctaaaaattgtataccgcagattcaggcatggattccgtgaaggaacaacacctaaacccaagagggcagctgttgcagcatccagttcatcttaagaatgtcaacgattagtcatgcaataaatgttctggttttaaaaaatac

SEQ ID NO: 2172 - DNA, 2964 bp, Homo Sapiens
gagcacagcatggcggtcaaggtgcagacaactaagcgaggggatcctcatgagttaagaaacatatttctacagtatgccagtactgaggttgatggagagcgttatatgaccccagaagactttgttcagcgctatcttggactgtataatgatccaaatagtaacccaaagatcgtgcagctcttggcaggagtagctgatcaaaccaaggatgggttgatctcctatcaagagtttttggcatttgaatctgttttatgtgctccagattccatgttcatagtggctttccagttgtttgacaagagtggaaatggagaggtgacatttgaaaatgtcaaagaaatttttggacagactattattcatcatcatatcccttttaactgggattgtgaatttatccgactgcattttgggcataaccggaagaagcatcttaactacacagaattcacgcagtttctccaggagctgcaattggaacatgcaagacaagcctttgcactcaaagacaaaagcaaaagtggcatgatttctggtctggatttcagtgacatcatggttaccattagatctcacatgcttactccttttgtggaggagaacttagtttcagcagctggaggaagtatctcacaccaggttagcttctcctacttcaatgcatttaactcgttactgaataacatggagcttgttcgtaagatatatagcactctagctggcacaaggaaagatgttgaagtcacaaaggaggaatttgcccagagtgccatacgctatggacaagtcacaccactagaaattgatattctatatcagcttgcagacttatataatgcttcagggcgcttgactttggcagatattgagagaatagccccattggctgagggggccttaccttacaacctggcagaacttcagagacagcagtctcctgggttaggcaggcctatctggctccagattgccgagtctgcttacagattcactctgggctcagttgctggagctgtgggagccactgcagtgtatcctatagatctggtgaagacccgaatgcaaaaccagcgtggctctggctctgttgttggggagctaatgtacaaaaacagctttgactgttttaagaaagtcttgcgttatgagggcttctttggactctacaggggtctgataccacaacttataggggttgctccagaaaaggccattaaactgactgttaatgattttgttcgggacaaatttaccagaagagatggctctgttccacttccagcagaagttcttgctggaggctgtgctggaggctctcaggtcatttttaccaacccattggagatagtgaagattcgtctgcaagtagctggagagatcaccacgggacccagagtcagcgccctgaatgtgctccgggacttgggaatttttggtctgtataagggtgccaaagcgtgtttcctccgagacattcccttctctgcaatctattttcctgtttatgctcattgcaaactacttctggctgatgaaaatggacacgtgggaggtttaaatcttcttgcagctggagccatggcaggtgtcccagctgcatctctggtgacccctgctgatgtcatcaagacaagactgcaggtggctgcccgcgctggccagacgacatacagtggtgtcatcgactgtttcaggaagattctccgggaagaagggccctcagcattttggaaagggactgcagctcgagtgtttcgatcctctccccagtttggtgttaccttggtcacttatgaacttctccagcggtggttttacattgattttggaggcctcaaacccgctggttcagaaccaacacctaagtcacgcattgcagaccttcctcctgccaaccctgatcacatcggtggatacagactcgccacagccacgtttgcaggcatcgaaaacaaatttggcctttatctcccgaaatttaagtctcctagtgttgctgtggttcagccaaaggcagcagtggcagccactcagtgatgagacaactgttgagtgtggcaaaatggcgccttgaagaaagaggcctaggagagcagccctgtaatgtatccagtcagctgcatggtactgactgagctgaggagtcaaactcttctttctgtatgacatatacatatacttgtttataaaataatcatttgcccagggaaaaaaccacaacgctgtttcaagctttagtcttatgtgttgaaatgtttttgtaagccttggcatgaattagtgttctagactctgctttgcacagcttgcacttacagtgattgtacatattgtacatctttgtacagagacatcttggcacctcatcccaacaaatcacatttgtagaaatgtaatgcggttctgagtggcttgaaatgtacagaatgttttgaaagtgttttattaagaatcacacaaaaataaatgtattaaaattaaattcattctcttattggtgacttatggaaataaagcatcaatattggatgtatttaattcctagtttgttttccattctggaataaaaaggtatttgctgataaaaggcataacgagacatagtgctgctaccactgaataagtgatactttggaaagatgcatgccagtggatgccagaggaccaggctaatgacttgtgtgtgctgatgtgtttccatttgtatttaatgtgtgtagaccctcctctgttcatcaatcaaaaagcatttcctaggcagctcctcgcctgtcagtgtgcatatggaaacagggacatctccatcattactggcttagttttgctttcctttgacacagtaaggcaaaggccaagctttcaaaagagtaaaggatactttcacaatttcccttcatatggatatgattccagtcaaaaataaaatgcacaccaaaatgtaaaaaaaaaaaaaaa

SEQ ID NO: 2173 - DNA, 647 bp, Homo Sapiens
aaggccagtaagtacgggaaaaaatgtttactaacttcctcagagattcgtgatacgcgtttctccactgacagacatttaaaaacaaccttcagctccgtttcaatcaatcacctcgactgttttttagcatggacactgccagcaggacagacagggatggagtaaaccgaagtcaatttcagggctcttggcgtgttggacacagaagaaatcctagtgcagccttggtagctaacagtcactgattttataatggagaatgcgtaaagattcatttttcaaggagaagagcctgcaaatggccaatgaaggaggtaaataaactaagatattccgagggaagggacccaggccacctcccttccgcaggtctgcagatgaagggttttttgaatgaaatgccactgtgcattttcagaaaaaaaaatctctgataaacagactttgaatggatgttgttcctcctgattctcttttctcttcgtggcgacttagagtggcggatattcggaactgtgaatgtacatagcgttgagttaaaccccttgtgtgtgagacaggacgcaggggcccctggtggctgggggccagacccgtgggcaggtggggcatgggcctggctgcggggacctgctggggtgtgg

SEQ ID NO: 2174 - DNA, 398 bp, Homo Sapiens
  misc_feature (51)..(51): n is a, c, g, or t
  misc_feature (320)..(320): n is a, c, g, or t
  misc_feature (374)..(374): n is a, c, g, or t
ccagggatctgagcagctccttctagcatccttcatccttcaggtaccagncatccagacagtgcttgagctgcagaaactgagaccagacctctggcctggccctccccaggggcctcctttcctatagtcactgcttctgcatcagatactttcagctgcaactccctactgggtggggcaccatttcaggcagaaggttttggtaccctccactgaccctacacccagggctgctactgccgcttgtggcttcaggatgaaaggtgagaccccggtgaacagcactatgagtattgggcaagcacgcaagattggtngaacagctttaagattgaaggccagcttgtgttcggataaaggtgttccaaggnagcagcagacctgatgatttattg

SEQ ID NO: 2175 - DNA, 402 bp, Homo Sapiens
  misc_feature (12)..(13): n is a, c, g, or t
  misc_feature (25)..(25): n is a, c, g, or t
  misc_feature (148)..(148): n is a, c, g, or t
  misc_feature (186)..(186): n is a, c, g, or t
  misc_feature (209)..(209): n is a, c, g, or t
  misc_feature (264)..(264): n is a, c, g, or t
  misc_feature (277)..(277): n is a, c, g, or t
acagcccgccgnnaaacggcttctngcccacggacatcaatgactcaccctttgggactctgcctggctctgctgagcccccgctcactgcagtgcggcccgagggctccgagccaccagggttccccacctcgggccctcgccggancagggctgttcacgcaagaaccgcacccgcagccactnccgtctgggccaggcaggcagcnggggtggcgggactggtgactcagaaggctcaggtgccctacccagcctcacctncagcctcaccccnctgggcctggcgctggtgctgtggacagtgcttgggccctgcttgacccccagcggacacaagagcgtgcttcagcagccaggtgtgtgtaacatacggggtctgttttcacgccgttcaagcca

SEQ ID NO: 2176 - DNA, 597 bp, Homo Sapiens
aatcttttttttttttttttttaaaatgcttttatctttattaaaggcagaaataatgcaggtaaaaagacgacagttgaggcatgatatggtttgagagtcaggtaagatattaatttttcccactgccaacataaaaggaggtttaacacaactctgcaatgggaccatctgattagaggtcatggctacaacaaatcgaagttttttactatgggtctctgttttaccattctgctttccaaatccgaattgggctttgagccatcattaatttccacaattctggatgttctgggcttataattggatcaataatttttgggcttggaggagccataccgttctcctaccacttaatagggtaatttgtttcaattcttctatgtaattttggtgcattatctgggtagtcgcttgcaaaatagtctctctacaatcttcactctgtccagtacaatttactgtaaattgtcccctaggggcccaatcaatgatgattccataggaattattttgtagtacagcagcactgtttgcaaaataatcttaccaggttagcacctatagcttttctgaccatttaatatcacgagg

SEQ ID NO: 2177 - DNA, 2223 bp, Homo Sapiens
acttcttttcttggctaagccgcgtttgtactgtgtcttaccatgcctgaaccggcaaaatccgctccggcccctaaaaagggctccaagaaagccgtcaccaaagcccagaagaaagacggcaagaagcgcaagcgcagccgcaaagagagctactccatctacgtgtacaaggtgctgaagcaggtccaccccgacaccggcatctcgtccaaggccatgggcatcatgaactccttcgtcaacgacatcttcgagcgcatcgcgggagaggcttcccgcctggcgcactacaacaagcgctccaccatcacatcccgcgagatccagacggccgtgcgcctgctgctgcccggcgagctggccaagcacgccgtgtccgagggcaccaaggcggtcaccaagtacaccagctccaagtgagtccctgccgggacctggcgctcgctcgctcgagtcgccggctgcttgactccaaaggctcttttcagagccacccacctaatcactagaaaagagcttgttcacttattcccttagtttcttttcataaagtaagttattttagtgtgaaggtcatgggaaatggcatacgtagctttttaactatttggaactcgaggtccccagtgcgtcattggatttgcttttgaatctagagcgtgtctttactcattgtgctgcttagccttcccaggagtcggttctcaattaggctgttgggaatccgcctctttacccgcccccactcccgccccacacgcgccctggtggctccttgggtctgtttcattctaaaacgaagtggctgagttcggctgtcatttaagagaactccaggacacaattcagcccgggttccgcaaacactgcgtgacagctctgtatgactgacgcttggcagcagcttttgtgtccggtcaccagttctgccgtgcgatggggcctcctgtggataccagccgttctgtgtattttggacgaaggccgcgcagccgggtcccagccttgtcctgattgggcgacaagaatattcaaaattctgcgcctttttctaatttgtagatttcagtttccgtcgttcactttgagactttgaaattcctatttctcattttgttgataatttctgcatttaatggtctgtgctttaaatggtaacgctacggccccaggtcactgcgaggcacttaccatgtagatacgggctcaaaagtcacctctcagagacctacgtcatccactcaggaattcgcgcctctcatacttgcctgtctcattttatcttccttctagcagctgtctgaaattggttcgtctgttttcttgtttatggtattctcaagcccttgacagaccggctagtgtggttttcccgtgcatcttcagcctggcacattatggacacttaaatactacgtattgatctaatattgttgggttaatttttccatcccacccttttcttaatcgcttccgtggatggatgaagggtgctgttcatttccattagatgtatgtgaaggcacagtgaaaatggaaatgttcttggagctacttcctcaaaatgtatccttagtcacctcagtgcaacagctgggagggggccgtgttaagattttttttgctacaaagaggaggtggcaatggtagatccacccttatgcttctcagtttagcataacctcttatggattttcatcaaattcagcgtgttggtcactggaaagagccttttccttctccttttcttactctcccctcatggtgttcccctcttaaaggagaggagcttttaatttacacttaccacctcatttgcttttctggaggccatgcaatataggcgggactacagagttaatctcctttttacaaatgaggccaagagaagcctcattggttcacagtcatgcagctcatactgtccacccttgtattctcagatgcaggacaattgcattttagttttattttgtggaggtgcagaatatttactctttctgtccaacccttgattctgccgaggaagacactgatggtttgatgagtgattcagctgtttttggctaagggcttttggagctgatggcaggggtttgatgaatccaaatgagctctagacattatcacagactgaatagatcttaactgtctcctacatgtgtgttttcaaatgtgtatagatgctattgttattaataaagttaccaattaatttaa

SEQ ID NO: 2178 - DNA, 400 bp, Homo Sapiens
tttttttttttttttttaatggttaattagttattttcttttattactaagtctgaacttacactgctaccaatatcagagaaagtgcaggttttctaacataaacaaattgaacataaatggattgattagtctacaacatggctccctcccctatagctattaacaatacagtaatattctcatatgcagtttcttagtattgaatacagtttgggtattttctcccttcaaatttcatgctgaaatttgatcctcatgttggaggtatgacctggtgtgaggtgcttgggtcatgggagcagattccacataagtggcactgttgtggtaatgagtgacttctcgctctattagttcctgaaagatccgattgttaaaaaaaaaaaacctcgtgccg

SEQ ID NO: 2179 - DNA, 1902 bp, Homo Sapiens
cggccgcgtagcccgcgcgcggagcgtaccctgctgcggccgttggccgttagcgcggcttcggcggttgtcttggagaagcaagatggcggcgacggcggccgcagtggtggccgaggaggacacggagctgcgggacctgctggtgcagacgctggagaacagcggggtcctgaaccgcatcaaggctgaactccgagcagctgtgtttttagcactagaggagcaagaaaaagtagagaacaaaactcctttagttaatgagagcctgaaaaagtttttaaataccaaagacggtcgtttagtggctagtcttgttgcagaatttcttcagttttttaaccttgactttactttggctgtttttcaacctgaaactagcacactgcaaggtctcgaaggtcgagagaatttagcccgagatttaggtataattgaagcagaaggtactgtgggtggacccttattattagaagtgatcaggcgctgtcaacagaaagaaaaagggccaaccactggggaaggtgcacttgatctatctgatgtacattctccaccaaagtcaccagagggaaaaacaagtgcacagacaacaccaagtaagataccaaggtataaaggacaaggtaagaagaagacaagcgggcagaaggctggtgacaagaaggccaatgatgaggccaatcagagtgatacaagtgtctccttgtcagaacccaagagcaaaagcagccttcacttactgtcccatgaaacaaaaattggatcttttctaagcaacagaactttagatggcaaagacaaagctggcctttgtccagatgaagatgatatggaaggagattctttctttgatgatcccattcctaagccagagaaaacttacggtttgaggaaggaacctaggaagcaagcaggaagtctggcctcgctctcggatgcaccccccttaaaaagtggactcagctccctggcgggagccccttctttaaaagactctgagagtaaaaggggaaatacagttttgaaagatctgaaattgatcagtgataaaattggatcacttggattaggaactggagaagatgatgactatgttgatgattttaatagtaccagccatcgctcagagaaaagtgagataagtattggtgaagagatagaagaagacctttctgtggaaatagatgacatcaataccagtgataagcttgatgacctcacacaagatctgactgtatcccagctcagtgatgttgcggattatctggaagatgttgcatagacacgaagaaggaagtattctaattaacaaggacagaggactgaccggttccattttttttttttccagacaatcactcagctggaatgtctgctctctattggtgccttgcatttcaaaaacactgcagatattttttaaaagtaattttcattttactaaacaaaatacttcctatttgagcccatgtgtggaagatttaatattcttaatttaactgtacatttctttatggaaattgattatctacactcagtttcattacagggaaggaacccatgaaaacatcagtgttaagagcatgatgaaaggtgtcaataaagccgtaggatcgcgcaaccctttgtgtgtgtggctgctggtacgtgtgatctttgaaaaccttggctttagccctctggaatcagagcttacccaccatagtatattttgatattaggtggttctacacatagttggcaaaatgacttggtaaatttgtaatgctgaagtatattagtataagttaaatttgatgtgtcaactttattttgtatttccttccatttggaaggtttgttagaccattaaggttatattaaagtactcttgtgtgtgctaaaaaaaaaaaaaaaaaa

SEQ ID NO: 2180 - DNA, 504 bp, Homo Sapiens
tggcgagcggatcatccgcttccggagtcgaggttttcgggcttgtaccgcttggcggtgcggcctggtgtcggcttgcaggttctttctgtgtttgttctctgccctgccaaggccgtagagctggtgcgtgcgggtagcggggctctccgaggagccgcacgccggcggcaccatggtccacctcactactctcctctgcaaggcctaccgtgggggccacttaaccatccgccttgccctgggtggctgcaccaatcggccgttctaccgcattgtggctgctcacaacaagtgtcccagggatggccgtttcgtagagcagctgggctcctatgatccattgcccaacagtcatggagaaaaactcgttgccctcaacctagacaggatccgtcattggattggctgcggggcccacctctctaagcctatggaaaagcttctgggtcttgctggctttttccctctgcatcctatgatgatcacaaatgctgagagact

SEQ ID NO: 2181 - DNA, 424 bp, Homo Sapiens
ttttttttttttttttttttttttttttttccttgaccaaggccaaaaaacctttatttccaccgagacctttcatccaatttttttttttccgggaactttttcccttccctactccaggtcgtaccctggccactcctttccttttggctggccaatgtctcctttgtaggctccaaaaggctttcagggatgcaggcggcctcccgcagggttgagttgcaatgggaacaaaaacagctggggtcccatagcaccctcatctggtgacatcctgcttctgacaggcaaaagaagccttcccagatgaaattttagtcctttgcgcagccatgctctttttccagcaaaaaaaccatgtgcagtcgggtctgctccccatgggggctttgatgtgggcccagcagtggatcagccttccaaa

SEQ ID NO: 2182 - DNA, 789 bp, Homo Sapiens
  misc_feature (225)..(225): n is a, c, g, or t
gcggcggcgcggtccagggactccatttcccgtcggctcgcggtgggagcgccggaagcccgccccacccctcattgtgcggctcctactaaacggaaggggccgggagaggccgcgttcagtcgggtcccggcagcggctgcagcgctctcgtcttctgcggctctcgctgcctctccttttcgtttccggaaacatggcctccggtgtggctgtctctgatgngtgtcatcaaggtgttcaacgacatgaaggtgcgtaagtcttcaacgccagaggaggtgaagaagcgcaagaaggcggtgctcttctgcctgagtgaggacaagaagaacatcatcctggaggagggcaaggagatcctggtgggcgatgtgggccagactgtcgacgacccctacgccacctttgtcaagatgctgccagataaggactgccgctatgccctctatgatgcaactatgagaacaaggagagcaagaaggaggatctggtgtatatcttctgggcaccgagtctgcgccccttaagagcaaaatgatttaatgccagctccaaggaacgccatcaagaagaaagctgacagggatcacgcatgaatgtggagcaaacgtgtacgaggaggtcaggacgatgaccctggcagagaagctggggggagtgcgtcaatctccctggaggcaagcttggtgagcccttctggccctggctggagcatctggaagaccaaactgactgggggtgaaggctgcccttcccgcaaccgaggctgcgggacacaaagggaga

SEQ ID NO: 2183 - DNA, 460 bp, Homo Sapiens
  misc_feature (187)..(188): n is a, c, g, or t
  misc_feature (384)..(384): n is a, c, g, or t
  misc_feature (396)..(396): n is a, c, g, or t
  misc_feature (443)..(443): n is a, c, g, or t
  misc_feature (454)..(454): n is a, c, g, or t
cactgttggcatataggtatataccatacaatttcactacttgattatacttacaccaaccatgcagaccaaggagctgtgctgcccagaacatttcaaagggttgatgagatctgattgtcaagaaccagctcacactctacttgtaggtgtttgtgttccagacaagaaaactcccccgacaggnnggccccgaaactgagctaatcgtcagttttgcttcttgaatattgactgttctttctggcacaagctatccaatgaattaaattaaaattttaattaaaattcaagtgcataggtttccttttcatccctcaaggtgggagggtaaatcatttgccacatttaggggatatccccaggctccccacccccacattncccgtggctatnggtaggggaaataggttttgtacggccatcttctgagggtgttgtgnctaggtgaggnggggcc

SEQ ID NO: 2184 - DNA, 719 bp, Homo Sapiens
  misc_feature (666)..(666): n is a, c, g, or t
cggatagaaaatgtcactgaaattcacaaatgcaaaacggattgaaggacttgatagtaatgtgtggattgaatttaccaaattggctgcagacccttctgttgtgaatcttggccaaggctttccagatatatcccctcctacatatgtaaaagaagaattatcaaagattgcagcaatcgatagcctgaatcagtatacacgaggctttggccatccatcacttgtgaaagctctgtcctatctgtatgaaaagctttatcaaaagcaaattgattcaaataaagaaatccttgtgacagtaggagcatatggatctctttttaacaccattcaagcattaattgatgagggagatgaagtcatactaatagtgcctttctatgactgctatgagcccatggtgagaatggctggagcaacacctgtttttattcccctgagatctaaacctgtttatggaaaaagatggtctagttctgactggacattagatcctcaagaactggaaagtaaatttaattccaaaaccaaagctattatactaaatactccacataacccacttggcaaggtgtattacagaaaggaactgcaagtaattgctgacctttgcatcaaatatgacacactctggatcaaggatgaggtttatgaatggctggnatattttggaattaaacaccttaaaatggctacttttccaagtattggggaaa

SEQ ID NO: 2185 - DNA, 297 bp, Homo Sapiens
cggcacgaggcttcaccccggattatttaagactcgatttgctatctcttggactcagcctcgcacaccccctgcgcgagcagctcctcaatggatacaaacagcgagcgtctcaatggatacattctccgggccagccaatgagcgtgctgcggaaggggctgttgccgtggggacgggccggctggaacaggttgtgttgatgaattgttaatgagtttgtcattcacaaaaacggaaaggaatttccgctccggataagccccagtgcaaacaagctgcaacagcgggctcggc

SEQ ID NO: 2186 - DNA, 483 bp, Homo Sapiens
ttttttttttttgagacggaatctcactctgttacgcaggttggtccatcttatagattatcaattgtacagataattgcactccggcctgggagacagagtgagtacctgtctcaaaaaataaaataaaataaaataaaattaaaaaaaacacttaaattagtgaataaccttggtgaaaagccacgtccatgcttctacggcatttctcttcaaaggtcacaacccgcggaaggcgccgtgcgccggttgctatacaggccgcacttcacaccccgtgcctccccgcctttcctggctcctccgcccagatccccggcgctcccgcgttcggtgacggccgggtaggctgtaggcagcgcaatgccaagacagagctgctggcggcggcgggcgaatctccctgcaccatgagcctcggctccggccccgttaggggccgataagcacagcgcacgccgccctccatttgccccggggcct

SEQ ID NO: 2187 - DNA, 454 bp, Homo Sapiens
atgtttaactgtttgttcggaaacttcttttattaaaaaagattttaaatattaatgctattttcaatacaggtgtgataacactcaataaagcatggtgtacttgatataaatttcggaatgtaacagtccatctagttcctggtcccctccagtctccaccacatagcctagtagcaaaacgtacacacccgtttaaaaatgaagaagcttttgggcattgggtgagcacagtggggtggggcaaggaaagtgctcgttcctgaattattcatgcttttggctttgacttcagttagtaacatcaattctaagagaactgagacaaactcttctatgttccgcaaaggaatggaggaaaaagcctgccattcgcaagcagctgtgggcaaaaccagcgcagagtacaggggtcgggaaatgagggattaaaaaaaaaagtcggagtaaagtg

SEQ ID NO: 2188 - DNA, 391 bp, Homo Sapiens
  misc_feature (80)..(81): n is a, c, g, or t
  misc_feature (92)..(92): n is a, c, g, or t
gagcgggaggcgagtggcgagtggcgagtggcgagtgtcaggggggcggccggcggtggcggggcggccggaggaggcgnngttagtgggcnttttttcacgcggcgccgcggcccgcctggcctgcagcgctcccacccccggcggcggcacgatgccctttgacttcaggaggtttgacatctacaggaaggtgcccaaggaccttacgcagccaacgtacaccggggccattatctccatctgctgctgcctcttcatcctcttcctcttcctctcggagctcaccggatttataacgacagaagttgtgaacgagctctatgtcgatgacccagacaaggacagcggtggcaagatcgacgtgagtctgaacatcaggttacccaat

SEQ ID NO: 2189 - DNA, 450 bp, Homo Sapiens
  misc_feature (395)..(395): n is a, c, g, or t
gtgttttacagtttattttaaggctactacaaaggatacagatgaacaacagccacatgaaggggtacctggggcaaggtccagaagcatcctgagcacaggacttgctgacttcataaagctggagtgcgtcaccttcctggcacatcaaaatgtttgccaaccctgaagctccctgaactccatagttaacggattatgtcttgttgacataggcctgatggattattgacacaaatctccagcccctctcccctctctggaggtgggagactgaaagtttgaaacttccaatcatgatgtggtctttgtgagcagcccccatcctgagttatccaggtgcccatcaagagtgacctcattagaacaaaaaattctcctatcactgggaaatntaaaggaatttaggagctttgtgcaggaactggggcaaagaccaatactagaaca

SEQ ID NO: 2190 - DNA, 3120 bp, Homo Sapiens
aaaggaaacacaagttgcttttgataacacatgatgcaaagaaagaattagaaagaatgagcaatgaagccggtataaatgacaaacaagtgtccaaaggcccaagaagttactaccaaaagctttcaaacaatattggtttatctttaaagacacatccatagcatactttaaaaataaggaacttgaacaaggagaaccacaagaaaaactaaatcttagaggctgcgaagttgtgcccgatgtaaatgtagcaggaagaaaatttggaatcaagttactaatccctgttgccgatggtatgaatgaaatgtatttgagatgtgaccatgagaatcaatacgcccaatggatggctgcctgcatgttggcatcgaagggcaaaaccatggcagacagctcctaccagccagaggtcctcaacatcctttcatttctgaggatgaaaaacaggaactctgcatctcaggtggcttccagtctcgaaaacatggatatgaacccagaatgttttgtgtcaccacggtgtgcaaaaagacacaaatccaaacagctggccgcccggatcctggaggcgcaccagaacgtggcccagatgcccctggtcgaagccaagctgcggttcatccaggcgtggcagtcactgcctgagtttggcctcacctactaccttgtcagatttaaaggaagcaaaaaagatgacattctgggagtttcatataacaggttgattaaaattgatgcagccaccgggattccagtgacaacatggagattcacaaatatcaaacagtggaatgtaaactgggaaacccggcaggtggtcatcgagtttgaccaaaacgtctttactgctttcacctgcctgagtgcagattgcaagattgtgcacgagtacattggcggctacattttcttgtccacccgctccaaggaccagaatgaaacactcgatgaggacttgttccacaaattgaccggcggtcaggattgaaacaagcacgcgtgctcggctcacaccaacaaggcaagccaaaggcgcccctccccagagggatccctaacgtgcccagcatgtagattctggactaacagacaacatacattcaccgctggtcacccagatcctcattcaaacccactgctggcacatccctttccttactttgccctgtgctaccagccacggaaggagcctctcttgttttttctataaaatgggtaggcaggagaaaagcaggtgccctaagattgctctaaggcccagcatgtggttacagttctctgacttgcagaacctgccaggtgtatggctacaagttatcctcgtgctgatctgtctcattactaagtcaatggagaagacagaaaggtaaaaatcacgtgtagcaagaacaactcttatttcacaaactcaggtatgaaacgaaacgcctgtccttcatggaactgcttttagctcctgtcttttcaaaatggcagagggagttcctacacacactttttccctggaggccaaggtctaggggtagaaaggggaggggtggggctaccaggtagcagttgacaacccaaggtcagaggagtggccctcagtgtcatctgtccacagtgatacctgccaagatgaccactgacccacatctggtcttagtcattggtctcctcagatttctggggccacctgcaagccccattccattcctacagatctctcagccacctgtaagtcctttgtgaagatgtgggtgacacagggggacaggaaaacccatttctcaacccagatccatgtctccactgcttctactctgggttgggattcaggaagacaggcacagtcctctctgttcatagaaacacctgccagtgtcaaggattccagtcaggtgtctatcccaactggtcagggagagaagggcagacccattctcaaagaccaccatgttcaaggtctgacagctccccactggctgcccccacaggggctttaggctggtctgggtcatggggaagcgtccctcttatcgctggtctgtgttctcctggatttggtatctatgttggtacgactcctggccttttatctaaaggactttggcttttgtaaatcacaagccaataatagacttttttctccccctctgttttttgctgtgtcatctctgccttgagactgccttgagacagtgcttgccctgagagagtgagccaattaacagctgcctgaattgtcattttccattttggtttgttagaggtgggaggggtgggttttgagaaggtcaaaagcaataccagaagtaaagggaaatatcagacaatattttattattttttcatagatgttctgccacacaaagaacttggggtgtaaggataaggcaaaagctccaatcccatttttcagttctcctaggatgcacccctcagggagcctggccagagttccgaggcccgtgagcgtcagctgttgctttattttccatcaaagccctctgagaagtgagacctcagcaattccgggagccacatagagacagacttggcaagggaccccctggttctgagccagtagctgccatctggaaattcctcttttagcctctccttagaggtgaatgtgaatgaagcctcccaggcacccgctgaatttctgaggccttgcttaaagctcagaagtggtttaggcatttggaaaatctggttcacatcataaagaacttgatttgaaatgttttctatagaaacaagtgctaagtgtaccgtattatacttgatgttggtcatttctcagtcctatttctcagttctattattttagaacctagtcagttctttaagattataactggtcctacattaaaataatgcttctcgatgtcagattttacctgtttgctgctgagaacatctctgcctaatttaccaaagccagaccttcagttcaacatgcttccttagcttttcatagttgtctgacatttccatgaaaacaaaggaaccaactttgttttaaccaaactttgtttggttacagttttcaggggagcgtttcttccatgacacacagcaacatcccaaagaaataaacaagtgtgacaaaaaaaaaaaaaaaaa

SEQ ID NO: 2191 - DNA, 1703 bp, Homo Sapiens
acgaggccggccggagcccgggaccctgcgcggggcgctgagctcccgagcgggcagagggcacgggcaggcggacgtcggggcgccctcggggaacgtgcgggcaccatgcgtccccacctgtcgccgccgctgcagcagctactactgccggtgctgctcgcctgcgccgcgcactcgactggagcccttccccgactatgtgacgtgctacaagtgctgtgggaagagcaagaccagtgcctgcaggaactctccagagagcagacaggagacctgggcacggagcagccagtgccaggttgtgaggggatgtgggacaacataagctgctggccctcttctgtgccgggccggatggtggaggtggaatgcccgagattcctccggatgctcaccagcagaaatggttccttgttccgaaactgcacacaggatggctggtcagaaaccttccccaggcctaatctggcctgtggcgttaatgtgaacgactcttccaacgagaagcggcactcctacctgctgaagctgaaagtcatgtacaccgtgggctacagctcctccctggtcatgctcctggtcgcccttggcatcctctgtgctttccggaggctccactgcactcgcaactacatccacatgcacctgttcgtgtccttcatccttcgtgccctgtccaacttcatcaaggacgccgtgctcttctcctcagatgatgtcacctactgcgatccgcacagggcgggctgcaagctggtcatggtgctgttccagtactgcatcatggccaactactcctggctgctggtggaaggcctctaccttcacacactcctcgccatctccttcttctctgaaagaaagtacctccagggatttgtggcattcggatggggttctccagccatttttgttgctttgtgggctattgccagacactttctggaagatgttgggtgctgggacatcaatgccaacgcatccatctggtggatcattcgtggtcctgtgatcctctccatcctgattaatttcatccttttcataaacattctaagaatcctgatgagaaaacttagaacccaagaaacaagaggaaatgaagtcagccattataagcgcctggccaggtccactctcctgctgatccccctctttggcatccactacatcgtcttcgccttctccccagaggacgctatggagatccagctgttttttgaactagcccttggctcattccagggactggtggtggccgtcctctactgcttcctcaatggggaggtgcagctggaggttcagaagaagtggcagcaatggcacctccgtgagttcccactgcaccccgtggcctccttcagcaacagcaccaaggccagccacttggagcagagccagggcacctgcaggaccagcatcatctgagaggctggagcagggtcacccacggacagagaccaagagaggtcctgcgaaggctgggcactgctgtgggacagccagtcttcccagcagacaccctgtgtcctccttcagctgaagatgcccctccccaggccttggactcttccgaagggatgtgaggcactgtggggcaggacaagggcctgggatttggttcgtttgctcttctgggaagagaagttcaggggtcccagaaagggacagggaaataaatggtgcctgggatgagattc

SEQ ID NO: 2192 - DNA, 475 bp, Homo Sapiens
  misc_feature (127)..(128): n is a, c, g, or t
ctccggaaccgatcccgagacatgtctgtggtcaaggggcggtcgaggcaaaagcgaagaagacgctcaggaaacgtggaggcaccttgcttctcacaaaatggcggatgacacaggcggcggcgtnntgtcctcgtcttatataggcaagctggacggccccgcatactccacgatcgacagctccaatagccaattgcaattactatgcttgatgacactaagttgcgaacctctgatcattcctattggcccctgggtgagaggcgggaggcatggggggactgaagtttccagttggccagtgagcgaagaaggcgttggctgtaggcactcatgatttgctaggattacggatgtgagccaccatgccctgcccctctcctcatatttctttgagaatataacagtcatcggagaggaactttccaacccaactggaaaagccatgagcctacttaaatttgccttgtct

SEQ ID NO: 2193 - DNA, 654 bp, Homo Sapiens
ctcggcacgaggcagattcagttgtttgcgggcggccgggagagtagcagtgccttggaccccagctctcctccccctttctctctaaggatggcccagaaggagaactcctacccctggccctacggccgacagacggctccatctggcctgagcaccctgccccagcgagtcctccggaaagagcctgtcaccccatctgcacttgtcctcatgagccgctccaatgtccagcccacagctgcccctggccagaaggtgatggagaatagcagtgggacacccgacatcttaaccaggcggcacttcacaattgatgactttgagattgggcgtcctctgggcaaaggcaagtttggaaacgtgtacttggctcgggagaagaaaagccatttcatcgtggcgctcaaggtcctcttcaagtcccagatagagaaggagggcgtggagcatcagctgcgcagagagatcgaaatccaggcccacctgcaccatcccaacatcctgcgtctctacaactatttttatgaccggaggaggatctacttgattctagagtatgccccccgcggggagctctacaaggagctgcagaagaactgcacatttgacgagcagcgaacagccacgatcatggagggagttggcagatgc

SEQ ID NO: 2194 - DNA, 414 bp, Homo Sapiens
tttcatgatatgatccaacttacatttaatcagttacagaagaaacagacaatgctgaaagaaaaaatcatttaattttccacaattgattaaggataccattgtacaaattcaagaatccaaaaaagtctcaaacaggaaaagaaaaaacctacaaacaaaccacctagtgtgccagtcacgtttctattctcagctgcaagctcatccttgtagtctctactgttctactgtagctgccactctgtaaactacatttcccagattcccttatcagctggcttcctgttagggtctaccaatggaagccactagagggagattagacggcagtagatagcaattgccctagacccagtggttttttgcatgagacaattttatatattaagcccctgagatttagggattatt

SEQ ID NO: 2195 - DNA, 553 bp, Homo Sapiens
agatgatcccacaacatatcttctgtcttttccagtaagtgagatctaaaaaggaaaaaactggtgttctgttagaaccagaagccatctctgtatctgagccgtcatctgactggttactgtaacaaggagattgagctggggaggcacttgaggtggtactgtgagcatcagaattatgacgtttaaattccttctgcagtttactgatctggttgctttttatcctgttcccagatagagttttcactttctttggtttcaatgtagtctttagactgggtccagcccttgcatctaccacatgattccagtttttttttgatcctgctggcaacttcttccatcttttcacaagcaggacacaggcattgcagatgtctcctgaacgagtctcatgcaatccaaaacagctctggaagtcctttccatagcgttaacggtcagtgaatcgggaactgaaggacttagccccgcaaatacagcagccctcaatacttcggtacaccttgggcttgggaaaaccaaacatctttccttctgggcaaaagcc

SEQ ID NO: 2196 - DNA, 756 bp, Homo Sapiens
aagcacaagctgggacgcaatgtgtgtccctctatccctacattgactttgcgggggtggggatggggtgcggggtgagtgagggaggactgcaagtgacaaacaggattcgtcaaaagagaggtgtattaaagtgccgatcaaatgtaatttaacagctaaactttccctccttggaaaacaggtgattgttgagtatttaacgtgaatcgatgtaaacctgtgtttggtgcttagacagggggcccccgggtagagtggaaccccttaagctaagcgaacaggagcctaacaaagcaaatttttccgtctgccctttccccctcttctcgttggcagggttgatcctcattactgtttgctcaaacgtttagaagtgaatttaggtccctccccccaacttatgattttatagccaataggtgatgaggtttatttgcatatttccagtcacataagcagccttggcgtgaaaacagtgtcagactcgattccccctcttcctcctcctcaagggaaagctgcccacttctagctgccctgccatcccctttaaagggcgacttgctcagcgccaaaccgcggctccagccctctccagcctccggctcagccggctcatcagtcggtccgcgccttgcagctcctccagagggacgcgccccgagatggagagcaaagccctgctcgtgctgactctggccgtgtggctccagagtctgaccgcctcccgcggaggggtggccgccgccgacc

SEQ ID NO: 2197 - DNA, 1332 bp, Homo Sapiens
cggactagacctggtcagacacaatgttggcactcttggttctggtgactgtggccctggcatctgctcatcatggtggtgagcactttgaaggcgagaaggtgttccgtgttaacgttgaagatgaaaatcacattaacataatccgcgagttggccagcacgacccagattgacttctggaagccagattctgtcacacaaatcaaacctcacagtacagttgacttccgtgttaaagcagaagatactgtcactgtggagaatgttctaaagcagaatgaactacaatacaaggtactgataagcaacctgagaaatgtggtggaggctcagtttgatagccgggttcgtgcaacaggacacagttatgagaagtacaacaagtgggaaacgatagaggcttggactcaacaagtcgccactgagaatccagccctcatctctcgcagtgttatcggaaccacatttgagggacgcgctatttacctcctgaaggttggcaaagctggacaaaataagcctgccattttcatggactgtggtttccatgccagagagtggatttctcctgcattctgccagtggtttgtaagagaggctgttcgtacctatggacgtgagatccaagtgacagagcttctcgacaagttagacttttatgtcctgcctgtgctcaatattgatggctacatctacacctggaccaagagccgattttggagaaagactcgctccacccatactggatctagcattggcacagaccccaacagaaattttgatgctggttggtgtgaaattggagcctctcgaaacccctgtgatgaaacttactgtggacctgccgcagagtctgaaaaggagaccaaggccctggctgatttcatccgcaacaaactctcttccatcaaggcatatctgacaatccactcgtactcccaaatgatgatctacccttactcatatgcttacaaactcggtgagaacaatgctgagttgaatgccctggctaaagctactgtgaaagaacttgcctcactgcacggcaccaagtacacatatggcccgggagctacaacaatctatcctgctgctgggggctctgacgactgggcttatgaccaaggaatcagatattccttcacctttgaacttcgagatacaggcagatatggctttctccttccagaatcccagatccgggctacctgcgaggagaccttcctggcaatcaagtatgttgccagctacgtcctggaacacctgtactagttgagaaagctgatggccttgtttcaaaattctcatttttcatttcttttctttcttg

SEQ ID NO: 2198 - DNA, 6345 bp, Homo Sapiens
ctctagactcgaggaattcccgcggcctgggcctgcgccgctcagctctctggaaactagcgcctcagctgcgcggcgcgtaggtcgcggggagctccgaaccgccggcgcccggccatggcggtctccaggctagatcgcctttttattttactggatactggcactactcctgttacaagaaaagctgctgcacagcaacttggagaagtggtgaagcttcatccccatgaactaaataatctcctgtctaaagtgttgatatatttaaggagtgcaaattgggatacccggattgcagcaggacaagctgttgaagctatagtgaaaaatgtacctgagtggaatccagtgccgagaaccagacaagaacctacttccgaaagttctatggaagattcacctactacagagcgattgaattttgacagatttgatatatgtagattgttacaacatggtgcatcactcctgggatctgctggtgccgaatttgaagtccaagatgaaaaatcaggtgaagtggatcctaaagagaggatagcacgccaacgaaaattattacagaagaaacttggccttaatatgggagaagcaattggaatgagtactgaagaacttttcaatgatgaggatttggattataccccaacttcagcatcctttgttaacaaacaacctactcttcaggcagctgaattgattgactcagagtttcgagcaggaatgagcaatagacaaaagaacaaagctaaaagaatggccaagttatttgcaaaacagagatccagggatgcagtggaaactaatgagaagagcaatgatagcactgatggggagccagaagaaaagagacggaaaatagcaaatgttgttattaatcagtctgcaaatgattccaaagtcttgattgataatattccagacagctcttccttaattgaagagacaaatgaatggcctttggaaagcttttgtgaagaactttgcaatgacctttttaatccctcctgggaggttcgacatggtgcaggcactggacttagggaaattcttaaagctcatgggaaaagtggtggtaaaatgggtgacagcactttagaagagatgattcagcagcatcaagagtggttggaagacttggttattagactcctttgtgtttttgcattagacagatttggagactttgtttctgatgaagttgtggcaccagttcgtgaaacttgtgctcaaacattaggtgtggttttaaaacacatgaacgaaacaggagttcataagactgtggatgtgctgctaaaattacttacacaagaacaatgggaagttagacatggtggtctgctgggaataaaatatgctttggcagtccgtcaggatgtaattaatactttattgcctaaagttttaactagaataattgaaggactccaggatcttgatgatgatgtcagagctgttgctgcagcatcattagtgcctgtagtagaaagccttgtctatcttcagacacaaaaggtgcccttcattataaatacattgtgggatgctcttctggaattagatgatctaacagcttcaacaaatagtattatgactctcctttcatccttgttaacttaccctcaggtccaacaatgcagtattcagcagtcactgacagttttagttccacgtgtctggccttttttgcatcacactatatcatcagttcgaagagcagcattggaaactctgtttacgttattatcaacacaggaccagaactcttcatcttggcttatacctatactgcctgatatgctccgacacatttttcagttctgtgttttggaaagcagccaggaaattctggaccttattcacaaggtttggatggaactgttgagtaaggcttcagttcagtatgtggtagcagctgcttgcccatggatgggtgcttggctttgcttgatgatgcagccttctcatttacctatcgatttaaatatgttgctagaagtaaaagctagagccaaggaaaaaacaggtggtaaggtgcgccaaggccaaagccagaataaagaagtacttcaggagtatattgcaggtgccgacaccatcatggaagacccagccaccagggattttgtagttatgcgggccagaatgatggcagccaagttgttaggagcactttgttgctgtatttgtgatccaggtgtaaatgtggtaactcaagaaattaaaccagctgaatccctgggccagttactactcttccatttgaactccaagtctgctttacagaggattagtgtagctttggtaatctgtgaatgggctgctttacaaaaggagtgtaaagctgttaccttagctgtgcagccgcgtttacttgatatcctttcagaacatttatattatgacgaaattgccgttccattcacacgaatgcagaatgaatgtaaacaacttatatcatcattagctgatgtacatattgaagttggtaatcgagtaaacaacaatgttttaacaatagatcaagctagtgacttggtcactactgtttttaatgaagccacatcatctttcgatttaaatcctcaagtgttacaacagttagatagtaaacgacagcaggtccaaatgacagttacagagaccaaccaggagtggcaagtgttgcagttgagagtgcatacttttgctgcctgtgcagttgtgagcttgcagcagcttccggagaaattaaatcctatcataaaaccattaatggagacaattaaaaaagaagagaatacactagtgcaaaactatgcagctcagtgcatagctaaactccttcagcagtgcacaacaaggacgccctgtcccaattcaaaaattattaaaaacctctgtagctcactttgtgtggacccatatctaactccttgtgtcacatgtccagtaccaacacaaagtggccaggaaaattctaaaggatccacctcagaaaaagatggaatgcaccatactgtcaccaagcacagaggtataattacactctacaggcaccagaaagctgcctttgctatcacaagtaggcgaggtcctacccccaaagcagtaaaagctcaaatagcagatcttcctgcaggaagtagtggaaatattcttgttgaacttgatgaggcccagaagccttacctggtacaacggagaggagctgaatttgctttgacaactatagtaaagcattttggtggtgaaatggcagtgaagttgccacatctctgggatgctatggttggcccattgaggaatacaatcgacataaataattttgatggaaaatccctcctggataagggagatagccctgctcaagaattggtgaattctctgcaggtttttgaaacagcagcagcttcaatggattctgagcttcatcccttgttggtccagcatttgccacatctttatatgtgccttcaataccccagtactgcagtgaggcacatggctgctcgttgtgtaggtgtcatgagcaaaatagctaccatggaaacaatgaatatttttttggagaaggttcttccgtggctgggagcaattgatgacagtgtcaaacaagagggtgcaattgaagcacttgcctgtgtaatggaacaactagatgttggtattgttccatatattgtccttttagttgttcctgtattaggaagaatgagtgatcagacagacagtgtgagattcatggccacgcagtgctttgcaacgctaattagactcatgccacttgaggcaggcattccagaccctccaaacatgtcagcagaattaatccaattgaaagccaaggagcgacactttttggagcaattgttagatgggaaaaaattggaaaattataaaattccagtaccaatcaatgctgaactcagaaaatatcagcaggatggtgtgaactggttagcatttcttaataagtataaacttcatggaattctgtgtgatgacatgggtttaggaaaaactttacagtccatctgcattctagcaggagatcattgtcatagggcccaggaatatgcaagatcaaaattagcagaatgtatgccacttccttccttagtggtttgtccgccaacattaacaggccattgggtggatgaagtaggtaaattttgctctagagaatatctcaacccgttgcattacactggacctcccactgaaagaataaggttacagcaccaagtaaaaaggcacaatctaatagtggcttcatatgatgttgtgaggaatgacatagatttctttagaaatattaaatttaactactgcattcttgatgaaggccatgtcatcaaaaatggaaaaacaaagttgtcaaaagcagtaaaacaactgactgctaattataggattattctttctggaacaccaatccagaacaacgttttggagctgtggtcattatttgatttcctcatgccaggatttttgggtactgaacgccagtttgctgctcgatatggtaaacctatattagcaagtagggatgctcgaagctccagtcgagagcaagaagcaggtgttcttgctatggatgcgctgcaccgccaagtactaccgtttcttttgagaagaatgaaagaagatgttttgcaggatcttccacctaaaattattcaagactattattgtactcttagtcctctccaggttcagctctatgaagattttgctaagtctcgtgccaagtgtgatgttgatgaaacagtttcttcagctacactttctgaagaaactgaaaaaccaaagcttaaagctacaggccacgtattccaggcattacagtacttacgtaaactgtgcaaccatccagcattagtcttaacacctcaacatccagaattcaagaccactgccgaaaaactggcagttcagaattcttctctacatgatattcaacatgcccctaagctctcagctttgaaacaattgctgttggactgcggtttgggaaatggcagcacttccgagagtggcacagagtctgttgtggcccagcacaggatactgatattctgtcagctgaaaagcatgcttgatatagtagagcatgatctcctcaaacctcacttgccctctgtcacttatttgagattagatggcagcatacctcctggtcagaggcattccattgtttcccggtttaataatgatccatctatagacgttctgttacttaccactcacgttggtggcctgggacttaatttgacaggcgctgacacagtagtatttgtggagcatgactggaatcctatgcgagatctacaagccatggaccgggcccatcgcattgggcagaaacgtgtggttaacgtataccgattgataaccagaggaacattggaagaaaaaataatggggttgcagaaattcaagatgaacatagcgaatactgttattagccaagagaattctagtttgcagagcatggggactgatcagcttcttgatctgtttactcttgataaggatggcaaagcagaaaaagctgacacctctacttctgggaaagcaagtatgaaatcaattcttgaaaacctgagtgatctttgggatcaagagcagtatgattcagagtacagcctggaaaattttatgcattctctcaagtaactatcaaatattgtaaatgcaattgctgctagttcagttacatttctgctgatattcagcaaatttctaagtttatggtgaacttttaactcaatgtgtaaatagatctggagaatattcagcataatgctggctcttgtttcactgggggaaacaagttattctcaaatatttgcactgtattaaatttaaatgttaatgtgaaatggtttaaattttacatgctgaaaagctgcagagcagaggaaccaaaccaggtttatttgtgctaccaggaggtgttcttaatgggaacaggcctcctatctttagtcactttgtacaggatgatatccatgagtactttagtgtttgtatatgttttttcttttaaatagaacttgtttttataattgatttaaaatagggctttttttctataaaagccttaatgagccataattttaagaatataagaataatgactatgatattggtcagtcttagaacatgaaaatgtcagacaatgaatttaatcgggcccttggtggaaacatttatatatttaatgcagatgcatagtgtttttcaaatctttaacatcattttttcaacttttaactataatatcaactattctaaatacaggtaatggtatatttaaggctaccataacatcctatttagagggtggttttt

SEQ ID NO: 2199 - DNA, 202 bp, Homo Sapiens
tttttttttttttttttttttttttaaggagcaaaaggctttattgataaatatgcagatatgtctgtccacagggacctgctgtggaggccatgaccaggctgcagacctcccactgcctgggttacagccaggacatggccctgtgcagaccctgccacgacagcccagccgtccaccacccgcctcatctctgccaatt

SEQ ID NO: 2200 - DNA, 581 bp, Homo Sapiens
cacgagggaactgttgacgaaacagtttaataatagtcaggcagcttgtgagtggtttttagatcgtatggctgatgacgactggtggccaatgcagatactaattaagtgccctaatcaaattgtgagacagatgtttcagcgtttgtgtatccatgtgattcagaggctgagacctgtgcatgctcatctctatttgcagccaggaatggaagatgggtcagatgatatggatacctcagtagaagatattggtggtcgttcatgtgtcactcgctttgtgagaaccctgttattaattatggaacatggtgtaaaacctcacagtaaacatcttacagagtattttgccttcctttacgaatttgcaaaaatgggtgaagaagagagccaatttttgctttcattgcaagctatatctacaatggtacatttttacatgggaacaaaaggacctgaaaatcctcaagttgaagtgttatcagaggaagaaggggaagaagaagaggaggaagaagatatcctctctctggcagaagaaaaatacaggccagctgcccttgaaaagatgatagctttag

SEQ ID NO: 2201 - DNA, 239 bp, Homo Sapiens
tacaaactagagaacatcttgagacaaggtgttcagggaagagttcttttgagaaggtgatattaaagcgagtttggggaagaacgtcccaggccttgcgctcagggtcgtcaactctttgatttctcttccttttgaagcagggcagggaggtcatcaaacaacagaaggacaattataactgctggtatggcaaagccaggactctgaattcaaactctgctccattctcaggaatc

SEQ ID NO: 2202 - DNA, 421 bp, Homo Sapiens
ttcaatggatactcgtatacttcctatatggtcttagtttacttttcctcctttttgtcttcttgagggtattgagatttctcttccttttcttccttctttgtttcttcttcggacacttttgccacatctactgacaccacggtttgatcctcttccacccagtcatgagccctcttcatggccttattgagtttgtcaggtgtggccgccacatgcaattcaaagagaagctctgtaagcatgcgagcaaattcttctcccttttcttctaagccttgtacttcttgattttcttcattctctaattctttggctgcaaagatgtctttaatggaaatcaggtcatttcttaagagttccagcttctctccatcaagtgatgctaaaaatgactgaaccttgctttcgatttcattgg

SEQ ID NO: 2203 - DNA, 413 bp, Homo Sapiens
tttaagaactgaaggtttaccatcttgatgtaggccttgcgtgcctgaagagcactcgggctcatgtgtttcattcactcacatgttaaatatgaagccctatgtacaacatagcctgtgggaactgtggcaggggtagctgtctccatcctccagaaccttgtcacaatcaagaataggaaatgagacgcacaaatcactaccacctgtcgaagtggccttgcagtgctaaatctaagtgctgaggcaatttgcctgcagtccttgccacttcttgttgattagtccagcagcccccagctgggaggcaattctgttcaccctcactcccacctcaggacatctggcaatgtctggaaacagttggttgtcaccacttggggaaaggggagtgtgcttttggcaggtagagg

SEQ ID NO: 2204 - DNA, 361 bp, Homo Sapiens
tttataatgagtatgtatttattttctaggtttcttacttccagtcatgacaaaataatggtcatcatcttcctttttctttgcagtaggttttttatctccactatctgcatccttaacagatgagggtggtttcctgattgaagctggggttttgccacttctgggaggccctttagttgaatgctggctcttagcgacagtctgtgctgacttcggtgcagtttgtgttttggtagaagactggggtaggctcacgatggacagtggggtacggccaggagacttcaaggagctgggtcctgtcttctgaaatgcacttttattctgaggctgctttttggtagctgaaactatattc

SEQ ID NO: 2205 - DNA, 432 bp, Homo Sapiens
gtttaagagttttgtattatgtcatacaaactgtcttcacatacaagtgcattaaaaaaattatccccccctcctcctccccaaacatcacagtagaccaattcttgctaatatatgacaaagttaaaacatatgtcccctctgaattctaaacagctaattctagacactaacatctggatcttataatttaccggtctggtatggacatgaacagttccagtgcctttcaacttatccctgaatttttctcttctcaaagttctaggcagtaattttaatgccctcaaattagataaagctgattacttagagcttataaattagctacactttatgacactaagaatagagctatgacttatgcatatcatacctgtcaagctacctagcaccacgaataggactaatattaatggatggactaataca

SEQ ID NO: 2206 - DNA, 5769 bp, Homo Sapiens
  misc_feature (5512)..(5517): n is a, c, g, or t
gagctctccatgcacacctgttactgtttctgtttttacctgtaaatatctgtctctgacttccatgtctcatgcacctctatagggcaaagactgtgtcttaaacatcacggtagcctcagcatgttgtgcaatcaaggtttttttgtttttgttctttgttttttttttggtattagctttatttgtatcattttgaaatttttatcaaaaaagcagcgtgcctgctgtggttcccatcctctgggatttaggaatctttacccgattctccatccaagtctgtctttcgtattctaggctcttcctaaagttgtcattcacatataccctccagaattttatagggtgtataatctgtaacaactcggaggaagccaattgccctttagaaatatggctgcaattgcctcacttcctgtgtcatgtgactctcctagtcatcacatgacccatccacattgggaagccagaattacttgcaggagtaacctagtgcctatagctatggcaggtacctgcatccttgtttttgtttagtggatcctctatccttcagagactctggaacccctgtgctcttctcctcatctagtgaccctgaggtgatggagttttcaagtccttccagagaggtaagagagagagctcccaatcagcattgtcacagtgcttctggaatcctggcactggaatttaatgaatgacagactctctttgaatccagggccatcatggctctttgagcaaggcacagatggaggggagggtcgaagttgaaatgggtgggaagagtggtggggagcatcctgatttggggtgggcagagagttgtcatcagaagggttgcagggagagctgcacccaggtgtctgtgggccttgtcctaatgaatgtgggagaccaggccatgggcacccaaaggcagctaagccctgcccgggagagtagttgaggggtggagagggacttgcttttcagtcattcctcattctgtcctcaggaatgtcccaagccttcgggtagggtaagcatcatggctggcagcctcacaggattgcttctacttcaggcagtgtcgtgggcatcagatgagtgagtcaaggcagtggggaggtagcacagagcctcccttctgcctcatagtcctttggtagccttccagtaagctggtggtagacttttagtaggtgctcaataaatccttttgagtgactgagaccaactttggggtgaggatttttgaaaccgtcttcagtctctccaaacagctgtgtccgttctccacatccttgtcagacctcacctctgcttgtgctccctccctcccaggtggtgcccctgcatccctaaaagcttcagtacagctcggtggtctgtgtctgcaatgccacatactgtgactcttgaccccccgacctttcctgccctaggtgccttcagccgctacaagagcagaagcagtgggcattggatggagctgagtacaggaccatacaggctaattgcaccggcacaggtaaccattacacccttcaccccccgggccaggctgggtcctcctagaggtaaacggtgtcagtgatcaccatggagtttctccctgggcactgataaccctgtggatgtcctcaggcctgctactgatcctgcagccagaagttccagaaagtgaagggatttggaggggccgtgacagatgcaggtgccctcaacatccttgccctgtcaccccctgcccagaatttgctacttaaatggtacttctctgaagaagatgaggaggaaggggacaggatgacatagagccactgacacttttctttgccaattctttggaccctgacttctgcccatccctgacatttggttcctgtcttaatgccagtgaaataagatttcgccgcctatcatctgctaactgctacggactcaggctcagaaaggcctgcgcttcacccaggtgccagcctccacaggttccaacccaggagcccaagttccttttggccctgactcagacactattaggactggcaagtgataagcagagtcccatactctcctattgactcggactaccatatcttgatcatccttttctgtaggaatcggatataacatcatctgggtacccatggccagctgtgacttctccatccgcacctacacctatgcagacacccctgatgatttccagttgcacaacttcagcctcccagaggaagataccaagctcaaggtaggcattctagctttttcaggccctgagggccctgatgtctgggggttgagaaactgtagggtaggtctgcttgtacagacattttgtcccctgctgttttgtcctgggggtgggagggtgggggctaatggctgaaccggatgcactggttgggctagtatgtgttccaactctgggtgcttctctcttcactacctttgtctctagatacccctgattcaccgagccctgcagttggcccagcgtcccgtttcactccttgccagcccctggacatcacccacttggctcaagaccaggggagcggggaatgggaaggggccactcaagggacagcccagagacatctaccaccagacctgggccagatacattgtgaagtaagggatcaacaaggatgtgggatcaggactggcctcccctttggccatgctgatctgtgtcccaaccctcaacctggttccacttccagatctgcctgtcctcagctcacctttctaccttctgggcctttcaaccttgggcctgtcagtcttgcccactccatcaggcttcctgttctctcggtctggcccactttcttggctggatcattcatgacctttctcttgccaggttcctggatgcctatgctgagcacaagttacagttctgggcagtgacaggtgaaaatgagccttctgctgggctgttgagtggataccccttccagtgcctgggcttcacccctgaacatcagcgagacttcattgcccgtgacctaggtcctacccttgccaacggtactcaccacaatgtccgcctactcatgctggatgaccaacgcttgctgctgccccactgggcaaaggtggtaaggcctggacctccatggtgctccagtgaccttcaaatccagcatccaaatgattggctcccaaacttagagggatttttctacccaactatggatccctagagcaccattccccgggacctccagggtgccatggatcccacagttgggacttgaaacctctctagggctgggggtggtagctcatggctataattccagcactttgggaaccaaggtgggtggatcacttgaacctaaggagttcaagatgagcctgggaaacatggtgaaaccctaactctacaaaaaaaaaaatagaaaagttagccgggtgtggtggtggcacgctatagtcccagtattctggaggctaaggcgggaggtttagttgagcctaggaatttcaggctgcagtgagctatgattgtgccactgtactccagcctgtgtgacagagggagaccctgtctcaaaaacaaaaacaaaaaatccctcccaaaacctctgtagttgcattcttcccaccacctaattcaggattcctacaagaggaactagaagttccagaagcctgtgggcagggtccagggtgacttgttcttcctttgcaggtactgacagacccagaagcagctaagtatgttcatggtattgctgtacattggtacctggactttctggctccagccaaagccaccctaagggagacacaccacctgttccccaacaccatgctctttgcctcagaggcctgtgtgggttccaagttctgggagcagagtgtgcggctaggctcctgggatcgagggatgcagtacagccacagcatcatcacagtaagccaccccagtctcccttcctgcaaaggagacctcagacccattagtagtctcaccaaagactgatagaagcccttcctgtccagctttccccaggtagcctgcccttttgcgcaactctggggaaccatgattccctgtcttgcctttccttcacaggtctgcacacctcattgccccttttgcaactactgaggcacttgcagctgcctcagacttctcagctccccttgagatgcctggatcttcacacccccaactccttagctactaaggaatgtgccctcacagggctgacctacccacagctgcctctcccacatgtgacccttacctacactctctggggacccccagtgttgagcctttgtctctttgcctttgtccttaccctagaacctcctgtaccatgtggtcggctggaccgactggaacccatcattgtagacatcaccaagcacacgttttacaaacagcccatgttctaccaccttggccacttcaggtgagtggagggcgggcacccccattccataccaggcctatcatctcctacatcggatggcttacatcactctacaccacgagggagcaggaaggtgttcagggtggaacctcggaagaggcacacccatccccttttgcaccatggaggcaggaagtgactaggtagcaacagaaaaccccaatgcctgaggctggactgcgatgcagaaaagcagggtcagtgcccagcagcatggctccaggcctagagagccagggcagagcctttgcaggagttatggggtgggtccgtgggtgggcgacttcttagatgagggtttcatgggaggtaccccgagggactctgaccatctgttcccacattcagcaagttcattcctgagggctcccagagagtggggctggttgccagtcagaagaacgacccggacgcagtggcactgatgcatcccgatggctctcctgttgtggtcgtcctaaaccggtgagggcaatggtgaggtctgggaagtgggctgaagacagcgttgggggccttggcaggatcacactctcagcttctcctccctgctccctagctcctctaaggatgtgcctcttaccatcaaggatcctgctgtgggcttcctggagacaatctcacctggctactccattcacacctacctgtggcgtcgccagtgatggagcagatactcaaggaggcactgggctcagcctgggcattaaagggacagagtcagctcacacgctgtctgtgactaaagagggcacaacagggccagtgtgagcttacagcgacgtaagcccaggggcaatggtttgggtgactcactttcccctctaggtggtgcccagggctggaggcccctagaaaaagatcagtaagccccagtgtccccccagcccccatgcttatgtgaacatgcgctgtgtgctgcttgctttggaaactggcctgggtccaggcctagggtgagctcactgtccgtacaaacacaagatcagggctgagggtaaggaaaagaagagactaggaaagctgggcccaaaactggagactgtttgtctttcctggagatnnnnnnctgggcccgtggagcagcagtgtcagcatcagggcggaagccttaaagcagcagcgggtgtgcccaggcacccagatgattcctatggcaccagccaggaaaaatggcagctcttaaaggagaaaatgtttgagcccagtcagtgtgagtggctttattctgggtggcagcacccgtgtccggctgtaccaacaacgaggagcacgggggcctctggaagtcatgagagtagaaaaaccagtcttggggagt

SEQ ID NO: 2207 - DNA, 463 bp, Homo Sapiens
ttttgcggctccacgtcggcaccagctgcggggcaagatggaggcgctgattttggaaccttccctgtatactgtcaaagccatcctgattctggacaatgatggagatcgactttttgccaagtactatgacgacacctaccccagtgtcaaggagcaaaaggcctttgagaagaacattttcaacaagacccatcggactgacagttaaattgccctcttggaaggcctgacagtggtatacaaaagcagtatagatctctatttctatgtgattggcagctcctatgaaaatgagctgatgcttatggctgttctgaactgtctcttcgactcattgagccagatgctgaggaaaaatgtagaaaagcgagcactgctggagaacatggaggggctgttctttgctgtggatgaaattgtagatgggagggtgatcctagagagtgatccccagcaggtg

SEQ ID NO: 2208 - DNA, 4877 bp, Homo Sapiens
actgttgggagaggaatcgtatctccatatttcttctttcagccccaatccaagggttgtagctggaactttccatcagttcttcctttctttttcctctctaagcctttgccttgctctgtcacagtgaagtcagccagagcagggctgttaaactctgtgaaatttgtcataagggtgtcaggtatttcttactggcttccaaagaaacatagataaagaaatctttcctgtggcttcccttggcaggctgcattcagaaggtctctcagttgaagaaagagcttggaggacaacagcacaacaggagagtaaaagatgccccagggctgaggcctccgctcaggcagccgcatctggggtcaatcatactcaccttgcccgggccatgctccagcaaaatcaagctgttttcttttgaaagttcaaactcatcaagattatgctgctcactcttatcattctgttgccagtagtttcaaaatttagttttgttagtctctcagcaccgcagcactggagctgtcctgaaggtactctcgcaggaaatgggaattctacttgtgtgggtcctgcacccttcttaattttctcccatggaaatagtatctttaggattgacacagaaggaaccaattatgagcaattggtggtggatgctggtgtctcagtgatcatggattttcattataatgagaaaagaatctattgggtggatttagaaagacaacttttgcaaagagtttttctgaatgggtcaaggcaagagagagtatgtaatatagagaaaaatgtttctggaatggcaataaattggataaatgaagaagttatttggtcaaatcaacaggaaggaatcattacagtaacagatatgaaaggaaataattcccacattcttttaagtgctttaaaatatcctgcaaatgtagcagttgatccagtagaaaggtttatattttggtcttcagaggtggctggaagcctttatagagcagatctcgatggtgtgggagtgaaggctctgttggagacatcagagaaaataacagctgtgtcattggatgtgcttgataagcggctgttttggattcagtacaacagagaaggaagcaattctcttatttgctcctgtgattatgatggaggttctgtccacattagtaaacatccaacacagcataatttgtttgcaatgtccctttttggtgaccgtatcttctattcaacatggaaaatgaagacaatttggatagccaacaaacacactggaaaggacatggttagaattaacctccattcatcatttgtaccacttggtgaactgaaagtagtgcatccacttgcacaacccaaggcagaagatgacacttgggagcctgagcagaaactttgcaaattgaggaaaggaaactgcagcagcactgtgtgtgggcaagacctccagtcacacttgtgcatgtgtgcagagggatacgccctaagtcgagaccggaagtactgtgaagatgttaatgaatgtgctttttggaatcatggctgtactcttgggtgtaaaaacacccctggatcctattactgcacgtgccctgtaggatttgttctgcttcctgatgggaaacgatgtcatcaacttgtttcctgtccacgcaatgtgtctgaatgcagccatgactgtgttctgacatcagaaggtcccttatgtttctgtcctgaaggctcagtgcttgagagagatgggaaaacatgtagcggttgttcctcacccgataatggtggatgtagccagctctgcgttcctcttagcccagtatcctgggaatgtgattgctttcctgggtatgacctacaactggatgaaaaaagctgtgcagcttcaggaccacaaccatttttgctgtttgccaattctcaagatattcgacacatgcattttgatggaacagactatggaactctgctcagccagcagatgggaatggtttatgccctagatcatgaccctgtggaaaataagatatactttgcccatacagccctgaagtggatagagagagctaatatggatggttcccagcgagaaaggcttattgaggaaggagtagatgtgccagaaggtcttgctgtggactggattggccgtagattctattggacagacagagggaaatctctgattggaaggagtgatttaaatgggaaacgttccaaaataatcactaaggagaacatctctcaaccacgaggaattgctgttcatccaatggccaagagattattctggactgatacagggattaatccacgaattgaaagttcttccctccaaggccttggccgtctggttatagccagctctgatctaatctggcccagtggaataacgattgacttcttaactgacaagttgtactggtgcgatgccaagcagtctgtgattgaaatggccaatctggatggttcaaaacgccgaagacttacccagaatgatgtaggtcacccatttgctgtagcagtgtttgaggattatgtgtggttctcagattgggctatgccatcagtaataagagtaaacaagaggactggcaaagatagagtacgtctccaaggcagcatgctgaagccctcatcactggttgtggttcatccattggcaaaaccaggagcagatccctgcttatatcaaaacggaggctgtgaacatatttgcaaaaagaggcttggaactgcttggtgttcgtgtcgtgaaggttttatgaaagcctcagatgggaaaacgtgtctggctctggatggtcatcagctgttggcaggtggtgaagttgatctaaagaaccaagtaacaccattggacatcttgtccaagactagagtgtcagaagataacattacagaatctcaacacatgctagtggctgaaatcatggtgtcagatcaagatgactgtgctcctgtgggatgcagcatgtatgctcggtgtatttcagagggagaggatgccacatgtcagtgtttgaaaggatttgctggggatggaaaactatgttctgatatagatgaatgtgagatgggtgtcccagtgtgcccccctgcctcctccaagtgcatcaacaccgaaggtggttatgtctgccggtgctcagaaggctaccaaggagatgggattcactgtcttgatattgatgagtgccaactgggggtgcacagctgtggagagaatgccagctgcacaaatacagagggaggctatacctgcatgtgtgctggacgcctgtctgaaccaggactgatttgccctgactctactccaccccctcacctcagggaagatgaccaccactattccgtaagaaatagtgactctgaatgtcccctgtcccacgatgggtactgcctccatgatggtgtgtgcatgtatattgaagcattggacaagtatgcatgcaactgtgttgttggctacatcggggagcgatgtcagtaccgagacctgaagtggtgggaactgcgccacgctggccacgggcagcagcagaaggtcatcgtggtggctgtctgcgtggtggtgcttgtcatgctgctcctcctgagcctgtggggggcccactactacaggactcagaagctgctatcgaaaaacccaaagaatccttatgaggagtcgagcagagatgtgaggagtcgcaggcctgctgacactgaggatgggatgtcctcttgccctcaaccttggtttgtggttataaaagaacaccaagacctcaagaatgggggtcaaccagtggctggtgaggatggccaggcagcagatgggtcaatgcaaccaacttcatggaggcaggagccccagttatgtggaatgggcacagagcaaggctgctggattccagtatccagtgataagggctcctgtccccaggtaatggagcgaagctttcatatgccctcctatgggacacagacccttgaagggggtgtcgagaagccccattctctcctatcagctaacccattatggcaacaaagggccctggacccaccacaccaaatggagctgactcagtgaaaactggaattaaaaggaaagtcaagaagaatgaactatgtcgatgcacagtatcttttctttcaaaagtagagcaaaactataggttttggttccacaatctctacgactaatcacctactcaatgcctggagacagatacgtagttgtgcttttgtttgctcttttaagcagtctcactgcagtcttatttccaagtaagagtactgggagaatcactaggtaacttattagaaacccaaattgggacaacagtgctttgtaaattgtgttgtcttcagcagtcaatacaaatagatttttgtttttgttgttcctgcagccccagaagaaattaggggttaaagcagacagtcacactggtttggtcagttacaaagtaatttctttgatctggacagaacatttatatcagtttcatgaaatgattggaatattacaataccgttaagatacagtgtaggcatttaactcctcattggcgtggtccatgctgatgattttgccaaaatgagttgtgatgaatcaatgaaaaatgtaatttagaaactgatttcttcagaattagatggccttattttttaaaatatttgaatgaaaacattttatttttaaaatattacacaggaggccttcggagtttcttagtcattactgtccttttcccctacagaattttccctcttggtgtgattgcacagaatttgtatgtattttcagttacaagattgtaagtaaattgcctgatttgttttcattatagacaacgatgaatttcttctaattatttaaataaaatcaccaaaaacat

SEQ ID NO: 2209 - DNA, 440 bp, Homo Sapiens
ggaggtccccaggagctctgtactgaggcagacacagaaagacacaaaacggtcgtctttcctgcccaagtaaagcttacagactaactggggagatgtagtgtgcatacaaaacagtaaaagagccatctcaaggacagagagcatagaccaagtcatctggaatggtctaaatgccatgcggaagtccaccgaaggttagaacagggtgtcccagactctctcttctgagggaaggttggttgcaaagtgggattcatgaccctcccaggctacaccatcttctttagaatgagaactgccaggtgacgccctcgctgctcctacctggctactaaacatcgacttcggttcacttcacggatgttcagtggatatcggtcacatgccaggtccccagctacgcattcaaggatggataatatacatagcagcacatc

SEQ ID NO: 2210 - DNA, 4681 bp, Homo Sapiens
ctccttccataagggtctggtccttcatccctcccgcttcaccagaccccctcaccctgggagccgccacctccctttccccaagaccagatgtcgcgcggccggacacagccagcacggagagtcgatgccggcgtctgagctgcgcagtggggtcttcccgctgcccagcagcctacaggcgcggtgcactctgggggaacatggccgcttccggtctccctcccgggccggcgctggcctgactgcggccccggtccgtagcactccgccctccgcttctcccgccctgtagccgcgaagactgcttcagcctttccctgtgctgcccctgccgcgcgatggagacgagctcgagctgcgagagtcttggctcccagccggcggcggctcggccgcccagcgtggactccttgtccagtgcctccacttctcattcagagaattcagtgcatacaaaatcagcttctgttgtatcatcagattccatttcaacttctgccgacaacttttctcctgatttgagggtcctgagggagtctaacaagttagcagaaatggaagaaccacccttgcttccaggagaaaatattaaagacatggccaaagatgtaacttatatatgtccattcactggcgctgtacgaggaactctgactgtcacgaattataggttatatttcaaaagcatggaacgggatcccccatttgttttagatgcttcccttggtgtgataaatagagtagaaaaaattggtggtgcttctagtcgaggtgaaaattcttatggactagaaactgtgtgtaaggatattaggaatttacgatttgctcataaacctgaggggcggacaagaagatccatatttgagaatctaatgaaatatgcatttcctgtctctaataacctgcctctttttgcttttgaatacaaagaagtattccctgaaaatgggtggaagctatatgaccctcttttagagtatagaaggcagggaattccaaatgaaagctggagaataacaaagataaatgaacgatatgaactttgtgatacataccctgccctcctggttgtgccagcaaatattcctgatgaagaattaaagagagtggcatccttcagatcaagaggccgtatcccagttttatcatggattcatcctgaaagtcaagccacaatcactcggtgtagccagcccatggttggagtgagtggaaagcgaagcaaagaagatgaaaaataccttcaagctatcatggattccaatgcccagtctcacaaaatctttatatttgatgcccggccaagtgttaatgctgttgccaacaaggcaaagggtggaggttatgaaagtgaagatgcctatcaaaatgctgaactagttttcctggatatccacaatattcatgttatgagagaatcattacgaaaacttaaggagattgtgtaccccaacattgaggaaactcactggttgtctaacttggaatctactcattggctagaacatattaagcttattcttgcaggggctcttaggattgctgacaaggtagagtcagggaagacgtctgtggtagtgcattgcagtgatggttgggatcgcacagctcagctcacttcccttgccatgctcatgttggatggatactatcgaaccatccgaggatttgaagtccttgtggagaaagaatggctaagttttggacatcgatttcaactaagagttggccatggagataagaaccatgcagatgcagacagatcgcctgtttttcttcaatttattgactgtgtctggcagatgacaagacagtttcctaccgcatttgaattcaatgagtattttctcattaccattttggaccacctatacagctgcttattcggaacattcctctgtaatagtgaacaacagagaggaaaagagaatcttcctaaaaggactgtgtcactgtggtcttacataaacagccagctggaagacttcactaatcctctctatgggagctattccaatcatgtcctttatccagtagccagcatgcgccacctagagctctgggtgggatattacataaggtggaatccacggatgaaaccacaggaacctattcacaacagatacaaagaacttcttgctaaacgagcagagcttcagaaaaaagtagaggaactacagagagagatttctaaccgatcaacctcatcctcagagagagccagctctcctgcacagtgtgtcactcctgtccaaactgttgtataaaggactgtaagatcaggggcatcattgctatacactcttgattacactggcagctctatgagtagaaagtcttcggaatttagaacccatctatgagagaaagttcagtcactttatttattttaaatctctctaggatgagtttagaactgtagcagtgcaggtggcttaagtgaagtaactccatatgtaattacatgattatgatactaatcttttaagtatccaaagaatattaaaatacttcaatcctggattcacagtgggaacaagtttctattaaaaggcaaatgctgttacaaatttttggcatctggtaatattaaaaccattttagaaatacactctgtgctcactgtgcagaggaacatcagttttcaaaccaacactgaaattctgtggcatcacatatattgggccttgatgtcatgacagatcaaaatcatttgatatccctttctccattctaggtttttctttttttcagtaactgatttaccttgatcacttttcaacttccatattcttcatatagtaaaaggcaaagtattgaagatactacggtgtggtagtagttgaaaattattgccgtcattatttacatacttaagacatattagcaagttgatccaaaatgggaggccttatagatgtgcttgggggaaaatgaaggggagaaagtagccatacaggagttcaaagaattccatgcccttcagattagcccaattaccagaaacatcatgaaagatattttaaaaactaattatttactacagtgtatttcacttgtcttgtgtgtctgaacacacagaagctaattagcaagtttttaagaagtatttaaaaatcttactaggattgacattttttctgaattctgtataaatagcttatagtgagaagtactgtgctcaaattttacatttttttcctttgcaaattctgtaatttcactcaacgattaagtctaccaaagaacacactgcatgtaaaagatgtattacaatctcaaagccagtaaaagaaatcttgcttcactgttcacctgctacaagtaagagtttggtgctggtagaaacatttgactctgatgtctattttattctacataagagccatatgtaatgtactgtaacaaaggagcttcttgtccccttggtcttttaattaaaagaaattccaactgacttttaaactttgttcttgtccaaagttgccatttcttttttttccccagaaatatttggaaattattggaggaatatgcaccccagatgaaaatgttcagtttgtacccatttttccttaaccaacacccaaatcaaacaattaaaatatacagtgtttttccactcactaattcactatacagagagtctgaaccttagcctccctcttggtcttgcagtgaggaaatttctattagtatatccaatttagcaaaattggtaccaaaatgatttctttggtaattgtgtgaaatataagctttttaacagggcatttaagtggctagcaaatcagtaattaaaaattaagctttctactccaagtatttcacaaatgcatctgccattttcctcatttaaaccttggttatcttggcctgataccacataaaagaatgtagaatggctgaagagatcaagaatttaaagcttctagtcttaacatacttgcatccacttcaaattcaaatcaaaagccagggaaatctaagtgcaaccctaccacttctctgctgagaaccttccagtggttcccctcaccttctgcagaagtctccaatatggagtacatgcacttgggcatttaatatataccactggtgtgtgtgggagggagggaggaggaatactagccctttttatatatttacacaagcaaaacttttaaatatttgaattgacagttacatgtttcataacttcgtatgtctattggttgtgcaggtgtaattttttccctttttgattagggttacaaaatttagagaccagtatgattaagttgaagctccttagcctccttcgacctagtctctgcatacctcaacttttacgtaccaatgctactctgctgttcacaattgcctcatgtaatctgcagattcctgcctccccactttggttcagtctgtcttgtgcacctggaacaactgttctcccttgtgactaattcctattttctagagtttaggcatcatctcttcctttgggaagttatctgattcacgactgccttctctgacatccccaccttcctctgtgcccccatagcactgtgtataccgctactaccactgcaattcacattatattggaatgaacaattcacatgtctaccacaagtctgtaaacataaccttatttgaaatgaattgcaataaagctctgttacaacgt

SEQ ID NO: 2211 - DNA, 660 bp, Homo Sapiens
aaaaaacagcccggagcctgcagcccagccccacccagacccatggctggacctgccacccagagccccatgaagctgatggccctgcagctgctgctgtggcacagtgcactctggacagtgcaggaagccacccccctgggccctgccagctccctgccccagagcttcctgctcaagtgcttagagcaagtgaggaagatccagggcgatggcgcagcgctccaggagaagctgtgtgccacctacaagctgtgccaccccgaggagctggtgctgctcggacactctctgggcatcccctgggctcccctgagcagctgccccagccaggccctgcagctggcaggctgcttgagccaactccatagcggccttttcctctaccaggggctcctgcaggccctggaagggatctcccccgagttgggtcccaccttggacacactgcagctggacgtcgccgactttgccaccaccatctggcagcagatggaagaactgggaatggcccctgccctgcagcccacccagggtgccatgccggccttcgcctctgctttccagcgccgggcaggaggggtcctagttgcctcccatctgcagagcttcctggaggtgtcgtaccgcgttctacgccaccttgcccagccctgagcc

SEQ ID NO: 2212 - DNA, 362 bp, Homo Sapiens
tttttgttttttttttttttttttttttgggaagtaggagctttattattcccattttacacatgaggaaatagaggcccagtgggattcagcaactattctgatgtgacacatgtgtccttggaggtgtacatatcagtagatttcagcctctactgaaatcttctactgaagccttctactccccttgtgtttccctgtctcctccggtcctcttgtagtcatcccaagggctggcttagctctcttctcctggagctcttccgtcccataatcaacggtcttctttgaacaatagattgtgaataatttcacatcccggaacattctctctccaggcatgattttcgtggctgcaaaac

SEQ ID NO: 2213 - DNA, 314 bp, Homo Sapiens
gcaggaattaagtttaaacacaactctatagaaagaaaggagattattacccagaattcacatgtagtgattattaaggacaattttttttttaactaaaaaagttggcggcaggggtggggggtggcaatcatttttcttcctatacatacaaaggatattgtcaaaaatggcgttcttctcttgtggcctgttattctgattgctgctgtatacagttttgtcactctttagtttttagttaagcatactgatagactttcctctaaaagccattcactccagattttacctggggaatattctacatactg

SEQ ID NO: 2214 - DNA, 1868 bp, Homo Sapiens
aggaaggaggctgttctttcagccaaaatgaaacaccctaatattgttgccttcaaagaatcatttgaagctgaaggacacttgtatattgtgatggaatactgtgatggaggggatctaatgcaaaagattaaacagcagaaaggaaagttatttcctgaagacatgatacttaattggtttacccaaatgtgccttggagtaaatcacattcacaagaaacgtgtgctacacagagatatcaagtccaagaatatcttcctcactcagaatggaaaagtgaaattgggagactttggatctgcccgtcttctctccaatccgatggcatttgcttgtacctatgtgggaactccttattatgtgcctccagaaatttgggaaaacctgccttataacaataaaagtgacatctggtccttgggttgcatcctgtatgaactctgtacccttaagcatccatttcaggcaaatagttggaaaaatcttatcctcaaagtatgtcaagggtgcatcagtccactgccgtctcattactcctatgaacttcagttcctagtcaagcagatgtttaaaaggaatccctcacatcgcccctcggctacaacgcttctctctcgaggcatcgtagctcggcttgtccagaagtgcttaccccccgagatcatcatggaatatggtgaggaagtattagaagaaataaaaaattcgaagcataacacaccaagaaaaaaaacaaaccccagcagaatcaggatagctttgggaaatgaagcaagcacagtgcaagaggaagaacaagatagaaagggtagccatactgatttggaaagcattaatgaaaatttagttgaaagtgcattgagaagagtaaacagagaagaaaaaggtaataagtcagtccatctgaggaaagccagttcaccaaatcttcatagacgacagtgggagaaaaatgtacccaatacagctcttacagctttggaaaatgcatccatactcacctccagtttaacagcagaggacgatagaggtggttctgtaataaagtacagcaaaaatactactcgtaagcagtggctcaaagagacccctgacactttgttgaacatccttaagaatgctgatctcagcttggcttttcaaacatacacaatatatagaccaggttcagaagggttcttgaaaggccccctgtctgaagaaacagaagcatcggacagtgttgatggaggtcacgattctgtcattttggatccagagcgacttgagcctgggctagatgaggaggacacggactttgaggaggaagatgacaaccccgactgggtgtcagagctgaagaagcgagctggatggcaaggcctgtgcgacagataatgcctgaggaaatgttcctgagtcacgctgaggagagccttcactcaggagttcatgctgagatgatcatgagttcatgcgacgtatattttcctttggaaacagaatgaagcagaggaaactcttaatacttaaaatcgttcttgattagtatcgtgagtttgaaaagtctagaactcctgtaagtttttgaactcaagggagaaggtatagtggaatgagtgtgagcatcgggctttgcagtcccatagaacagaaatgggatgctagcgtgccactacctacttgtgtgattgtgggaaattacttaacctcttcaagccccaatttcctcaaccataaaatgaagataataatgcctacctcagagggatgctgaccacagacctttatagcagcccgtatgatattattcacattatgatatgtgtttattattatgtgactctttttacatttcctaaaggtttgagaattaaatcccgccc

SEQ ID NO: 2215 - DNA, 181343 bp, Homo Sapiens
gatccacccactttggcctcctgaagtgctgggattacgagcgtgagccaccatgcctggccctgtaacatcatattgacaataataatgtaggcactttggtaattgttttgtcttcctgagtggtatttctcaatgtgaactacaaagatacctatggccatatctaggatcgaagtcttttttttttttttttttgagacggagtctcgctctgtcacccaagctggagtgcagtggtgtggtctcggctcactgcaagctccgcctcccgggttcacgccattctcctgcctcagcctcccgagtagctgggactacaggcgcctgccaccacgcctggctaattttttgtatttttagtagagacggggtttcaccatgttggccaggatggtctcgatctcctgacctcatgatccgtcagccttggcctcccaacgtgctgggattacaggcgtgagccactgcgcccggcagatcaaagtcttactatgaacttccagggtgtaatgtacacagccctatctgttttttgtttgtttgtttgttttgagatggagctttgctcttgttgcccaggctggagtgcaatggtgtgatctcggctcacagcaacctccgcctcccgggttcaagtgattctcctgcctcagcctcccgagtagctgggattataggcttgcaccaccacgcccggctaatttttgtatttttagtagagacggggtttctccacgttggtcaggctggtttcgaactctcgacctcaggtgatatgcccacctcggcctcccaaagtgctgggattacaggcatgaaccaccgagcccaaactgccctatctgttttaagttgaggaaaactcatcctatcggcactttctcaggcatcagtcccaatcaagttatgttattataacagcctattaagtctccctggataacagacaaccctttgtttatctatccatactgggactggagagaacttacattgtacaattaatgaagtgacactatacctgtcttcgcagcctctgtctatatatgccagctttctatttgtctattgattagatgctgttcttttcatctgttctatagtcatactcccaatatctaattgtttccttaaatatgaatagacctgctaatgatgatattgtagaactgttttgtagctaatcgctgctgggctatgagtgagggcctcctacagcttgatgagattatgtcttcccagcattaaattattccaaacagatcaatttcaaagttaacaaataacatgtttgttagtaaaaatgtgagtcttacagtaattcaaataactactactgtggatagagcagccaatatcagttacaggaaaagtcctttgtggcaaccacaatgcaatcctcccaagagtccagctgcgtttttctttctctccgatggccctgtaggtgatcagtagcatttgaaaacattcctctcagcacagtggcagcccaggcctttcccctggaaaagctttgatgcagaggaaacctcccagtcaactgggatggtggacttctttggagggttacctccagatccttctgactttttaagtctcatggtttctaaagaagagaaaagccctattaagtattgagtatgattacgggaggattcagttaaatcaggcacaggaaggacaggcacagtggctcatgcctgtaatcccagcactttgggaggctgaggcaggtggatcacctgaggccaggagttcaagaccagcctagccaacatggcaaaatcccatctctacaaaaaatacaaaaaaataaaactagccaggtgtggtggcacatgcctgtaatcgcagctacttgggaggctgaggcagaagaatcacttgaatctgggaggcagaagttgcagtgagttaagatcatgccaccgcactccagcctgggcaacagagcaagattctttctcaaaaaataaaaataaataaaaacattaaaaaaaatcagccacaggacttggtcttggacccaagttagagctaggccatgcttgcttaaaggagtggctgtaattttaaacaaggctagtgggaaagttccaggccatcttaacattgtaggttgcagaatcttagccaatgagtctttcagagctggattcattaatctgttaattaattcattaatttttttatgctactggatgacagtaggaataaaatgactttttctgtctgattcaaatgctctggtattccaaaagggagattcatatttattaagagagtctttcccgttgtttatacttcctgcctaaggatcagcttctttttctctttcttcacagctgacaacagatgccctaattgtttcacctcaggttagcactattgcaatttgtctagcaagaccttatgtccccgccagatgagaaattgcagtaaagccaaagcatcagttttgcattgctcttcagtttctgaggctactagtagcaagtcgtctacatagcaaataatcatagatccctctggtgggagaaattcctctaagtgtttctgtaaatgactagagaaaataatgggagcattcaaaacccttgaggaattctttgccataaatatcagactttctcataagcaaaagcaaacaagaatttagattcatctgctagaggaatggaaagacagaaaatgcagaaaattgatcaattacagagaaaaactttgcagacaatggtaccaaagtcagaagagttgctggagtaaacagaacagcacacatatttacttctttaagtttttttttttttttttttttgagacggagtctctctctgccgcccaggctgaggtcagtggtgtgatctcggctcactgcaacctctgccccccgggttcaagtgattctcctgcctcagcatctcaagtagctgggattacaggcacgtgccaccacacccagctaattttttgtatgtttcttagagacagggtttcaccatgttggccaggctggtctcgaacttctgacctcaggtgatctgcctgccttggcctcccaaagtgctgggattgcaggtgtgagacaccatgcccggccttctttaagatcttatacaaataaatttagcagttgaccatcttcatcacttttacctctcttctctttcagaagtgtgagactatttcaaagtggtggctttttcaaattatcccttgtttctctattttttttttttttttttgagacaagatcttgctctgtcgcccaggctggagtgcagtggcaccatctcaactcacagcagcctcaacctcccgggctcaagagatcctcccacctctgcctcctgagtagctagggctagaggcatgcaccacctcgcctcgctaatttttctttctttctttctttctttctttctttctttctttctttctttctttttttttttttttttttttgctttttgtagagacagggtcttgctatgttgcccaggctggtctcaaactcctgggctcaagagatcctcctgcctcgacctcccaaagtgctgggattacaggtgagcccccacatctggcctctaattcttttataacctatttcattccttctaattgagctcccaacaaaggagattgttttacacacagctatggcttatccctttggtaaattgattttatgggttctatagctcaaattaaatcagcatctcgattctctagggctcaaaagatgccttgatttgtgtcagctcaggaagggggcttttccggcactgaatatggtaggcttggaggtgcatggcaggtctctcgccaataggtttacagaagagtcaggaggaaaggggagcacttgctccttaggcaaaggcagagggcccatctgatgggaattggagggaagggaatatgtagaaggctgagtcaagatacaaacaacctgtactgatggaaagcaagagcaagagctttccaaggcaaatgcagaataagtagcaccagtctgtatgagaaaaggcaaggacaggtcagcctggcaaacagtgaccgacatacacacacttaaccctaatctcttcccgccactgccatctcctcaatctatccattttgagccatttgcaaagtatctcctagctgagagttttatcctcctaggcccccacccctgattctcttgttcctgccatcctgcatgccccagtctctttggacaatccctcttccaatgtccttgcttcttgcaatgatgacacgtgtcttgcttcctttcctttctgggttgcccagaacaggagttactccctttcagtaaacagacctgagcagctaacacagagtttttcagtttcttcttttcttctttgactttctctagagtcccaaatactgaatagctgctcctaagcttacattatagtcagtcctgccatcctaccaccttttcccttatttgagttgttgttgttgttgttgtttgttttgtttcttgttttgagacagagttttgctcttgttgcccagggtggagtgcaatggcaccatctctgctcactgcaactgccacctcccagcttcaagcagttctcctgcctcagcctcccgagtagctgggattacaggcctgtgccactatgcccggctaattttgtatttttagtagagatagggtttcaccatgttggtcaagctggtctcaaactcctgaccttaggtgatccacccacctcagcctcccaaagtgctgggattacagcctcccaaagtgctgggattacaggcgtgagccactgcgcccagccatattggcactttttaagccttgtgttttttaatgtcccgttgaccaaagcaaatcacatggccaagcccagatctgagagtgtggaaaaatggactctatctcttgcagggaggagctgaaagttccatcacaaaagggtatgcatccagggatggcaagaatttgaggccatttttgtgatccaaggacagagattgtcctcggacataaaattcaaggctggcagtttttttgttgttgttggcacatcagatataccattgtcttgttttctggcttctgtagtttgtgttgagaagttggctgtcagtcaaactgcataactataaaagtaatcaacccacccaccagctgctttgaatgttttctctttgtctttgctttccctcagttttactatgatgtgcctaggtgtggttttttgtttgttttatcccgctcttggttcacgtgacttctagaaactgacttgatatatttcaccagtttggaaatatttcatccattaactcttcaaatattatctgtgccccattctttctcaccttgtttttctgaactccaattaagcatatattaggtcaagcatggtcgctcatgcctgtaatcccagcactttgggaggctgaggcaggaggatcccttgatcctaggagctcaagaccaacctgggcaacatagtaagacctcatctctacaaaaaaaaaatgaacaaaattagctgggcatgattgcatgtgcctgtagtgctagctactcaggaggctgaggcaggaggattgcttgagctcaggaggtcgaggctgcagtgagtggagattgtgccactgccctccagcctgggtaacacagcaagaccttgtcttaaaaaaaaaaaaaatacacgcacacacacatatatgagaccttctttctgtatcccctatgtttcttacctccttttgcattgtcttttaccacctttttacctctccaagctttagtctggctattttcttctgatttatctttctgtttactatttctctcttcagctcttgtatatcccacccattgagctcctaactttaatttgtatattttatatttctaaatttttcactagattctttttgtagtttcaaattatctgctaaatttctcaattctgtcttttgtttccttgaattattaaatataattattttaaagtctgtatctgataatgccattatttggagtccttgtggctctatttttattatattacttttctaatttcatttttattaaattttcttttctccttatgacatgttttgtttgtttttaagacagggtctcacactgtcacctaggctggagtgcaatcatagctcactgtaacattgaactactgggctcaagcaatccccctgcctcagcctcccaagtgctgggattacaggcatgagccaccatgctgggccttgtcctcgttattttttattgagtgctggacattgtgaatggaaactataaatcatttgaggccaaggacaatgttatcttcctccagagaaaatttacatttgtttctggcaggcagctggggcactagaaatcctgatcaccttaatccaattttcagggattgaaagagctcaaatcttgactacagtcccttaggggacagggatgcagtcctttagagggctattctatttccagtttacacttattcctagacctttgggtttccaacccaaagcacgaggagcttactagggccttcttccttggtgagccctgcactctgacttttgacccctcacctcttaagtctgctaactgttctgctcagcttcttgggccctcagctgtctctgctggaattagcggatggccataggggataagcagccttaaatgctgagctcatctctcagctcatttcctttctcccatatcttggtcccatatgcttcactgcctattatcacttggatattttcaagcaaatattttccctgttttactgagtctgtttagttgttctcagtggaggttgtggttcaaattacttattttgtcattgccagacacagaagtcattcagcactaggttttaggctctatttatattgttgagtctacatataatcttgcttccaagtactgcataacactccctaatgttttatctgcttccttagtcactacaaataatgctaccatgacctttgtcatgcaggccattgctctgtcacccaggttggagtgcagtatcatgaacatggctcactgcagcctcaacctcctggactcaatggatgctcctgcctaagcctctcacgcagctgggaccacaggcataagctaccacacacggcgaatttttgtattttttgcagagatgaagtctcaccatgttgctgaggctggtctcaaactcctgggttcaagtaattctcccacctcagcctcccaaagtgccacgattacaggcgtgagccaccacgcccagccaagaatttttgtgatgtatccccaagagcagaattacagagaattaccaaaattacccaacctagtgtatacttaattgatgagatactgacatattgttctccagaatggttgtgttggtctgtatctccaccagcagtacatgagcgctctctagccacacatccctgccagcatttgctattgcctgcatttctaggtgtgtgtgtatttgtcaatctaatgggtatgaagtgatactgttgttttgatttgcgttcctctgataatcaatgggcttgcacatcttgggtgtggcatgtctgctgctggtgctgccaacacttggtggggcatgtagaactgggcctctgacctccgaggaaggggtgtcatctggcgggttccgagaaggccgaaatgagctggagcctgaaaccactgctgctgctaagggccaactgagactggcgctacagcaacaggaatggaaaacaaacaggaaggagcaagacccttctctccttcccagccttccagtctccctctagtgtcccagttggtggaaactgacaaccagccagaagacaaagaaggaatgtaggttcagagtcccagcgccagcctcacaaagcagagtatggcaccttccccgcccctgcccctttggcttcgcaacatcagttcgaagccttcttgcataatttgaacttccctcagcagtaatgacaactttatgtttctgcctaacaagatccttcatacaaatatgctcctaccctcttctcaagaggggagacataaagtcccaacagtctttgtaatcatctccaaattacagtcacggtattggtgatattaatttctcctttaaataagtcatagtaccacttaactattctgtgacctagaggctaagttgtaaagtttaccatcaaaacaactgctattggccaggtgcaatggctcacgcctgtaatctgagcactttgggaggctgaggcaggaggatagcttgagcccaggagtttgagaccaacctgagcaacacagcaagaccctatctctacaaaatattacagataaaaaaattatccagtgtggtggcgcatgcttgtagtcccagctactcaggaggctgaggcaggagaaccgcttgagcccaggaagcggaggttgcagtgagccaagatcacgccactgcactccagtctgggcaacagagggagattgtctcaaattaagagagagagagagaaagaatcaaagtctgtaagtaccgtttcgtgtcagagaggaggagagatggcagagcctttagggaagactgtgaagatgtactgttggccctgccaggttaaaagaaatgtggtctttgaagtgcaaatacataagcttttcaaacctgagcaataaaagaaagtgctctggtggtcttttctctggtgttactatttgacagggcagtagcaagctagacgcaggggctatgacgctttgcttcagtaaagtgactgcgtctgaaacagcagctgcaatcaattcacctgcggtcattcttgaagagccatccaccttctgccaagcaccaaatagacaaatagcatacaagagacatcacgactgcaaccttcaagttcaaggcactaatctctgctatttccctcagaatcgtgacattgggttcctttctctccattaggcaagggttgttctggcatctcactatcattgaatttacgccacagttgagttccagtttaaatcaaccaaccacataggctgttagagtcactttcagctgcatggaccaacattaaatataggccctctggtaaatgcccccagctcaagaaattgtgcccaatccaatgttatatccatcccttttggtagaacatccttagaattcacttccacacatattcgcccaggtttttgccaatatttcttaacgaaaatcatgttattgttctggtgtataggttttcctcttgtgttttagtgtgtacctgtccacctgtggtggattgcaccctcattatgggacagggggtggttgtggtgggttctgagaggagaatgggtatcctcttgcaaggcaccagagggctaccaggtcagccctaaaaattctcttactccttgtacctgcagggctaacagtgctaaatcaaacacaaactttaattgcttgggttacagaatcgcaacgtcagttgattcccagcctcgccacgtgtctcacatgaaatgtcaggcagtggtcgggaggagtgagaccctgaaacttaccattgctttcaagctcaaggacgcaaacaaaccaatctccaaaccccatctttcaggatatgattcttgacaccactccagctgccaattttgctatcagccaggatctgatcaggaagtagaaaggatgacagctcctcccttggtgcatgcagttgagatttcaagtgatcttcctgccttggcctcctgagtagctgggactacaggcatgtgccaccacaccaggctacgttttgtattttttgtagacgaatgtctcgaactcctgggctcaagtgatcctcccagctcagcctcccaaagtgcaggcactgcaggtgtgagtcacagcacccagcctcctctgtttgaagagtcctaactcccttcgttccccagcctgaggggctgtgttaatttcctggagctgccatagcaaagtgccacaaaccaagtggcttcgacagcagaaatggattctctcacagttctgcagggaagaagcccgagatcaaggctgtgagagagcaggaggatcacttgagcctgggagtttgaggttgcagtgaaccatgactgtcccactgcactccagtctgggcaacagaggagattctgtcgaaagaaagagagagagagagagagagaaaaaggaaggtaggaaagaaggaaggaaggaagggagggagggagggagggagggaggggaaagaaataagaaaagaagagagagagaaagagaaaggaaggaaggagagagagaaagaaaggaaggaagaaaagataagaaagaaaaaggaaaggaaagaaagaaggaaggaagaaaagaaagaaagagagaaagagaaaaggaaggagagagagaaaggaagaagaaaagagaaagaaagaagaaaaaagaaagaagaaagaaaacagaaagaaagaaaaagaaagaaagagaaagaaagaagaaaaggaaggaagggaagaaaggaaggaaggaaggaacaaaggaaggggaagaaagggagggaaggaaggaaggaaggaagttggttagagagaggcccacagagctgaagctgggtctctgaggtctgaggtgggggcgtggcctagctagttgtggaggagtgagctcagtagagggacttgtggggctgggatccagacctctaaggagcaggggtctggctgatgctggggtctctgagctcaggggatggcctagtactcagattttggagcatagggcactgggtgtccggtggtggtgtctcagaggtgggatgcaatgaagctggtcttgcaagtgttgagagatctgaaaattggcttcaggcagtgccacggaaatgaagcacttgctgcaagggtgaagaagccttgttagatggtgcgcccaggaaggagcaggtcccttcttcctcctccagtcttgtgggctcccttaaacgcccccagctagcagagcctaggagggaggcgctggtaaagcaggagcatcaccaagcagaggacagcaaagggggtggcacgcccactccacaagccagcactgctccttctagggcacggatctcagagaaaggactgcatatgcccactttatccatgatggctaccattggaaacaacccacacgtccatcaacgggggaatgggtaagtgagtcgcggtgcatgcgtgcatacaatggctactagtcagcatcacagagggaagaagggacacagacgtcaacctggatgagtctcatggaagtgattccagaaagaagccggcacaaagggctccagagcgtgtgcttccatttccatacccgtcaggagcaggcgagaccatctacagccatagacggcaggacagggcttagatctgcagccagggattggctgcctggaggcacaaaagcattctctgtggtgatgcaaatgttctttagttggtccaagttgtggctgcatgtgtggataggcaggtgaaaaaaccaggcgtgcacttgattttctgcacagtaatcctcaataaggacttgtttcacggatttttagggcagtggagttactctgtatgatactgtaagggtggatccatgtcattatacctttgtccaaacccataaatggacaacaccagagtgaaccccgatgtcagctatgggctttagttcatgcgagcttctcactgtggctcaccaattgtaacaaacgtactacactgactcgaaatgttcatcatggggaggcgtaaggggagtgacggggtctgtgggaactccttactttccgctcaatttttctgcaaacctaaaattgctctaaaaagcaaaatgccttaattttttaaaaacccaggaaagcagcccagggccgatgtggcagctccaggtgctcaggccctcgggctgcctttgttgctgttccgccatcctcaacgtgcgacttccctttggtgcgacaaggtagctctccccatgatcacagatcacatttgcctttcagctgtaaggagacagaaagtggctggcacaaggccatgcgtggtggctcacgcctgtaatcccagcagtctcggatgccaaggcgggcagatcacctgagatcagtagttcgagaccagcctggccaacgtggcaaaaccctgtctctactaaaaatacaaaaataagctgggtgtggtggcgggcgcctgtggtcccagctactctggaggctgaggcaggagaatcacttgaacctgggaggcagagggtgccgtgagccaagatcatgccactgcactctagcctgggtgatcgagcgagactccatctcaaaaaagaaaaaaagaaagaaagaaagaaaggaaggaaggaaggaaggaaggaaggaaggaaggaagggaaggaaggaaggaagggaaggaaggaaggaagaaaggcgccagcacaggtttgccctgcaggtatgggtgcactcatgccccaccaccctactgggtgcatagaggctgggaaatgggtcttcagctgagctgccatgtccccaagccacaaatctagtgttatggaagaacagaaaaacagatattggagggcaataagtggacgctgttacaggtggggatcaagggggacaatgagtgtagaggagtcttgaggggttttgctgtaaacaggagcagtgaaacggggcaagagccagggggcatgcggaggcaggagcgggagcttccggtgatagaagctccaagggcatgttggtatgctgctgggcctgaccccacagggagagagaaaaattacaggtgcagaaaacaggaggagagagggggtctcaggggtggcagagaccactgcacatggtgggaagtgttcacctgagggggctagggctggggaggggacagatttgatgatgggaactcaaggaaagaaattctcgtcagatgctctcaacttgctcagtgaaacatgaaacaaagttctcaccttgaaagtgcagggcctgggggctgaggggaaggtgtgaggccttggagaaccagggaggaaactctagaattcccaaggaaggctggctctgcctgggtccacttgaggcttgtggtcataaatctaaggtgcttagtcctgggctgggtgtggtggctcacgcctgtaatgccagcactatcgggaggccgaggtgggagaattgcttgagcccaggagttcgaaaccagcctgagcaacatagggagactccatctctacaacaataatttaaagattagccaggcgtggtggcgtgctccagtggtcctagctacttgagaggctgaagccagaggatttcttgagcccgggaagtggagggctcacctgtgctgggttttctttctttctttctttctttctttctttctttctttctttctttctttctttctttcttttttctttctttctttctctttctttccttttctttctctccctccctcccttcctttctttctttcttgcttgctttcttgctttgtctttctctttctttcttctttctttctttctctttccctccctccctccctctctctctctgtctctctctctctttctttctttctctctttccctccctccctccctccctctctctctctctctctctctctctctctctctttctttctttctttctttttctttctttgtctcgctctgtcgcccaggctggagtgcactggtacaatctcaggtcgctgcaacctgatttttttacctgcctatccacacatgcaaccacgactcggaccaaactaaagaacatttgcatcaccacagagaatgcctttgtgcttccaggcaaccaatccccagctacagaggtaagccctgtcctgccatctatggctgtagatggtctcacctgctcctgatcacgccactgcacttcagcctgggagacagagtgagaccctgtctcaaaaaataaataaataaggtgctttgtactggtttagagggctgggtaccccagagagaacgatgccaccggggcacatcatgagtcttccactgagccatggagctgtgtcccttgagacaggggaagaggctcctgccgctggccacactctactctcatgtttgagcagtgaagggcccggccatggtgacagctaagcttggtctcaggaggccagcagaggcgaggatcctgagccccagcaacaatgtgacagcaacacccaaggcagccaacagccaggcctggcagggtgggtggaaggcccgggctctgggaaggggcagggaagcatcaggactgtgtggctgggccacacccgggcccgcctggcaggtcgctcctagcacctcccacagtgtgacgtggacaggggaagtaagtgttccgcgaaataacaaaaggtgctcttgattttcaggttttatttgcctgttataattctgatattatgtacatatatatatatacttttgtttttttgtagagggcttatcagtagaccaagcacaggcatacagggaggctgtggctgctgagcagtgctgggagaaccaatctttcctttttttttgtctgtttttatttttcctgggatgggttcatcaaagctaattgctatcaatcctagaaaccacctagggactcagacatctgcctacacactagtggcgtaaagggaaggacaggggtacaaactttcaaagtcacggtgtatttacattcccaaggtgggggcgggaggaggctgaggaagacaactgttcagacgatagggagggcagggctgctaaggggtcctggggggtgggggcggctggaagaggccggccagtgggcagtgggaggaggtgtgcccgccccgcagccaggtagtgacggaggccacttggatgttgtgtggtgggtaccgaaggcagcgtgtgtatggagctcctgaaagccggccatggggtgggctgggcggcgggaagaggcggtgctgccagagtgcgatgctgggagtggggggactctgggctctccagatggcctcccctgcccccgcggccagtttgcccggctcccatcccggttggagcagagatggcaaagaaaagacagcagatggtggggacaccgagttctgttcccagtcccagccaggctggctggggagtggctgggggagggggaaggtgccaaccctggtcctgaggagaccccaccatgtctgcccccagtcagggagcaagaaagacagcatttcggagaccctttcgggccacccctacttcttctcccccaaaccacagcctctctgcccaaatgggctggcaaaacagcacccaaaggcccctggcatgtgggagatctgcccaagctggggcagagcagcgtgtgcccaggaaggggtgcagctgggttttggcaataaagtggggaccgggtggtaggaaggggatccgaggcagcaagttctcctctgccccaactccagcctcccatgggcctgctggagagggaggggcctggatcccaaggccaggggcacagcatctcctgtcctggactccactattctagggccacggcagggttgatgggggaagtggcccctgagctgtcattgccccctgccgcctccttctccttcttgccactgtactggccaatgaacgaaccatcctcgttgaactgaacatccacgctgcccccataatcggccaggctgtcgtcactgcccaggggcttgatgtccccgttgagcgatggctggctgctgccaaaggccttctcctcgttgtcactgcagaggcacagggcaggtgcgagtgagagcactgccgagcccctgcaggagcctggctgggggtgaggcagacgcccgcctgccttccatttgtttagaatgcgctcagaaagagcagctctggccaccctggcaggcaggtctggagctgtcatctttgggcattccccagatcctggggactgtgagggagaaaatgtgcgctcggccaggggattatggggcctggttcctgtctgggaagctgtctggggcctcccttggggagaggggagcagtgaaggtatctgtgtggagaggaggggctggggcgtgttggcctctccctgaaatgaggagctgccgggcctgggggctgggaagtgagagtcctgtcagagccccggcagccaggggacaatggcacaccaggcgcacattgtctatagggagaccttgctgttggcccctccccaccgcccctgccttacctctccagggacctgaagtcacccggcagcacagagaagagagagagggggtgagatgtgaaggccagggtggagctgagtgccagcacccactcctgccccggctcacctgtactcgccgaaggtctcatctttcatcggtcgggcctcagagtccacctgggtgtcctccttatccttcactggagacacagagagggacagcttcttctcccgccccagcctgacccggggctccaggcccctctacgccccgcacccccagcactctgtctcaacagcgcccagaggcaagaggccttgaaagaaaccgctcaccccctgcggtccagccaccacttgcctgttgccccaaccccggcctgggaggatgatccccctgcctgcccccaccatgcgcctgtcatcttgtggggagctcggggaatccaggaggccttgcagaagggtggaaggggcgaggtgctcctctctgccctcggctccacccccgtcacgtggggctcagaggctacctgagtatttgccgcccttgctgcgcttgatgaagcagaggatgagcaggacgaggagcaggaggatgatggcactcacaaagccgatgaaccagccctcagtggcgaagccagcaggagggagcctcacgcggcctgagggtgagacaccagccccccgtgctgccgcccaagccagaacccgacctgaggccctgaagtatgctcttaaagttggggccctctggggggctaaggagtgacagggacagggaaaagggcatctgcggaaagggtatgaaagggggctgattcggggacacccagattctgggaggagaagcagacaggagccgtggagggagcctgggcagtagtggccattcaggggacagaaggacatgaattgtgcagcccccatgcttccctggcaggtgatggcgggcccccggcgcctcacctgtgccattggtcttcacagccatttggtgccggaacatcctctccttaaacaagtggatctcgtagtcagtgtcaggctgcaggtcccactgcgtgtaggagctctggttgtagctgacatactgtggcgaaagggaagccccacccttctcttctgccagggagagagggtggcagcaggggtgagtcggagtgccaggcaacccctctggcccagagcccccttccccaccacgccccaaggccccctttcacgcttacctcccaaggctttgaacaagatatggaacctgaagttgcactggccctccttggggacccaggagacgacactgtagttttcacccgctgtggctgagatgttgccaaaatctgagatccctggggggatgcaggggaacgaggagagtgtggcagctgccaggaagtctaaggccctccctcctggacccggctggccggggcctccctgttggcaggtcattcctccagcttaccagacaaggccatagtgcctccttcccgtacgatggcttcaccagggccctctttggtggtggcctgaagctggaagcggtaccgcaggtgggggctgagatcggtcaggttgtgtgtccgaagttcggggtcccgaaggttgaaggacagttgccccttgcccccctcatccactgtggggacagacaggggttggctgtggctgcagctctgccccctccccgtggcccctccacctcccttccctgctggggcggcgcacgcacgggggtggtaggagagcacgtagccggtgagcacgccgttgtggctgagtgggggctgccagcgcagcagcaggctggtgttcgactggcactccaggtgcaacgcctcggggtggccaggcactgcagggcacagaaccgagtggcaggtaggtcctcgcccaggtctggggaggagggcaggggatgaggcgtggggtgcaggactcacctccctctggggtgctgaaggtgaactcgctggcgggccccgatcctcgcccgttaaaggcctgcacctccaggtggtaggagctatagggccgcaagccactgaggatgacactggtggtgttggcgggcaccaccacatggtctttgtggatatgtctcttgctgtgcttcctctgactgccctccctccagtacgtcacctgcacaagcgaacaggagacctcgcaggggcagaaggcacccagcagggcccccagcgcacacccccaccacccttaatggggaccctcctctcaacccaagtcttccaggagagcggctggcaggtggcaaagccccctcaccatcctgtcgctttacctcagtgatcaccctcctgggcccccatgccttcaacccttacattgtatccgcggaggtggcccttgacctgggccaggtccaccggccgccacttgaccagcacggcacttgagttgaggatttcaatgccttccagctcagggattgcctgggggtctggaaaccaccagtgacttggatagagccataggctctcaccccagccctgaggccaggcccaagcccctacacacagagaagacgaattcggatattttatgaggtacagtttgaggaggagaggtgtgtttgcatggtctcaagatctcttcctggactgcttattagttgcaaaggtgaaaatagtagcttatacaaaggagaaaccatggctgggcgtgatggttcacacccgtattcccaacactttgggagacagaggcgagtggaacatttgaggtctggagttcgagaccaacctgatcaacatggtgcaaccgcatctctactaaatacgaaaattagttgggtgtggtggcgcgtgcctgtaatcccagctaatcaggaggctgaggcaggagaatcgcttgaacccgggaggcagaggttgcagtgagccaagaccgctccactgcactccagcctggatgacagagcaagactccatctcaaaaaaaaaaaaaaagaaagaaaagaaaagaaaagaaaaaagaaaagaaaaaaaggagaaaccagaaaaaaaacttgaccgggtacttcaagttaccatctggtcatgttccagattcaaggaaatgaaagaagcagcattggctgatataactggaataccgctgccaattatagaaatgtgaagtgtggggaatttcataacgtcgctctggttatgtaagagaatatcctcatccttaggaaaggcgcacaccaatgctgagaggtgtggacatgggctggggtggaagcaggcgagctcaaccgtgggcgaggggccctgccggatactcacagtcctctccagagtagccgatagtgacctggggctctggtcccttgccctggctgttgacggcctggactttgatctcatagggcacgaaggtggacgtgttggacaccaccaggaaggggtcgctgacaatctgctcctgccagggccctcgtgtcccctgagggcgccactgcacgcggtactgaacctggggggcgttccagtccatccaccggagcggctggaggaggccagcagaagaggagttggttggccaagaacaccagcattctttggcccgccccccagcacaaaccagcatccccagacatcagccccttcctttgcatagccaagggggagcaacagacacccaggtcatggcctcatgtcccccaggcagctcagcccagggactctcaccttccacgtgatgaccatattggtggtctcatttccttcccccttcacatccacagggttcttctctggggctggaaaggaaagtattaacacatcaatgctgcagcctcttttggagagccacgaggaccgagggccaaggaacaaatggctcattctggcaccaagggagtccagccccctcgcgctccccctggaaatttggaagcagaggaacttgggcatggcacctctctaagccctcccttcacagcccggagccccttccaggtggcatgggagtgggtgccaccctgactcacctgcctcaggtgtgaccacagtctcagagaccgggctgggctccccggggccatatttgtttatggcagtaaccctaaaggtgtagtggacatagggcgacagcttgagggtggtagaggtctggttccctggaaccttgcccagactgtaccatttttcaggcgccatttccttgtcctcaaattcaatgtcatattctgccaagaaatgaaccgacaatggagtgatcagcatgtggctttgggggaagggctgtggaggggttgggtacagtctgggtccctgattacccaggccaactggcatctccagattcccatgaggaaccgtgagtccccccaaaccgtgtccccccaggaaggctccaggaggagggaggaccccaggaggggccagggctggcagaagtgacggtggggtggcactgagctcaagcctcttactctcaatgggggcattgtggtcttctgcaggactccaggacacgcgcacctggctctgcgtcagcaggtgcaggtcggacagcaccagccgtggcaccggcccagggctccctgagggtggggagggtcggtgcttgaaagggcccagggatgtgagccccggccttctggagtggaggcttccaccctaggacttacccaccaccaagagctgtgccctactctccaccacatccagttcggtactggccacgcagctgtagttgccctggtcgctgtagtccaggctgtggatgaccaggcgcccatcctctatgaagtacctgcggaggagccgtgtctgtctttcctgccatctgggctcttctcccctcccatccctccctcctgtctccttcccccgctcctgtcagagccttccccatcaaagcaaggacgaggccaagaggtctggacttccagcttttcccactctgccccctttcaccgtcactgtcctcacttgtcactgtccccaagctcctggaggtctcgaccgtccccacgccaggtgatgctgggctgcaaggaggggtcaaaggaggcctggcacgtgaaggtcaccctggaacctttcttctcgattgtgctgcggggcccctgagtgatctgagttgcatctgagggtaatgcgtgcgtggggaagtcactctgttgtcctccagaggcccagaccctccctcccagaggcactgccagccatgtggcaagggttgcctgacctttaaccttcaggttagccatgatggtaacattgttttggtcattggcagccaggcagaagtagcgtccggtgtcattggcctggaggtctcgaatgcccagggtcccattggcataggggaagaagcgttcgtcctgaagcactgttgtcccatcctcgtccagcctggagggagcagggcgggcctggctctgactggctggcctgggctccctgccctccctggctccctggccactgggacacgacactcaccactaccaggacgagacactcaccactgaacactgggcacaggcgctccgaaggccttgcacagaaggtaggcagtgctgccctggacagccatgtacgtctgattgtccgcagtcaggatcttggctggcagctctaggggaggaacagcctcaggagacagggcaggacttgggaccacagctgggccaggagccagggaccctctgcacggcttcctcgggcccccaagagccctgcaaatcttggttccctgctcccagctgaggcccccgccaggctgtgtctctctctgccttcagacactgccctctgcctcagatgcgcctctggtcacagccacccaacttttacgttattccaggcctaactgacagtcacctctccccagaagccttcctggcctagtccccagccttccctgaagttccaggagaggtgccacctgggctggccttggtcacatcctgtggcacagcggtccgctcagtcacagtgacaagacctttcccctcttacatctccctcggctatcgtgaggctgagtgagatggggcgaagggtgtcagcaaggagaaaggtcggcgccagcctggtaggccgaggacacatcagctgccagctgagccactctggtggcctggcccagtgggctgcagggacagactgggagttaggaggtaaggaagggagggcactcacggacaacgtagatgtaggcattggccagcaagagcccgtgccggttgcgggcctcacattgggtcaccattgtgtcactgggctgcacgttgctcaggatcagggcgccacgctgaatccggtacttctggtctttggccagctctgtgcatgcagcaggtgggcccatgggccacagcccggcattgagctgcgttgaggcccttcctcaccctcctcttcctctcccccacagcccccagggctcgccacactccccactcctgcctgaggccctgctcaccctccacagggatcccgttgattctccaggtgacctctggttggggcctgccctggacttggcagtccaggcgggcagtctctcctggcccatatagatggctctggggcttgtgcagccagtacggggcagctgggaggaaggggagagccgccctgagcccgcagccagcagctggctcttgacccggcgcagaccctcccctcccccatgacagtgggcatcacaggccactgtcccaggaggtccataccctccacggtgacatagtacgcatgccgggcactgcccagtgagttctcggccaggcagcggtactcgccatcatcctcctcgcccactttcagcagctgcagggtcttgttgtggttctggtaggtgacacggtcggctggcatggggccactggggcgcagccatttgatggtgggcgtgggactgcccgggaggcaaagggaagagagcagaagggagaaaggacaaggccaatcaccccagccccctataccccgcggtggtctgagctccctgctagggctccgccaccctgccctgccctgccctgccctgggttcccagactcacaagccctcggcgatgcactccaggaccaatggctgcccctgcaaggccaccaggtggctgctggagttggtggggaagagcaggcgcggcttcctgtcaatcatgctgttggctgccaggagaaagtgggtgggtgggctgcccactcttccctccaccccagaattgcaaggctgagggactcgacactccagccagcccccggggcctctgtgtcttcctccattaaggagagtgtcctgtctctgctctcgacgcctgggaaggggtctgggcagggtagaggtgggagccaagctgttcttgaggaagcctggagttgtcagatggacctatggtgggaagggccatgcctgagggtgaaaggagtcagggagagagtgcagagcctctgagactcactggccttgacccggaggtcaatgggttccttctgaatgatggtcctggtgcctgggaagtgggcgtggcagatgtagtctgagtggttgtcggaggtgagcacattggcaaagtagaggttgccgttctggcccatcgtcacccgctcgtcctgcttgatgtgcaagatctctgcagggggcaaggaggccgaagtcatgaccccgtccaggaagacacccccgctaacaccccgaccccacgaggcagccgctcgccggcacccactgctgttcatccagtagatccggagaggctctgcacttgggggagggttgcaaggcagaaccactgactccccttcctccacctccacgggcttcactgtctcctttggccacttgggggcacctagaagggacagacgggctgacactctcctcctggtccagatggtgctaggcaggagaagggaggtgggggcaggggggtggcgggctacaccagggatggacgagggggcgagagggtcaggccagtagaaacttcacagaaaaggaggcagacactctggataccttctggactcatagcagagactagcacttagggaggccagggtgagcaggagaccaggaggccaggaagggttaaccttccacggttctcagctctccctgcccaccctaggaaaggacgggtggggggaggctgaggctgaggtgcagtgatgggggaggggagctgtggagggatgcaggagtcacagacccttccatcatcctgacacagaaaccatggcaacggttcccaaggtaactggaggggtggggaggggagaggagagcgctcaggaagcagaaagctcagggaggatggaatgcaaagggaaaaccccagggaaaaggcgacacagatcaagacagagccgtggagcaagagagaccaagtcggaggtggaggggaggagatggagagccaagtggaaaagccagagaagaggggccctgctaaggagtgcaggtgtagacagagatgactgcagtgactcaggcaggtctgcccagaatcagtcactccccccaccagcccgcccccccctccccccgccaccttcctgctcagccatgaggcaggcaccaggaaagcctgagggagtgaaagggcatgagatgaccggaagtgcaatggagacagagacagggcaaaggaggagactgcacaagaaacaagatgggccaggggagaagctggggtggggtggagggctggcaggacacccaggcccctcgccacgagacaactggctgacagcagcttccagcccacaatcccacacgaactccgggacctgccctccctggtccctgcagcgcctcgcaccctcggccatgagccggatctcatgggacatggcggtgcccagcttattgctggcaaagcagcggtagatgccctggaacctctgagcaaagttgctgttgttgcccgtgatggtgaaggagccagagtggggcgactggtacacggtcacacccagctcttccttgggtttgaagtggacaccatccctcgtccagcggaacctgtgggcggaaaaaggcccagaggcctgaggccctggaacccaacgggggctggaacaggctggagggacaggtgcaagcagccagggcccccaggggatggactgggagatggcgaggacttggggtgattagcaaggtttggggcttctgggcttagaagttaggcagtccagggaggcacaaggccggggtcagtggcaggcaacaggggctgagacggcagagatcactcactgcacttcgggcttgccactggcctcacacttgaggctgatgtcatctgtggggaagacaaccaggcgccgtggagactgttccgtgatgacaggtggctccatcactgaagacagggtggagagagcggtggtgagggtgctgcctggctggtgtcatagcctcagcacctgtcccatcgtgagggaagcagggtccagagcccctggaggccccatggccacagggggacgaacggaggggaagaacaaaagaggcttgtgggacatgaaaagagggagagaggggacagccacgtaagttacaaagagatgcctgagaaagacaaaaagggtatgacagaaagaagcgggggcaacaaaagccaagacacagaaaccaagaaggacaaaccccagacaggggagaagggaccagagagaatggcagagaggaacagtgagggtgacagagtacccaggctggggcagagacagaacaaagccagccccacacaggtgagagaagcacatggtgctcagggagagccgagcagggccccggcactcaggagggcgggggtgcaggctcagctgagggcctccttacccttctccttggccttctgggaaacactctcacccctccccaacttaccatggtgtccttcatctgagaaatccaggcaggcagcaagggagggaatggagagaaatactgacaggcagccccagagtggggcagatggcaggggacatagtaagctcctgcagcccccccgtggagagggaatggcaggagaggaggccctggcagtggcaacaagggggcacacgctgggctggagcagtggcaggtcaagcccagggagatgggacagagagatgcccagggagaggagctccactggatagacacacagggcatgtagcccagaggcagccaggccatgcctccagctctagcagacagggagagagaaattcttgcctttaacaaggagtgtccttgcagccccctggcagggcctggcagggcctgcagaactgaccccacccattcaggatgccttggaaggcaccgtcccctgctccagcctgcttccctcctaatccaattagcacagctgagtgttttcaattaccagggcccagccttcagagccctgctgccccctccccctgaaaactatcccaaaggccctgctgcctctgagtttccatagcctgcggggttggcgccagccctcctcttctccctccttcctcccagacagccaccaagctctctggggcagaggccagagctgctgtcccagccccaggactctgcagagcactggccagggcggcctcgaggaagggagaagagggagggagggagcagcaggctgcctctgaaagctttgtctctgcagaagacctcagtgtgaaggtccagggagggaggagggggctccctggggacactgcagagggccctgagctggggagggagatggtgacagggatgacaggatgcagaaagccaactaggtggaggaagcaggaaaagagacaaagggggctggagtggctggggagggagagatggaagacaggttccaacagggagggccggctgcctgccactgcccactgtgtcgtatcagggtcaagaacaagtgctggtcagtgaccagggcagccttggagctgccatggccttttggcctagttctctctccccactcccatctttctgtagagaatgcacggcttgcattccactgtacagtgttatattgtgtatccacctctgtgtcctctgggtctaaaagcctcactggtgtgtgtttccacctgtgtggcctctcagcggctctgctccttcatccctgcacctgccttgtcttcatgcacctgtgtgcatgtgtccatgtgcatctgtaccaagggagtctgcctggccctggccctccatgtatgtgtctaaggggccagcccctttacctcctccaagccctcactgcctcccaacgccaggtgcctccccagcctctctctcgcagcccctgtcccactgctggcacagacagtcttcccaacccctatccgccaactcgtctctcagtgacactggcctcctccttgtccaggcccagagacaaaggtgtcaaggtgaggctgggaagggactggagcctggtagctcaagagacacaaatgccctcacacatgataccctgtgacatgcccctcacacggcctgacagctacttacaggagaaaacaccatcacggtaacaccccccacacgcaagtgtgtacttacattcagccccactcacacatacacatgacccaatgcaatcaaatgtcgtggtcaaatacctcccgacctccacaagcctggccagtaagtaacagagtgactcacacagtcacccatgtaaggaagtcaaaatcacattcacgaatatctacgctcagtcaatcacaagaacacacagacatacacagtgtatccatgcttaatcacaaccctacggccacactccccaacatccactcacctgcttgtgcccccaacaaatgttacaaccatagacacatgctccagcagccctgcccccacccccaccaaataactacacacaaaaaagggtccagaaggctgctgggctgggaccagggtttttcaagccaccttttcctgtctcagttcagagacagggtgaccaagggcccaggaggggaaagagaaatggggacaagacttgaacacaggcctttgcacaagccagctgagggctggggacgaccccattctcctgctgccacacccctgtggtgggggatggaagcggaggagtcggagtggggcgggcagagatggggcgggctaaggagagcatggaggaggcccaagacctcggggccctgctccaggttcgctgtccctggtgctgaaatcgccccggcggccgcgcctgtccctgtccatggtcctgacacgccccgcaccttctaccctgcccttctctccgggggtacccaacgtcctggctatctcctgcccaccctgtgcccaggaaaggccagggagaggagtcagggtccggaacagggagaaggtgaggaggtagaagataaagaggggcccaacatagcggcgaaggtaggcgcccaggctcccttcagctactcacattcctcggggatctggataagcaggcaggggctgcagaggaggagaggccacacgtaccgcagcgccacgaccatctttcccggcggcaccgcgcagcacagccagccgggctcggttcaggctccggccggaggggaagggggctggtgggcggcttggggcgggagttgggagtgggggcactgggagaggggagaagggaagggaagggtgggggaagagagacgagagaacggaaggacgttagtgactaacatctgggtaagcccgggctcttggccccgccctcagccccgcccccagctggccggcttctccagccctcccctccccatccgcacccctccccaccttggagggagaaatctggaagagatagccctggctgggcctctaggttgccttttattccctctctactctctgtctgcacctttcctgccagctgccttcccagcaccaacttgttgccccatcagctcccctgtgcatggcatgcacatccccgtatgtgtctgcatgtgcaggtgtccgtgggcatgtgtgtggttgtggatctgcaagcagggagtgagctgtatgtgagctggtatttctgtggtgtgtcttctctgggaggggttgcactcatgagtgggtgtgttagtgtgtgtgcctgagggaatcaacacacaagtctgctagctacgtgtgtcttcttgtatgtctttatgtatctgtggggatgaatccctgtatctattatctctgtgtgcacacacatgtagagaagaattcttcttgcagtcacattgctatagctttcagagccaactgatgcctgggtgctgtacagacctaaaaagctaatggggggattgggaagtgggatagagaagggaggaaaggggcccaagatggcagcatttcacaaaatagtttcaggaaaatgaagaaagaatggggaaagggccaggcgtggtggctcacgcctgtaatcccagtagtttgggaggctgaggtgggtggatctcttgaggttgggagtttgagaccagcctggccaacatggcggaaccccgtctctactaaaaatacaaaaagaaaaaaaattagccttggtggtgggcgcctgtaatgccagctacttgggaggctgaggcatgagaatcacttgagcctgagaggcggaggttgcagtgagccaagatcgtgccactgccccccagcctgggtgatggagtgagactctgtctaaaaaaataaataaaaataaaaataaaaggccaggcacagtggctcatgcctgtaatcccagcactttgggaggccgaggtgggtggatcacctgaagtcaggagttcaaaaccagccaggccaacatggtgaaaccctgtctctagtaaaaatacaaaattagggctgggcgtggtggctcacgcctgtaatcccagcactttgggaggctgaggcaggcggatcatgaggtcagcagtttgagaccagcctggccaacatggtgaaatcctgtctctactaaaaatacaaaaaaaaaaaaaaaaaaaaaaaaaaaagccaggcgtggtggctcatgcctgtaatcccagctactcaggaggctgaggcaggagaatcacttgaacccaggaggcagaggttgcggtgagcggagattgcgccattgtactccagcctgggtgacagagcaagactctgtctcaaaaaaaaaaaaaaagttagcctggcgtggtggtgcattcctgtaatcccagctacttgggaggctgaggcaggagaatctcttgaacccaggaggcggaagttgcagtgagccaagatcgcaccattgcactccagcctgggcaacaagagcgaaactccatctcaaaaaaaagagagaaagaatggggaaggaagccttcccttgagaactggtgtgggagaagagaggaaggaggaaaacaaccccctgctgctcctcagccccctgggggtcaagagaggccactgaggcctcctcccttccagatgctccaggttagggtcaggacaggggtcaggacaagctctgggacattttccgtgacagtgtttctaacacttcttgtgtgtctcaaagtcccaatttctaggtctttgtctgagtcttcagagctcaactgctgcatgtgtccaccccaaacccaagccacaccggccatgtccatattcacctacaagtaaggggagccaaagactaagggtctgaaagagggggctcctctgacaatgacaagaggaaacagactcccaagtggccagaccacttcaattccaaacaggaagtggttaaagtgcaggcaaggcaagaaagggtgttgttaggtgacagagcttggaggctgaagtcccagactagacgccttcattaaatccatactgtgcatcctccctctgcccagccaggaccttatcaaagcgggcaccgagcctcagcaggaacaccgaaaggatggtagagaagtcagccatgctgtgctaaggctctgggccttgtcagttttgtgtaacagagtgacccaagaagagctgtgaatgcggcagatcccgtggggactctgggcaagagcttgctgcagagggtggtggagaagcagcagggtgggtcagcgtgcatggcctggaggccaagagatgacttggagggtaagaagagtgattcccagcctgcaagagctggacctgggcccagaagggaagagcaacagtggatctgttccaccccggcctctccctacaaagccagtggatcaggggaggccccaggcagcactggcctcaacttcaaggcctgtaggagcagtaggagactcggatcagagagcagatgatcaaacagcagccttgggagctctgagcactggtcttaggagggggaggggaggaaaccggagcaaggaaaagctcaaagaaggaccctcctgcatgtcagaggcttttgggtgctctggaggtcgataatttctgccacgcaagttcctctatttgtcctccaaatctagaatcctggaatggtgtttggcatgtacgctcaggggaaatacaatatccccaaacccctggtccccgctccctgccccatcccagccccatcccatctccccacaggctcatatccaacttcttttttggtctcccagtatttgccacctagcttgccaccgccctgggcagtcggagacaggcaggaagcagccagaaggttgcgagatataacagctgggagggggcgctccctcctctcctcccactgctgctgggtctctgatctctcaccattcctcaggcaattacagagcaagcagctagggttgtcagctcagcaggccctctaccccccaccagcaccactaagggcaaaggagcggggaggggggagtgttccacagatggagccaaggccgggtctgccaagggtgacagacagagtgagaagaggcaggggggagcaggagacaaagacagacgtaggaagacagcgctaaccacgatggagatggttagggggtggggaaattccgaaacggagacccaggcagcagagaaagggagagaagaggaaaccggagcacaaagggtgagaggcagctgcagagtgcgccgctgagaaatggcagaaagagcgagaagagtgaggggtgggggtgggcgtgtgcacgtgcgcgtgcgcgcaggccgcctgcacagcgtccttgtccctgggggctgtgccaggcaaggggcggggaggagggaagatgggcctgggtcagtggaggggcttcccggcgtggacgtcacgctggcctgggagcagggtagagagacagacagagggtggagcagctgtgagctggggccggaggggcctacaaagccccacgcaacagagcatcaaggccctgcccacttgtggcactgggcaagggacggccgtgagacaggatgaatggcacactgctggctgacccatgccatgccagggaacaggtgggggtcgggggattcctgctgcgggtaggaacggggggagggggaagcacccagaaaatcccagggaagccttccaatattgctgctggctgggagtaagtggtcacctggctggaggagacgcacatgtgttaggccaagagtgagcctgcgtgaccatgcactgagtggacagtggccgctgtgctggggcagttgaagatggggccattcctgagtaagtccggtcccaaacccatcctccccggtgggaaagggccagggaggcaagggtcacgcccagcagcctacagggaggggttcagccccagaagagccttgccccatcccaccccacctggcctcccactacacccgcaggtccctcagggagtcctctgtcctctgctccaaagtgcctgctttggtctgatgggaagcagcttgccagggagggacctgggaggttgtggagcctggctagacctggagtgactgcctcctccctgaaaacacacacacacaccccatcaccaccaccaccacacaccttgagaagggaacctccagcggtgccctgcacatgtgccctgcacacctgcctgtcagttctcaggttctgcctggagttcctctcaaaggagaagcaacaagagagcccttcaacagcacagcagagactatccggcttctcctgcccttgtctcctggggacatggtgcctggtgactcagtgggccagagtgggggtggggctgggggctcagcacagggcacatgaaagggtcagagtgtggtgctgggcccatgtgcttgcaggcctgggagcctggggggcttctgtgcctgttggtgtgtatacgatggtgtgggtgtcacctacaccctgtgcactgtgtccctttaaggctcccgctggccctccccgccccgctccccaggccgtggctggcgggtttctatggtgatgcagcccaagtcccagaggtgggggaagccagaggaaagccttgttatgtgttatgtagacagcacataaagggggctgctccagggagcccccacaggtacctgggggcccagaagtcctttatgactgctgcttagtccctgcactcccaacctcacccctccctaagagggtacccttaggagagagtgagccctcagccccctcatctcgcctgaggcttcagtctccaaggcaactacaactcacctgtaatggaccattctccttaaaagatggggaaaagagacggaggttaaccctttgtggggttcagggaggacggtcttgactactggggaagggagggaggagccccactccatccccacaatcacatgcctctgtggtctgttctattaaatcaacttacagcgtggacttaccacgtaccagaaagcctcatgagcacttccactcacatccactcatctcctccccagatttgcctcagggagggaggtgctatcatcatccccattttacagatgaggacacggaggctcagaaaactggaaactgtgtccaagatcacagagctggcactgggtctcagcaggggtggggttttagagggcgtggtggctccctaagctgcctctcagaggctctggcatcccaacatgtgtgcctgctgggcttcccagggaaccaggggcctgggcgaggatggcctccaagccatcctgccccgtggggagggcttacttgccaggcagatggcaggcaaatgtcgggggcagggagtgacatcttgggatggaggccatgcggaagtaggatgtgatcaacatcacgtctcagcacagagctgaagcccgacaccaaacaaacccccaagtcccccatccaggtactcagtccaagagaaggccaactcctttcccttttgggcttggggacaggctggtttcttggtcccctcttctgctctctggaatctggacttgttctgatacctttcttgcaaccagaggctccagaacccctcccaaagaggcccctctccaatcagcatttagggacagcagtggccccattcttgtgtcgaaggagatactgatgcccagcaggcggcaaggcttcagcctccgagacccctagaaggcgagagaaatgaggtggcagcaaaactagggctcctctcaggccccaggcctcctcagggagctaggatgaccctagcactagagggggcttcagcggccaggccagaaggaacagactgcatccagttcctggggctgtggcctgaaaaggagagcagggaaggagcccagcctggggcagggagaggccctggcccacagcagtcctgggatacctagcctgtgttggtttgcggggggcggggtgggggtgcctggaaacagctcagacactgccaggccccacgggccccctccaggggccccactcccgaggggttaaagggcagagggggacacaggaagcccgggggcggacaatggggcctctgtgatccccagggcttgggcattcctaagtcatgaacacagacgcagatggctgggagacagggccacagggaacccccctccactgaagcacagcctgggttggccagaggctctgtccccatccagccactgcagcagccaccctcagccccaccccttcccagcacaggccctgttggggcatctgaggagacccacgtggcctcatgacaatatgtgtgtgcatgctggttcacgaacacacacacacatgcaaccaaatatatgaccccacccagacaaacaggaatactggaggttacacacacacaaatacacacacacaagcagagacacaaaccccatacatgcagataggaagtctgcctggctggagggcagggggcagaggggctcccgggactcagtccctttccctcaagttccactctcagacccgcactgggatggacgggttcagaagtcctctttggccaagtgcatggagcccaggacgctgccaccctcctgccccacccaacccctggccctcgcagctgcccctgctgggtgtaagggccagagatgagcaggagctgctgactgacagtggctgggcactccctctgcagctttccaacctgggaagaacacggggacctgggctgggggccactggacaaagaaaagcttctagaaagaacagcggccagaccctccccagctcctccctctttttccagccacagccttcaggaagccacaaagaccctgttgatatctggggaagaggcaagctgggcgggctacctcccccagtgctcgtctggctgctgctcaccaggcaccccccatacagccttccactcagacaaggcccccatggggggtctgggcccaaccccaaggcgtagagtccagcagaagggtgctgagtggctgctggacagggcacaacctcagggccctcaagggtgaggcaggggcagctgggggggacaaggagaggagcagagcggtggaagacagacaaaagggtaagcagagagatggagcagagccctgacgggaagggggaagagggaagggagggccaggcaggcagaggcagagggaggagacggggagtggtgcaccccatccccggcagcagcaggcttctgcctagaaggaggaggaaggtgatggccctgggggtggggcacagggagacgtgggaggctgcagaggagagagcaggggggcgggggaagcaggagaaggaggtgtccgagatgggccagatcagagcaagtaagacagcgactgcaggggcagggatgctgcaggcccattccagatggccccacccagggacccagccccagcccattgcaggggcagaggacagggcaatgagcaccctgctggggaccctagaagggcatccagaccccccgcctcccccactgtctgaaccacgagggagggaggcagggcccccactcatgcccccactcatgcctggcagaccagggtcttggctgggatccccatcctggcagacctcctcacaggaccccaccactaccccaggttctcccatgaacgtgccctcctggagcctgggccactctgcgaggccgcatcaccctcacacccagaaaagcactcagtgcagccatttcgagctttgaaagggaacttggtgatcaaggtagggcacacaggcctgtctcctcgaccctcacctgccagtcctggccaggtgcatgccaaggaaggcgccagctgtagttccagtggtggaaagggctcggacctgggagaggccgattgggggcacaatctgggcaccctgctcactgtaggagccctcaggccaggcccttcctcactctttgcctcccttttcccttcagataatcatcaagaaaaaagaaaacaagtgacaccccacgaagacagggacaatgctggtccagtttgtcactggctcttccatgggcagcccagagcccggcccaaaggagcactggccatgagcagctgcccagtacacgactgcccatcgtgggatcctgagcgcctgggtagggaagctcttcactggctgcagggcaggggaccccgccaccttgaagcgctgattgtcctcctgatgctcagcagggagctggcagctgggaacttggggaggagccttttaggagcgcggtgtagcaaaccagggaggctggggcgtgctgaacgtgtttccctcttggtgatcagatcactagcgattcttaatttcttttgttcttttctgtatatttcaagtgtcctacaataagatgtattactttcgggatcatacacacacaaacatcaataaatatggagagagactcagatgcagcagagagaaatgaccaggagccaaggaggtgggaaggtcccaggcccaaccctgccccaaacttcccatgtggccaagacagccgagtcctcaaaggctctggagccctcaggtgtgcacatgtgggcactgcatgggagctgtgccaggggagaggccaggctgggccaagtcccaccacctgcagcaaggagctgacgggaggggagaggccctggggaggcccccgccccagaaagatgatgctgggcagcagcccccaggggaagaagggcggactgcactgatttacgtcagggccacatgagtcagcagagatggcactgggctgccccgatgcccctgccctcagggtggggttaacaggggcagggtatctacctggggggtgccaggcccccactccttctggagaagggggcagatggctctaggcctgccttcctgagagggacagtgataggtggggggtccagataccctgtcgggggcaatggattgtagtgcgtgttctttgcaatccctgccaaccaagaggccccaaaagtctgacctggaatggagggaataggaatcgctgacccctcccataaccgcacagagataggaagatgtggcagtgggcaaaagacctgcagtgcgcagggaccgcctgagccagtgaggcccaccttccctcacccctacctgatggaccctacctgatggacacccatgcacgggaggcacagcagtgggtgcccgaaccgacctcacccactccagccctgactggccacagagcctgtggaaacgggctccagaggcgccctacgcctccggggaggagcccctggctctgcggcaggttttcgggtgagcccggaggagcccaggctgggatttggaaagaagaaggaggagaacaaagcccccccaaccttggggcggaggggcaggcagcgcccagtcccgttcactcccctccccccattgcaggggcggcttatcccgatctacccctcaccacgctgtcagccgggattttcaaccaaactgagctctcggctggggatgaggggcagccacgcccagggccacaccccacggcggcctgtgggggagcgctcgacccgatctggcttcctttctcagacacgcacacacgcacggggacccgccaacttcagcccccgcctgcccacacagaccctgcctgacgccccccgccctgttctcccgcccaggccagcatctggggccccgcaggttacccctcacctgtcgggctcgggcacccggcatccctcccccgccccgcttacagcccgcggtgcccggagcccgacgcccggcatgggtggggctccggcagcaacgccggttaccgcgggccggaccgggccgggactccctggtccgtgcaccccgggcagagcggtgtggtgtcgccgggggatcgcggccgcggcccgggtcgcacggggaggccagcccgccttacctgcgctgcggccaccgctcgggctgcccgcccagcctccgcgcacgccggcctcggacccgccgcccgagcgcgtctgcgatgccgatgctgcggcagcagcggctgtggcggggcggggcgggcgtgcgcgcaggggcgggggaggggagcgccggggaggagagggagggaggagtgagatcacctccccggccgcccgccccgccccgccccgccccgccgcaccctagcccctggtgccagccgagcgcggcttgggctgggggcccccgggcagcccactccgggagctcagcgggaccccagccgacgggtcccgccagacccccttccccgcagaccgggagtctccggccggagagtgtcctcagccccagcgcaagggagcccgctgtgaaagctcggagcgggaatcgcggggcgagagtgctcccagaggcctggggccgggcggtggagagaggagtccggcaaggaaggggatgctcccttagcctcggcctggccctcgacggcgccggccagcgatgggcacctgcacgcaacgcccccccaacacacacacacagggcaggactcccgggacctctcccgaatgccccccgatcctgagggcccagtcagggtcctgttgggaggggtgcgggggcttcgtcctcagcgtgttggggaggcgccgcggagcaccggctcctgcgcaccccagagcccaggtgggcggcagggtaggaggcgagcccaggggagacagggtctgggagagggtatccctcgaactgccacccccaactcccagattttcctccagctctctggtgtcttatttctttgtcctcgggattggccccattcgacctttcccgccgactccactctctcccactctcccccgcagccctgcacaggatcgagaaggaaggagctcctccccagtgccccctcctaggctcaaggccatgacctcacaggcgaggaagcaaaatggagggggtaagaattccggagccggcgagctggctgcagcctcagggctaggaaggcctagggccccgatggcagattgcagatctggcggccacggtatttttatgggcatgcctgttgcccagtgaagcattccaggggccctcgactcagtctcacaagactccccaagtggtgtggggccctggagggcccacatgggagcagccctggcatcctggcttggatgccccacccccatagtgccagcttcagttcccctggaatgggaagcttggggtggacccatctgtgctcagagagggtctggatgccatgtttgcccagcctttaggaggagaatggacaagactaggcacctgagtgaagacggacggctagggagactgcttccagagtgggggcacttgcagggcatcttcaggtgacagcagaggaaactgagcccgcctgggtcacgaggccagcaggctcatgagctgggccaagagggcgtactttccatgaggcactgagctgtggtcagcttcctgcctttgctgatctgaactctgataggcctctctcctttccagttgctgcctccactcactccctacgttcccagcctttcctccaagccccaacttctgcaaatcctttacctaatctagggtttgatgcccatcaggatggtgaagtaagcagggaatagagcccgtttatacgcacctgctaatgtgtagtgatgggtccatttatggtaacaaaaaattcattactaggattacacgacatcacatttcctgagcacagccatggacctgccatcgttacatttcctgcacatttaaattgcacaccaacctggggaggtctgttgaagcattcgccccacgttacagatgagaaaaccaaagcccacagagctcaaggctgggtccagcaagcacagttaggaaggtctctttctctccactggctcattgcatccacacacacaccccagatgatggtgctgttattatcctcactctcccagtgaggtacccaaggtccagagaggggcagtcatgcaaccaggaagaaattggcactatcagtgcccccatttcacagatgaggaaaccaaggttcagaggggtcaaatgacccacccaagatagcccagaaggtaaatggcagaactcggacttgaattcccttctgcttgaccacgatgcccattctcacttccatgtaatgaagtggaggagccaatgggagcaagagcaagagtgacagaagaccaagggcagagcaagtcccaggagaagcaggagggactggccctgaacaagaggcaagccacccccccactgccatgtgcttgctgttggaggttagggggacaccaagtagacagatgactgtctctttcccttcaacgtcaagtgcttctcacagccctgctccctgtgacccagccctcatagacacagtggactggacaagggaagccccagactctgaccctgtgatgagcatgcagaagacgcagaagccacagacgacagtggggcagtaaggaagtgccagcaggcaggcggggtgggctcagccagacgtgtctttctctgttctcctttcaatctttctgtgtcttcatatctcaggtgtagcgcttggaaacagcacatagttgggttttggtttggtttgattctgtctaacaattcttgtctttttaaaaatcagctttgagacctgcctgggcaacacagcgagaccacgtctctacaaaaaaaattttaaaattaggcatggtggtgcatgtctgtagtcccaactactcaggaggctgaggtgggaggatcgctggagcccaagaggttgaggctacagtgagccatgatcacaccactacactccagcctgggtgacagagtgagaccctgtctcaaaaaaaaaaaaaaaaaaatcaactttattggagtataatttacatacagtaaaattcatccttttgaggtttacagttcaaggagttttggtgaatgttgtgtgcagccaaccactcccaccaccccctgcccttggccaccactgatctgatttctgtcttttctaaattttattataaatggaatcataccgtatatattcttttgtctggcttctttcacactcacgcagcatactttttgagcttcatccatgttggtgtgtgtgtttgtgtgtgtgtgtgagagagagagagagagagcatgcgggcgagagagagcagtatatttccttttgattgccgagtagtattccattgtttggttggatcagggtttgttcagccattcactcactgaaggacacttgggtagtttccagctttgtgtgattatgatggagcagctctaaacatttatatgcaagcttgtgtaaatgtgtgtcttcatttctctaaggtaaccgcttaggagtggattgttcagtcaagtggtagattgatgttgaacctgcctttgtctttgaactgtgcaggtcagctggtcacacggtgatgactgctgctatctctggatgtagtcacgccaggtgagtatttgctttctatttgtcctgctttccccatctctctcccccacctccactttattattttttattagtgttgttattactttgagacagggtctcactctgttccctaggctggagtgcagtggtgtgatcatggctcactgcaacctcgacctcctgggctcaagtgatcctcccaccacagcctcccaagtactgggacaacagatgtgccaccaccacacttgattaatttttttttcttttttggtagaggtgaggtctcactatgttgtccagactggtcttgaactcctgggctcaagtggtgatccactgccttggcctcacaaagtgctaggattacaggagtgagtcactgcacctggcctcacccccacattgtatcagtgaaggtgtgtctggagttggttccttccagtgggttcttggtctcgctgacttcaagaatgaagccgcggaccttcgcggtgagtgttacagctcttaaaggtggcacagacccaaagtgtgagcagcagcaagatgtattgtgaagagtgaaagaacaaagcttccacagcatggaagaggacccaagcaggttgccgttgcttgtggggggcgggggggggccagcttttattcccttatttgtcccctcccatgtcctgctgattagtccattttacagagtgctgattggtccattttacagagtgctgattggtccatttacaatcctctagctagacacagaaaactggtgcgtttttacagactgctgattggtgcatttacaatcctttagctagacacagagcgctgattggtgtgtttacaatcctctagctagacagaaaagttctccaagtccccacatcacccaggaagtctagctggcttcacctctcaaaggttcagggtaggaagcagaaattcctcccgtgatcatgaacagaaagggattctgtagaagggattagatgcttacctgaccattggatgggccaaaggagtggactctgggctaggtgttgataacaccagtgcagacctggctcctcaagggagctgctacctctgccaccatccacaagatgggggattgggaggcggccagtgtaacctttgagttcaaaaagacaccaccaaagtcatgacctgaggatcagcaagctgggaccaggaagccattgctgccacaagtgcccctcaacaaccaagaagtgaaggttagaccccagaaattctttgatgtccagcagaaacgcagccccacacagcagaagtgtggcttcccttccttcagtcatccaaacttcatgtgagcacacccaatttggcaattggcaaatttgccaatttgccaattggcaaaactaaatttgcttcccaaagtccagctgctctggagtctggaacatttccagcctctgccatgcagagcccacaaggtgggagtgagtgccgagagctgtcaatatgcccaggcagatgctctgctcttggtcatcttttagatggactggatttgttctctcattctattttctcctctgtttgtttagaagtgctctatgaattttttagtagttcctctacctattttaacatgcattcttaataaagtctaaagttaactaatacctctgctctggtggttttaatgtaggtccataaattatttgatactcctgccttcaaaaggtagtgcttaattctcctcctcttgagtataggctggacttggtggctcacttttttttttttttttttgagatggagtttcgctcctgttgcccaggctggagtgcaatggtgtgatcccagcttgctgcaacctccacctcctgggttcaagcaattctcctgcctcagcctcccaagtagctgggattgcaggcgtgggccaccacgcccaactaatttttgtatttttagtagagatggggtttcaccatgttggtcagtctggtctcgaactcctgacctcaagtgatccacctacctcggcctcccaaagtgctgggattacaggtgtgtgagccaccacttttttttttttttttttgagatggagtttcactctgttgcccaggctggcatgcagtggcgtgatctcggctcactgcaacctccacctcctgggttcaagcgattctcctgcctcagccccccaagtagctgagattacaagcccccaccagcacgcccagctaatttttgtatttttagtagatacgaggtttcatcacgttggccaggctggtctcgaactcctgacctcaggtgatccgcccgcctcagcctcacaaagtgctggaatttcaggcttgagccactgtgcccggcctcatttcttttttaaattttattttagaagttgaggtcctgctctgtcactcaggctggagtgctgtggcatgttcatagctcattgcggcctcgaacttctgggctcaagtgatcctcccgcctcagcctcctcaggagctgggaccacaggcacacaccaccacacctggctcacttctgatgaaaagaataaagcggaagcaatggctgcagctgtggggactaggtcacacaggcactgctgcttcctccttgttttctctctctctctctctctctctctctctcggattgctctgttgggtgaagccaggtgccacatcgtgaggacactcaacagccctatggaggagctcacatggagagaaacaaaggtcttccgccaacaaccatgagtgtgccattttgaaaaggatcctccagccccagccaagcctttgcatgactgcagtcatggccagaatcccactgcagcctcacaagagcctttgagctagaacaatccagctaagccactcctgaatcctgacccacagagattatgagataataaatggttactgtcattttgaactactgcatttgggggtgatttggtttgcagccacagatcactaatacatcttccctcctcctacacaatgcacggcctgggataacatactagccacatgaggtgggccctattatcatgtaggaatgaggaaggcagtgagctcagatatgtggacaggaacccaggcagagtcagccgtctgagctttgggaagcctggttttcagtagctctagggacttacccacacccccacactcccacccctgaactgctattatggtgctgtagcccccacggtgcctgtcactacccaccagctgctgtcccctctcctctgtgtccatcttttcttcatgtctttgcttctcctggcattctcctgctttgtgacaaatacccgtggctttttctgcacatgtcttttggcttctaatctcactgcagtttcaattccaagagagagaaacttatgggcccaaatactcattatcctcattttggtggagccttcatgccaggtaacttcgtaggcaactaaccagcctatggactagctagtcttggccaggtgcgggctcctggtccaggcagctgaggccaaggttggttcaagctgtgtgataggcagtatggccatctgttatggacttaatgtgtgtgtacccccaaaattcgcacgttgaagtcctaacccccagatggagcagataaagaagaacagagaggctggacatgatggctcatgcctataatcccagcactttgggagaccaaggtgggcagatcacctgagtccaggagtttgagactagcctgggccacatggtgaaaccccatctctacaaaaaatacaaaaaattagccaggcatagtgacacacgcctgtagtccgttactcgggaggctgaggtgggagaatcacttgagccttggtggggaggctgtagtgagccgagattgcaccactgcactccaacctgggtgacagagtaagaccctgcctcaaaagaaaagaaagaaagagagagaaggaaagaagaaagaaagaaagaaagaaagaaagaaagaaagaaagaaagagaaagaaggaaagaaagaaagagaaagaaagaaagaaagaaagagaaagaaaagaaagagagaaagaaaaagaacacaagaaaagcactgttccctcccctccaccactgcccctaccatgtgaggacacagtgagaaggtggctgtctctaaaccaggaagacagccctcaccagaagtggaccctgccagaccttgatctgggacttccaacctccagaattgtgagaagataaatttccattgtttaagccacccagtctgtggtattttgtgatggcagctggagctgactaagacaccaccaatgggtaagtcactggctagtggtgctgctgcagcagggagtatgtcttggtgggcatcttgctcgacctctcctatctaaccacactgaagtcatgcattcccttgtttttctttatactaggcccacgaaaccccatgctttgaaaagaattgcttgtttgccttcaccactcctcctcacagcctggaggtgatcatgttactgtgtagactggtatccctagggacttatgggctccaaacaagctgcccatgaatatcacaatcctgtcacatgcccttagccagccctgcttcccttccacgcagtgcaccggctgggtgcagtggctgatgcctgtaatcccagcaccttgggagaccaaggcgggcgggtcacttgaggtcaggagttcgagaccagcctgtccaacaaggtgaaaccctgtctctactaaaagtttaaaaaaaaaaaaattagccgggcatgatggggcacctgtaatcccagctactcgggagactgaggcaggaaaaccagttgaacccaggaggcggaggttgcagtgagccgagatcatgccactacactgcatcctgggcaacagagcaagactccatcagaaagaaagaaagaaaagaaagaaaaggaaggaaggaagaaaggagaaagtgacagattaagcacatacattcactttctcttcctcatgaaatcccaccaaaatgacagtaaatgactttttaaaaagaaaaactcccaaggacagaaataatgggaaaatagaaaacagcagcaaaatcatgggagctgaatttcactgcggaacccacacgcatccagaaaatgggggtgagtatggaagtgccattaaaagtctgttgaagaggcagtcagatctccacatgcttttccccatcccaacggaacagaatgtttattctttggagatgatgaaacaaagagtgtttcaagtggggagtaccaggaacagcttagatggcaccatactaaaaatgagggggttaaataaatatttacctactgaatttggaccactttggaccctcctggcccactctgtttctcaagtgctgacaaccagcctcaggcagcaggctaaagatctatctctgggtatttggccatcccaaggtgaacgaaaaggtagtaaaattggggttctccaataaaaccagccccgctacatcatcctatgatgaagctcatagttgacatgtccttccttttcaatcagctcattagtgccccattctttttttttttttttttttgagacagagtttcgctcttgttgcccaggctggagtgcagtggcacaatctcggctcactgcaatctccacctcccggattcaagcgattctcctgcctcaggctcccaagtagctgggactacaggtgcgtaccaccatgcccagctaatttttgtatttttagtacaaacagggtttcaccatgttggccaggatggacttgatctcttgacctcaggtgatccgcccacttcggcctcccaaagtgttgggattacaggcatgagctgccatgcccagcctgccccattcttaaatatgagaagacaaccaaggatcaccagacacctgaggaaaacctttagcatgaaagcaggaaagatcaaaatcaaaacaaacaggaaaacaattgttgggaaacacgactatgagaggtaataatttttaaaactaggctgggcacggtggctcacgcctgtaatcccagcattttgggaggccgaggggggcagatcacaaggccaggagtttgagaccagcctgaccaacatggtgaaaccccgtctctaccaaaaaatacaaaaattagctgggcgtggtggcgcatgcctgtaatccaagctactcagaaagccgaggcaggagaattgcttgaacccaggaggcggggcttgcggtgagctgagattgtgccatggcactccagcctgggcgacagagcgagaatctgtctcataaaaaaatttttttaaaaagaatttttaaagctattaactcactcagggagataatagaatgtaaaaatatccatgaatcaagaataggatgctataaaaaaggaacattcagcgaacaaacaagagttttttgtggaagcatacatgaaaaattcaatagatggatatttttcttctaacaaaatacagaaagttgcaagacaacatcactcccatcctagctacaagaagctggataacctacaaatcataggattttttttcttttaaggctatcgggaagctgaggttggggggaaaaaaaatcaaaatcttgaaaagccctttctaggagaaaagagccccatagctgctttgatttttggcacagcagcagcaggaagaggaggctgccacagacttgtgtacaaaagaaacagagaaactctgaacacattttaaaaggctgagtgtgcgacggcatgaggctatagactctctaatgcctcccattcaagagagcttacattcacccactaactcttttgcatgggccttcaccaagaaagtttgaaggcaaagcaggtgggccgaaagatactctccgaggtagacatgtgctcaggctgctgaagtctggatgcaggacaagggaaccgacaggaacccccctggggctcctgaccttccactgagtacagagcagctgtaactggtgaatgaagcagggcaggaggactgaagagttcatccccaggctctaggaagtcttaaggcaggacagaagaactgaaacaaaccttccggttgattctaatccttacactgagtacaaaccagaagcgaactgtggttggagtggaggcaaaagacctacaataggcacccgggaatgtgcgctcagggatctgctgaagtctacgggtgaggcaggagaatcaaagaaactcccagccactcagatcacaagtcccaccaaagagaatgttctgatcctgctctgaaatcattcgaagtatacagaaaactgagtctacgcaaagcaacaagaaaccccagactccacttaactacacaccagcctctaatacacacacacgcatgcacacactaatggcctgacaagaagggtcatgccctttttggggcataattttatgtgtatcttccccactgttctattacatatatttaccccaggagggataaatatatatgattatttacttcttaaaatagaaataggccaggtgtggtggctcacacctgtaatcccagtactttgggaggctgaagtgggaggattgcttgagcccaggagtttgagaacagcctgggcaacatggaaagaccctgtctctataaaaatacaacaattagctgggtatggtggtacatgtctatagtcccagctactcaggaggctgagatgggaggatcccttgagcccgggaggtcgaggctgcagtgagccgtgatcatgccactgcactccagcctggctgacagagtgagaccctgccttaaaaaaaaaaaaaaaaaggaatttgggaagggctcacctgggcagtcctggcccaggtctttcatgtggtggctgtcagatggtggccctcttcatattgcctcagagccttttttttttttttttttttgagaaggtgtctcactttgttgcccaggctggagtgcagtggcggggtctcagctcactgcaacctccgcctcccgggttcaagccattctcctgcctcagcctcccgagtagctgggattacaggcgcacgccagcacacccagctaatttttgtgtttttcagtagagacagggtttcaccatgttggtcaggctggtctctatctcctgacctcttgatccacccacctcagcctcccaaagtgttgggattacacgtgtgagttactgtgcctggcctcagagccattttctgtggtccttccatgatggctgaattgggcttccttatagcatcagggaagttggaatgcttacatggtggctaaaggcttgaagagtgagtgtccctgttaacaaggcagaagctgcattaccttttctgcactagcctcagaaatcaatcagcaccacttttaccatattatcttgagtacaagaaagtcacaagcctgcccagattataggggggagggttaaattccacctcttgatggggaagtggcaaggttccaggagagcatgtgggatgggagatattgttggggctacctttgaaaaacacaatctgccacacacaccagttaaaaggcagagactgttgggctagataaaatagctatatgttatttacaagaagcacatttgaagcataaagacacagacatgttgagagtagaagtatggaaaaagatataccaagcaaccactgagcataagaaagctgccatggcatcatactaatatcaggtagagcagaattcaagacaaagagtttactagagatcaagagagacatgtcataatgaaaaaagaacacataatcaagaaaacacaaccatttcaaatatataagcacctaatctaccaaatatatgaaacaaaatttataggactaaagggttctagatacagataaatctccaaacatactggccaactttaacattcctttctcagtaaatgataaaacaaataggaaaaaaatcagaagaatatagatttgaacaacactatcaacctaattgactcaattgatatgtacggaacactacatccaacaacagcagaacacatattcttctcaagtgcagatggaaccccaaccaacacagacaacttctgggcaatcgagcaagcctcaataaattacaaagggtcaaaatcatacaaagtacgatttctgaccaaaatgatgttgaattagaaatcaacaacaaaaagacatctaggaattttctaaatattttgaaatgaaaaaatatctacttccaaataacccaagaaccaaagaagaaaccacaagtaaaattattggtagaacatatctttcactgaatagaaatgcaaataaaatatgaaaatttgggaattcaacaaaacaactgattagaggaaaaggaactacttatattagaaaagcagaaaggtcccaaaataattatttaaatttctactttaagaaactagagccggtcacggtggctcacacctgtaatcccagcactttgggaggccgaggcaggcagatcatgaggtcaagagatcgagatgatcctgaccaacatggtgaaaccccatctctactaaaaaatacaaaaattagctgggcgtggtggtgtgcacctgtaatcccagctactcaggaggctgaggcagaagaattgcttgaatctgggaggcagaagttgcagtgagccaagatcacaccactgcactccagcctgggcaacaagagcaaaacttcgtttcaaaacaaaacaaaacaaaaagatcaatgaaattgataagcctctagccagactgatcagaaaaaaaaaatggagagaagatacaaattaccaatatggagaataagagagagggggcattattacagatcctacaaacataaaaaagtgataagaggatgttgtgaaaaacttattccaatacatccaacaacttagatgaaatggacaaattccttgaaagatacaaatggtcaacgctcatttaggaaaaaatagataacctgattagccctgtatctgtcagaagagttgaatttataactgaaaaaattctcacaaagaaaactccaggtttgtgtaaataataccaattctatactaactcttccagaaaacagaaaaagagagaacacttcccaactcgttttataaagtcagcattatactcatccccaaaccaaagatattacagaaagggaaaacgtagaccagcatctctcattaatacagatgtaaaaatggtaaacaacagccaggcacagtggctcacacctgtcatcccagcactttgggaggccaaggtgggtggatcagaggtcaagagatcgagaccatcctggttaacatgatgaaaccctgtctctactaaaaacacaaaaattggccgggtgtggtggctcatgcctgtaatcccagcactttgggaggccgaggcaggtggatcacctgaggtcgggaattcgagaccagcctgaccaacatgaagaaaccccgtctctactaaaagtacaaaattagctgggcatggtggcgcttgcctgtaatcccagctacttgggaggctgaggcaagagaatctcttgaacctgggaggcgaaggttgcagtgagccaagatctcgccattgcactgcagcctgggcaacaagagtgaaactccgactcaaaaaaaaaaagaaaaaaaagaaaaaaattcaatactcacttgtgataaaagctttcagtataccgggtgacagagtgagagactatgcctcctccccaccaaaaaaaatataaaaaaaaaaaagaagttacacaaaatactatgtactcttttatttatttatttatttttattattatttttttttgagacggagtcttgctgtgtcacccaggctggagtgcaatggcaagatctcggctcactgaaacctccgcctcccgggttcaagcgattctccagcctcagcctctgagtagctgggattacaggcttgcgccaccacgcccggctaatttttgaaaatactacatactctatgattctatttatataaaattctagaaaaggaaaatctatagtgatagatcagtggttgctaggctttcaggtaggggaagaagcttgactgcaaaaggccacgagggaactttctggaatgtcgaaaatatttattctatgtcatgattgtggttgtggttacacgactgtatacatttgtcaaatcttactgaacagtacaattacaattaatgaattttactgtatgctaatcatacctcaataaagccgaaaaaaaaaaaagtcattctggaggagagaaatcattgcctgcggagggccattccagggtggtgagtgcatgagcactgaagacacccggagcagctgctgcaataatctgggggaggaacgtgcaggcagagagagcaagaggaagtcagactgggaaaccccgaggcagttacccaaacagcccactaacagcaactgcagtcggccgcctctggggaggaaagcgggaggggccactgcctttaaaaaagaaaaaaaaaaaaaatctctgcagttttgccagggagccgcctcctgcctgactctcacatgatgacctggaggccatctatgggtacggccctcaagccctcaacgctcaccctccttctaccccccgcccctcaccccagcacctgctggagaccctggccctcccttccactccgcgaggctcttaatctatccagttccatgggctgcctttccgcagctataaacaggctctgtccagctttcccagttattattcacttaggtgaatggacacaattagatgatcatccgcaggctgtcttcctgtcatcattggcacacgcacacaccctcacacacgcacacaccctcacacacgcacacaccctcacacacgcgcacaccctcacacacaacccccccaacgccacacacacacacaccacacaccctcacacacaaccacccacgccacacacacaccacacaccctcacatgcacaccctcacacaccacacaccacacacaccccacacacacgcccaccctcacatacgcacactctcacacacaccctcacacactctcacaccctcacacacgcacaccctcacacacaccctcacattcacacaagtacacttgagtttttattaaatttgtttttgtccccttcaatcccatcctccaacccgttgttcctccctatctcctgggctctaggtattctccttcgggtcacagtccctgtgagggccgttcctgttgacaggcacttggctccgtccttcccactgcccacaggctccaccatctgcacatgcacccctcccacacaatcgggggcctctttctcctcgtccttggctgcctcctctttgtcttccaccccttacaaatccttcagggccctttaaatgccttttccacctgcctgctccctctagccccgctgcccagtgttaagtgggtcgcaccatttctctcctgggtgacaggcacagcttccaccagcctccctgcctccactcttctctgcagaagcccatgtgctcctggggcagagcccaggtccttccatctctgcagccacagtgctaggccagcggcacttgcagtttggtgaatggaaggttctgatcatggggaaccggtagatagagagggacaaacagtgtccccccaatctgcctcctgtcctcttctgcccagacactaggctggaagatcaggagccacaccttggcactcacagagccctttctgcaagtcttagagggaccagtgggaggtgtgcacacaggggctgcgctggcaggagtgggggcctggcacacccccaggtagatgccctgcccgttaacgcccaagggcaggggcttgagtgactcatgtgggcctagcgtgaatcagcacagtctgcccttcttcccatgggagctgctgcccagccccatctttcttggcccccgaggggtggctgcccagggcctctctcctggcacagttccatgtagtgcctgcccatgtggctcccagttcctccccggggtcctggctgagcagaatggcactggatcctgatctggcttcttgcatcccagaggagaccgccatgcgggcccttcctccagattcttccctagtttaacaacaggaagcgaggagtccaggggggcagagattgccacgggcctggccacattgctaggggaggtcccaacctgctgctgagatccggcactgcacagcctcgttcaggcagagaaactgataaggagatggttgtctgctcaccccaaaaggttagcatggattcctcgccctagccggctttagacggagggaacaaaggctttcccaaggccctgccagtccccacccctgcccatcttaccaccgtagtctccctcaatcatcaagtcccattgcacagaaggggaagctgaggtgccaagagctggcgtggcctgttcaaggtcacactactgggcaggggccaagcaggggctggagccttgctttcctattccccagccagggtccccaaattctctgccagttgagggaagccatctcctattccactgatctgggtggcattaggaaggccttttctatgctcctagattagtgacagcatgcggttattggggacagcatgaggatgtgcatgcgctgaggagatgcagctgaagcgtcaggcctggggtgccagcactctgcagcctgcccccaaggggctctgcaaaaacatggcaaagatgcggggtgtgatgtgcacctgtgtgtgctgcgggtgtgtgcgtgtgtggtgttggctgtgcgtatgtggtgtgtatggctgtgtggtgggtacatgtgtgggtgtgtggcgtatgggagtgtgtgatgtgtgcatgtgtgtggtgtgtaatatatgtgtgcatggtgtggtgtgtgtgtggtgtggcgtatgggtgtgtggtgggtgcatgtgtgtgtggcgtgtggctgtgtgcatgtatgtatgtggtgtggtgtgtgcgctgtctctggaaaatgcccaccctgtgttcccaccaccctaacagggccgggaggggccagggtgctgccaggctctctgggcaggaagaggaggccttggccgcgggccggacttgggcctggtccgtgaggctgttttggtctctggcttcacaggcaacagagaagacagacaaacaggaagaaagcagctgccttgggctgggctgggctgggctggcctcggctgagccaagccaggcctgggtgcggggggagtggaaagagaactactgggatgggggctggagggggtgtggggacaggggaaggagagaggtgttgggggagggaggaggagggctcaggtacagggaaggtgcgtccatactcatggtatgttcaagaacatgagcgagcgtctctgtgttgtgtgtttgtggctgtgtggctgtatcatgtgaggttgtgtgtggtgggagggagcccgtgagcacacggaggtccccagcccctcttcctaggacaggtagttgcaggtggggcaggaggaagagggtgggggtgtccctggatctcacaggggttcgtgaagcctggcttggcccctgccccactcctccctttcctgtccctcgtctccggccaactgggccctaactggggaggaggaggggcctgcgtgggcctgggaggggcccagcgaaagtgttttcaccccttccttgcctgggcccagcgaggagcaggaggaccccaacttgggaagggggcgtgaagctcccatgaaaaagcagcgcagtcctgggccagacccaccgctctctggcctcagtttccccacttataaaatgggaatgctgaactaagtgacctcccagagcactgccaacccagacaatccaaccaggggggcgtggtagggtgagggtgggcgtggaggctatggcagtgggaggagggagtcctgggccgggaccagggaggccctggggaaaggaagggaaacaggaggccaggggaggcctgggggaaagggggagggggaggaagtcccctcctggccaggtcactcccagaggctgggctgggccagggcagggcagccgatggagagcagatctgagcacccagccaccttcacgccaccgcccagctgcccaggagcccagccaggtaaggggctgcgcctgcctgcccccctgcccagtccccagccctcggatggtggcctctctcggcctcggttggggcaggggagttctgcgtgtctgtctggggtgcccactcccaaacccgggactcatgggctgcctgggggatcctgggttctgtgcatccgtctgtctgaccatccctctcaatcttccctgcccaggactggccatactgccaccgacacgtgcacacacgccaacaggcatctgccatgctggcatctctataagggctccagtccagagaccctgggccattgaacttgctcctcaggcagaggctgagtccgcacatcacctccaggccctcagaacacctgccccagccccaccatgctcatggcgtccaccacttccggtaaggcttgcccctccatgagtccggtgggcagagtgggtttgacgattcagggaagcccctctttctaaagacctccttcaccctcacctctgggtgtgtctctccaggctgccaatgagtggggaggggagcacagccccacttccccgccagggctggggctggggctggggctggggctgcccttccttctggactgcatgagcctggggtgtgtatccctcataacatggctttcctggagtcccctctgctaggagccaggaagtgggtgtccggatgggggcacgggaggcaggcctgagtccccctgcacagcaccctctctaaccaggccctcttcccgactccttcccagctgtgcctgggcatccctctctgcccagcctgcccagcaacagcagccaggagaggccactggacacccgggacccgctgctagcccgggcggagctggcgctgctctccatagtctttgtggctgtggccctgagcaatggcctggtgctggcggccctagctcggcggggccggcggggccactgggcacccatacacgtcttcattggccacttgtgcctggccgacctggccgtggctctgttccaagtgctgccccagctggcctggaaggccaccgaccgcttccgtgggccagatgccctgtgtcgggccgtgaagtatctgcagatggtgggcatgtatgcctcctcctacatgatcctggccatgacgctggaccgccaccgtgccatctgccgtcccatgctggcgtaccgccatggaagtggggctcactggaaccggccggtgctagtggcttgggccttctcgctccttctcagcctgccccagctcttcatcttcgcccagcgcaacgtggaaggtggcagcggggtcactgactgctgggcctgctttgcggagccctggggccgtcgcacctatgtcacctggattgccctgatggtgttcgtggcacctaccctgggtatcgccgcctgccaggtgctcatcttccgggagattcatgccagtctggtgccagggccatcagagaggcctggggggcgccgcaggggacgccggacaggcagccccggtgagggagcccacgtgtcagcagctgtggccaagactgtgaggatgacgctagtgattgtggtcgtctatgtgctgtgctgggcacccttcttcctggtgcagctgtgggccgcgtgggacccggaggcacctctggaaggtgggtgtagccgtggctagggctgacggggccacttgggcttggccgcatgcccctgtgccccaccagccatcctgaacccaacctagatcctccacctccacaggggcgccctttgtgctactcatgttgctggccagcctcaacagctgcaccaacccctggatctatgcatctttcagcagcagcgtgtcctcagagctgcgaagcttgctctgctgtgcccggggacgcaccccacccagcctgggtccccaagatgagtcctgcaccaccgccagctcctccctggccaaggacacttcatcgtgaggagctgttgggtgtcttgcctctagaggctttgagaagctcagctgccttcctggggctggtcctgggagccactgggagggggacccgtggagaattggccagagcctgtggccccgaggctgggacactgtgtggccctggacaagccacagcccctgcctgggtctccacatccccagctgtatgaggagagcttcaggccccaggactgtgggggcccctcaggtcagctcactgagctgggtgtaggaggggctgcagcagaggcctgaggagtggcaggaaagagggagcaggtgcccccaggtgagacagcggtcccaggggcctgaaaaggaaggaccaggctggggccaggggaccttcctgtctccgcctttctaatccctccctcctcattctctccctaataaaaattggagctcattttccacatggcaaggggtctccttggatccgggtaacggtgggtgtggaggcagcacagagacatacacagactccccacacacacccacagtcacgtgcacagctctggaatccatggcgcaggcagccaagtcttcaaagctgcaggacccctggggaagctgttctcacctccagcacccacctgcccacccgagacagagagctggctcccatcggggaatcaacacgaggtctttatgaatcgccacccagccctgccaggcatctgagcaagggtacccgccacccagcagccactgatcagccttccacaaagctgcagaagagggctttccccagcatccttcctcagctgcctccaaaaggggcctgggccagggctgaggggcaggcaggatgtggagcgggcatccctgtgtgcacggccccatcccacctctctgcacagggtgaagtgcaggcaccctgcacttgctggacagggctggagagaagcaagggggctggggagagtggccggtccagcgggtagccgccgggggcacgcatctccagcagcggcacctcagtgtggcttgggggtcgtgtctaggccctgggggtgggaagctgagggtgaggctggggccccagggccccgggagaagcctttgttcctgcccaggcggctgctgggcggggcctttgggcttcggggcccaggactgggagaggtggtagatgctggcccaaggccctggcggacagaggtctttcccaagagctccttaaacacagagtccatgttctgtgccacagcctagcggaggggaaagaaagggagagtgaccagtgagttcccccgactgaccctgcccaagacccacctgagttcctcccactcccaaagcaagccctcagccaacatccccagtccctcagcctccaggtcactctcccccactttgcacctggcatccctcctgtccctgttggtgtctctgtcacagtctcctctgaggacagcaattccttggtttagcccggaagtggggacccccctcttctcgcccccactctttccctggcagagatcacagccccctgcccatggcctcagggaccgccagcgtgcggggactccccagtcaatgtcctcccatggcgtctcctggctgccctgtccctggctcccgctcctgctcctccgtgtctaccggaccctccctgggctccctgggcctgggggcttggccacacctgggacacccgcatgttcttgggctctctcctccttgggcttagcaactgtcccgcgggcttccacgttcagcccgacagtgttcacagggcccatggtacagagcacggagcagggtcccccaggttgtgcgcttgccagggccacatcttgagccttcgctctgctccttcgagagccgctgctgccccaccccaatccccaaccagccaccccctcctgcctccctgccatctgtccctttcatcctccctggcgtgccaagcgcctgccatggcaccgcctgttacctagcccagctacaaatgccagccttgaatctgccctggagtcccttgcctctaccaggtaaacagccttaactcagccctgccactccctgctctgaagctgaacatgaatcccaacgtgcaagccaggtgtcttctgtccctctcatccctgcctccgtagccgtccctctccatccccacccgccctcacatctttgccttcctgccctccacaggctctgccttgggcctgtgtgtctggcggcaggttcccttgagctaaggccagggagggcaacgactggaacctcgaggagggaggagtttggcttccaaggggaggcagagatcccccaggacagatgtccctcacctgccacacacccactctcaccttatccacctccacgtgttgctctggggaggctgggaccaagcagcgtcgtctgtgtccagagggtcccatggcctcaggtgaggtgcatggctctggcctgcaggacagacagggagcctggtgggggccctgggaagtccctgagctagctgggcagtggctcctcccatcctggggtgtggccaaggaaaggaggctggcccagtggtccccaagctcctctagagcctctccctgtcacaagctgggtcattctgtcacgtcctcatctgccaactcctcccactcccactggccaaagcctgaccccagtcccctctggcctagaacagcacacgtgtggccccctgagccccgtcttcttgctcaccggtggaccagctccgatgccaggaggccctcgggactgctcccagactcccctgcagtctgcagccctgcgcccaccacctgcttctccgtcctgcggtgggaaggaccggcctgtttcgagtgctccttccctgcacggggtccagggccagcagctccgcgccagccaggagtggtcagagaggctctgttctctggcccagcccagaccttcagaatctaacttggggtcgggggaggggtggatgaaggggagactccgggagccctggggcctgagggcgcggctcactcacccggcgggcagcgtgatatacttgtgggggatgaggccccgcatgccgttgtgctccccccgccaccagtcgctcgaggccctctcgtgcagccgcagtacgtccccccgccggaagctcagctcctgggctgtgcggcccgtgtaggcaaagcaggccacagcctccacgaccccctccaggtctggggaggagagggggtccaagctgtgggagggggtgtggacactagggtggggacagggtggggctctctgcccatcgccctcaccatcctcctgtgcgggcatctcggcttccagctccggctcattgtccgcccccaggctctccagctgggcgtccctgaggttcagggcagagcgaggcagatgaggggggctcttctccagtggaccccccagtcccctcggcagcaccaagggtgtaccccaggcagctggcggaaggcggtgccatgcacttctcgtagacggggccaggcagcgaggtcaggggcgggaagacccgatcgggctgcactatgagcgtctgcaccagctggttcacccggccctgcagcgccaccgggtcctgcccagcgggcaccggtagcagcgtgggcccgaagcacacggccaggttgtaggggtccatcatgttctcatcgctgtactgggccaggctggggggacacgcacatcacaagcagagagcccgcaccccgagtccccctgtcccctcgacccctggcccccaccccagcactcgccccgcagcactcactggttgaggaaggtgaagaggtagcgcagaaccaccagcaccggcgcgggcagccgccacagcaggcggctcacgtgctccaccctctccgctgtggcctccagctctgtggccaaagccgcccagagagagccgcgtgagcggggctgccccagcaagtgccctaccccgccagcctcaggccccagcctcacccgaagaagccagcagctcgccgaacaggtctggggggaagagtgggggctccaggctccggaagtagagcttcagcaccccggccaccgagtccaggtcatgggcagtgcagccctccaccagtgggtcctcccctgcagatgggcgagtggtgcggtagggggaggaagctggtgacatctgcccgagcccccacccccgcccgccctgcccgtccccacctctctcgaaggcatcacggatctctgagacccggagctgggcacccgatacccggaagatgccttcatgctgcaggcctgtgggaggacaaggagctggtgggcactgagcatcttccccagcccctccaggatggcctcccatgccaggtgctgggaactgggtgctgggtgccaggacatcgggaggggctgggtcctgcttaccattgaggttgatgaagcgaatgcagctctccaccaccaggggcacaggctggcctgagctctggggacagagggtgtttacttcaccatggacacagcatgccctgtgttgtcattcaattgctttttttttttttttttttttttgagacaaggtctcactctgtcacccaggctgaagtgcactggcgtgatctcggctcactgtagcctcagcttcctgggctcaagtgatactcctgcctcaagctccccaatggtgggattacaggcatgagccaccgcaccaggctgagtgcttttattttctctgaagaacacatcatcgttgtcggcacagaggcttagcacaccgtttgttagatccactcgtaggtgtctgatatttttgatgaggttttaggcagtgccttacgttgtatttgcaaattgttgctggaatatacaaatgcaattgaattctgtacaccaatcttgaatcaagtaacatttcaaaactcaagctgggtgtggtggctcatgcctgtaatcccagcactttgggaggccaagggaggaggatcacctgaggtcagaagttcgagaccaacctgaccaacacggtgaaacctcacctctactaaaaatataaaaattagccaggtgtgatggtgcacacagctacttgggaggctgaggcatgagaatcgcttgaaccccagcaggtgggaggtgaaggttgcagggagctgagatcgtgccactgcactccagcctgggcaacagtgcaagaaccagtctcaacaaataaaaaaaaaaaaaaaaagaaagaaactcaaagtgctcgtttaaagaatctgttgattcttttgaatatgctacacgcataaccacatcactgaaaatgacgatatcagttctgatcttctggtattctccatgcctggccctctctgatgcttgcttgcttcttttcttttctttctctctcttttccttccttccttctttccttccctctctctctctctctttctttctttcactgggattacaggcacgtgccaccatgcctggctaatttttgtatttttagtagagacggggtttcaccatgttgcccaggctggtctcgaacacctgggctgaagggatctgcccacctcagcctcccaaagagctgggattacaggtgtgagccaccgtgcctggccccctctgatgctttctgatctcagtattagttttctgatctttcttgcttccccttatttcactgtccaggacccccagtaccatgctggccagaagtcgcaggggagaagctctcaatatctcgcccctaaaaatgccgctgccccaggttttctatacgttcccattactagttaaggatgctcccttcaatcagcggaggctataggggagcccaacagtggcctggaagaggcccacccagaaaaggacagttgatgactgattgagagtggaggaccctgggatcaggcagctgctccggccactgaggtgacccagagctgaagaaagatcagcatgtacaggtgggctggcatgtggggcaaagctagtacctggataaacttctccatgtctcccccaaagagtctctggttatactgggagctggggcggggctggcggctcttctggaattttctctgtgtgtactgggtcctgcagtgaatgggagctggctctgagggggccaggtgtggagaatagggtgccccaccccccaggccagccaagccggcctctaattctctgaagttattccacaatccagtgcgaaaactggggaagtgaggcccaggggattgggcagctgagctgggccccaggaagagaagagatggcggaccgtcgcagggccccagccctcagggaggactcaccaagacacctcctgctcctccttgtcacctgtggggtgggagaacattggtctgcctctcgggccaggggtcttcaaggcatcccagagagaaaggtgtggataagagccaaggacaggcgggaggggaggaccgtgggctagacagggtcctgggcaggggagaggcggggaagggggcagcactgggcccacctcgctgaagggcctcctgcagcttctcgtgcttggcctgcagcttggcgaggatgctccgtccactcagatactcctggagcttctgggcagccccaagaagagccccaagtgttagccctggcttgagcccctccctctgccccagcaatgcccccacgggtcccgcccaccagcccagccctccccaccgtgaggtagaaggtttcggtctcctgctgctggccgcgcctccggcccgcctgccggctgcctgggtctgagctggtggacttgagggactcggtggaggggctggtctggaaggaatcaagcacatccccgtcatccgaggccaccacctccagcagggcctgcagtgtcgccttcagagtcttgttcacctgcagaggagaccacaccagggtggtaagaggtgggggacagggagggagacaggaagtccaagtcagaaggaaggggccaaagggaggggggcaggcagggcagccacttccaacagcaggctgtacaggctccaggccctcgtctccctctaacccccggtgggctgcccagacctcctctgtctcaatggtctgtcggtccaggcggctctggatgttctgggctctgggcagaatctcgtcccgcagctccatttcaacgcagatctcagccacctgcagagggcggcggccagggggctaagggctgggcttgggcagtaggtgccaagatccccggggcataagggaagcaagcacccttttgtggcctggcggccgggcacaggaccaccagcccagacgctcagctgaagaatggcaggagtgaacacacgtgtccaaaccaagacttgtccacagaggttcgtggcggcaccactcatccaactgacggatggctaaactcagcgcggtctacccacagaatggaagaggattcagccacgagaaggaatgaatccacttatgtgaagtgtccagccaggcaaatccatagagacaggaagcagagtgggtgccagctggagcagtggggtgccagtggggctggagaggagaacggggagtagtggctcctttaggggtgacaaaaatgttctggaattacatggtgatggctgcacaaccaccaaattgtacactttacagtgctgaattttatggtatatgaatcgtaccttaataaaactctatttaaaacagaatggtggcccggcgcagtggctcacgcctctaatccaagcactttgggaggctgaggcggatggattatctgaactcaggagttggagaccagcctggccaacacggtgaaaccctgtctccgctaaaaatacaaaaaattaactgggcacggtggcatgcgcctgtagtcccagctacttgggaggctgaggcaggggaatcgcttgaacccgggaggcggaggttgcagtgagccaagatggagccattgcactccagcctgggcgacagagcgagacgccatctcaaaataaaataaaatgaaatagaatggtaaggaagactggggtctgagacagaacagggagagcccagccccacctcttccagggaaaggagtggacggaaaaactgctcactgtaactgggcagacataaatttccctgtggcaagatgagagcagcttgcctcatgggcagagtgggagccaacgctttagaaaggaaggaattactcttttaagcatgtagacatctagaaaattgacattacagttaaaattgagagtgaggattcagctgtggctaaacacttgccctgctctccatctccaccaagccccgccgtacaggactgcatgaaggcgcaagtcacagagtagaaagtaaggccattttgagatgggctccaacatggctgacccttgaggacatgggactcagtgaaaggagccagtcacagaaaggcccgcactgtaggattccactcctgtgaggggcctcaaaggagagccgtgaactctgtagagacggacagtggaagggtgggtgccagggctggggggtggggagttggggttgaacggggccagagcttcagtttgggaagatgaacaagttctgcggctggatggtggtgatggctgcacagcaccgtgaatgtgcttctgcccctgggccgcacacttacaaatggtgaacgtggtatgttttatgctatgtgtattctgccacacctttttttaaaagtccatctaggctggactggctcacacctgcaatcccagcactttgggaggccgaggcgggtggatcacttgagcccaggagtttgagaccagccttggcaatatggtaaaaccctgactctaccaaaaatacaaaaattaccctgtctcataacctggtctcaaaataaataaataaataagtaggttaaaaataattgtttttaaagtacaaatcttagccacgcatggtggcatgcacctatagtcccagctactcaggaggaggctcaggcaggaggatggcttgagcccaggagttggaggctgcagtgagctatgatcacaccactgtactccagcctggacaacagagccagaccctctctctagagaaaaaataagtgtatgcatactctggggaacattgaaattttatccctcctctaaactcacacgatcagcagaaaactaacaatttgctctctggaaaggatatagcagggattttggactcagggacactggtcccagatgaggaagatgagagaacacagcagccccaccatcggaagctggcctggtcctatcagcccggcctcagtgctgtcctgctgaacaccggaaatgacccagagcatcaacatcaggcaaggccactgtgtgaccttgatgggcgaagacagaaacaagaccactctgcgatcacgcatgagtgaggacaaaatcaagaacttcttccgagccacaaaatcatccctccatcctggctaatgtaagtgactgtcacttccttgcatcacttcagcctccatcactgtctctttctagataagattaatcaagacatccaatcatacaattaccctgcttccagaaggcatccaatccaggaccaagccccacttacctgggccctcccccagatcccctaaggcaagcccaagtcctctaaggcctttccactaccctctcactgagaggccccaggctccccacggagcagggctccctccagcaatggagattatagggctgttcctgctaggctttggctggagggtgtggaactaaaaccaggtagttccaaggaaatccacacagcagagtgagcccccagccctctcaccccctctcctccctagacagggtcagaagagtttctactggggaaactggccgggccaggaggaaacaccacagacacccacatttgtggggtatgtgttcaggcctcttcttaaatatgaactgatggccaagaatcaccaaacagacacgatcagcagaaaactaactatttgctctctggaaaggatatagcagggattttggactcacgaacaaaagcaagaaaatagagcaaatgcaggaacaggagaaaacaaaaaacatttcaggccgggcatggtggctcacgcctgtaatcccagcactttgggaggctgaggcaagcagatcacctgaagtcaggagttcgagacaagcctggccaacatggtgaaaccctgtctctactaaaaaataaaaataaaagggtcgggcacggtggcccacacctgtaatcccagcactttgggaggccgaggcaggcggatcacctgaggtcaggagttcaagaccagcctggacaatatggtgaaaccctgtctctacttaaaatacaaaaatcagccaggcgtggtggcgggcacctgtagtcccagctactcaggaggctgaggcaggagaattgcttgaacctgggaggcagaggttgcagtgagccgacattgcgccactgcactctagcctgggcgacagagaaagagtctgtctcaaaaaataaataaataaaataaattaaatttaaaaaattaaaaaattagccaggtgtggtggcaagtgcctgtaattccagctactcgggaggctgaggcaggagaatcacttgaacccaggaggcgaagtttgcagtgggtcaagatcgtgccactgcactccagcctgggcgacaagggggaaactccatctcaaaaaaaataaaagcttcagaaagattcaagaagtactgtattcatgaaataagaataaagggttggccgggcacagtggcacacctgtaatcccagcactttgggaggccgaggcaggccaattgcttgagcccaggagtttgagaccagcctgggcaacatggtgaaactcccttgctacaaaatatagaaaaattagcctggcgttgtagtgcaggcctgtagtcccagctacttgggaagctgagatgggaggaccagaaggttgcatctgcagtgagctgagatcacatcacacccctgcactccagccgaggggacagagtgagaccctgtttcaaaaacaaaacacaacaaaacaaaacaaagaatacagacattttcagatgtgcaaagtcaggaaacccttggtgaaggtgtcaccaaaataagggtatcaaactaagaaagctgctgccgtggaatccggaaacagagcactgggcagaagtgaagcactccagactggaaggctctgggggagggcgcagaggagaaggttgacctcacaggtgcctggtgtggaggacagtgctgggacgaggtagcgatcaactcctagcaatgggcatgttctagcaagcagcattcctgaggcaagagagttataaattccagaagaaaaggaaaaattgtccaaggaaggacatgtgatcctaatacagtacatggctcagctgccaacagtacctgttgtcatggtgatttaaacattgaatgttaatttagccaaaaattctgggataagcccactgggagaacaagatgcagggaagcgtgtggtggctgtgagagatgctggtggcactgggtcatcattggccaatggaaaatggctgcttgacaccgggaggtgggtggctgtttctgggggtgggagctgggaacgggaggggtgggttagggagcagctgtgacgccatcggaagccctggtgatgccggactcttcgtaaagttccaagtcggcccgaaaggggcccaatgtaatcccagatcattgacaatgcccatcaggataaactgctgcaggaaaaactagctcgacggagaaggataaagaagccccattccatcttactgccaagtttgtgtcacgaaatttaaaaacacagagaaaccagcctagaacaatgtatgggcagctacacggctgcctgctgcacggtttgaacagttagtgtcttgccctccttggccattgcgggggtgcacccttggagtgaggctgcaaatggaagtgggacacttctctagctgccgcactgcctgagaccatggagaacttggattcctgagcaaagtgtgggtcatgccactccactgcccaccattacagtgaaggccagagaatgccaagcccagcagggggtgaccctcacctcatccccatcatgggggtggtagtcaaagcgcagcgggggacagaagacggtagcatgcacctcgagaaccttggctttgtcccctggaggatccagggcctccacagcttcttccaggctgcccaggccctgcacttgggaggcttgggtgcggctctcagcggccgtgtagctccggagcacctgccccagggccaggtggaaccctgtgtcacagcactgaggaggaaacaaggagatgcttgggtaggtcctggagccacagcttcccagccccgaggcaccaggcaccttttcccacctgcccaccaaggactcacgtccatgaggtccaagacgtcatgcaggtagtagttactgacagcagcgttgacactagccaggctaagcaggtactcgttgcgcgcctttgtgcacttgagtttgtgctccatgaacttggcctgccgctactcaagacaatgcaagcgtgccagggtcacgcacgtggccagcccctatctctagcctttcatgtaatgcccatcgcctcccctcccactgtggacaactacacctgaactggtcaagcccagaagtcctgctgccttccccacgccacagtccacagtgtgctcagcccagtgccaggaggtgacttgattccccggctgttcacccgccacttgccttggttcgagccacaacattccccacagaagtgggggatgacacagaactattcacagatacctgatgagtggaaggtgcgcacatggcaccccaccatggagggtgcacgagaaacccagcttggagccagcacacaggtgcacagctggaagcggccacaggcctctgcgggggccagagctgagggggaacgagtaccccaaagggtagggatagatcatcaagagccatgaaacagaacctgctggcacctgggttctaaaactggcactctattttttttttattttttttttttgagacagagtctcgctctgtcgcccaggctggagtacagtggtgcaatcttagatcactgcaacctccgcctgctgtgttcaagtgattctcccgcctcagcctcccaagtagctgggatgacaggcacccgccatcatgcccggctaatttttgtatttttagtagagatggggtttcaccatgttggccacactgatcttgaactcctgacttcgtgatccacccacctcagcctcccaaaatgctaggattacaggcgtgagtcaccgcacctggctaaagctggcacgctaaccacagcagccagggagaccttcccccaacacagccaaactctgtcatttcccctaagaacacctgagatgctcgactccctcctctgctcccagagtcccagagaccatgactgtcagccacgcacagcctggcggctccatccaggcatttcccagcctccccactctctgtactgggctcacctcgaaggccctttctccgtgcgtgtcaccccatcacccaccctaagtgtcttcttgcccccctctgaaaccttacggaatggctggcagaacagcagagctgcaggggccccgctgggagcatggagaggctgcatggggctgtccagggccaggcaactgttttccccactctctcaggccctgggagccttccgtatggaatccctggaacctgatggcactgtcctgccactcctgccctcccctgcacccagccctgacttccccctcagcacagcaggtcctagttagggcccatggcccataggcctgcgtctgaggtgccctccaggcccaccttctccaccagcctccctcccttcttgagggagctcttgcggaggggccctgcctcagtggcaccagcggtggtggtggggacactccggcctgcccgcttctcctcctgccgctcggcctcccggagcttggcctcggcattcacgctctccatgtgatatgcctggtacgtcttcttggcctgcagggagacccaaagcaaggtggtgctggtgaaggccacggctgggccagcccccagccctctacccctgcccctctggaacttggacctcagagctgggcgatcccatgtgagcacttagcctaacgccctgtgcctagggagagaggcctttgcccctaggtgcgtgcttctccctgagcctggcttggggtgatgtgatggtctggcggtgttcctccccactgtgagtggcatttctccctggaccattggggcaggcccctccccagccctttcctcaccgtctggagctctgagaccacctccaggagctcatcctgcagctgctgctccagatccctgctctagaggcagaggcaagggtgagcacggcactgcccagagcggccccgccaggcactggaagctctgcccagatcaagccccatcgggggggcacacaggttcgctctgcctgctccccacctggcctccagtgccctcccagccacagtgcctcctgatcccaaagcctcgaacacttcccgtggcccaggatgagagcctcaccttcttgaccaggcgccccacgtcctctgcaatgtgactcaggcgctgggccaggggcccggccagcacctcactcagggccgcgctctcccggctctgctgccgcgtgtgctgcagcagcaccgcccagcagtgcaagggcgacaggagggacggctccttcctgggggtagaggggcactgagacctgggagcggagcttgggccctgccgtggcccccctgccagcacatcacctaccggaagctttggtgctcccggctgctccccaggcggcctccacggctggagaagcgctcggccagcttttccaggccccgggagtattccagctccacctcagcgcggcgccgcatgaactctgccagctcctgcagcaactcccgccgcagctcgccctgcagctccaggcagcgcagctgctcgctcagctgccagcgcatctctgtggggggaaccatggctcaggcctggtcagcacgccctgcctgggtcagccaggccagcgtgggatgggagaggcagaggcacacagaccccagtcccgtcggctctgagggctccttcggacccagcctaggctgagggcaagagctaagaggggaggaaagaagctaggcccctgcaggcagatctggcctcagctgtccagccgacctctgcgctgaggccaacagatggccagagccacccggttgagggggaaggggaagggtgtcccagagagaggggagagccgccccagcgccagccaggcacctttcagtttggcttcctgtctctccctcgttcctggaaagcctctgaatggtttcccctgcgacttcctttcccgccggtacccaggctccgggaggtggcagcctcccttgcaaacacacggatacacaacacacagatcacagtgctgctcagggcaagcctgcagcgatctcgcagtctcagtggctggggaagcctgccctcaggccccaggggaaaggacagtccacagtgagggctgggagccagggagagctgatccggccttgtaagtgaaagaatggggcagggagctagcccccgtcttctgaccccacttcccactcccaatcaccccccgccccacctgtgcattcccccaccctgcagagagagtcacacccagggccccatactgccggccttttgacaccctatcactggcttgatttggcaacgctgcttcccccacacaggcctgaagcaaagaagtgcctgtccagcaagtttaagcaacctgcggaagacacttttgccatctcctgagtgcccgtcccgagtaaataagatgctagctcagcttctggccagcaggctgcccacctactcatctccatccacatccccagggagggacatgaattgatgtcttcattcagcagaatgttgattatgcacccattctgtggcaggcacgttttaaatacaaaggcaaagaggtttgaccaagtgtctgccctcttggagctgggattggaatggggcacgaacacatatcagaatgcccaggagtgatgggtgcggagaagatgaacccacaaagcaagatcagagccaggggtgggtggggacagggaggacctctttttaaaggagggtggtcaagaacaagccgcatcgttggagcagaaggctggagctggctgtacgtgggcagtagggggagtccgagagaccggtagggacagatggcacagagcccggggtctgggcagagctcccagctggactccgagtgagagaggagccacagtagtggggtgatgtggtccagcttcgttttcagggccccctcacactgccaggtggagcccaggtggcagctactgtgctagtccaggcaaaagacggcaggattcagaccagcagcagcgagggaggactccgctgagaagagctcaatcccattggatttctgtcccgccagtgacttcccaggggctgttgcatggggaccctgtgggttccgcctgcccagcatccctacctcctcccctgatctcctattggagaatgtccccttcctagtctcagcccccttgactccaggtgccccagccctggctgcatgcgtcacccatccctctgtccctccactccctgcccccaccagactagccaggtgagggacccaggagcctgacccttccaattgaattactgaacaggagagctcttcccaccggcagatcaagctgggtaagtggaagcctggggcacgggacctcccgacagagcagggcagagcccacgatgccaagtgagacagatggagagtgtcttcatcctatccgaggctggcctcctgtggttaactcgtcagctccaaggccaggtggggtgggcgctaatgccatttgaaatcaggagagtcctcactgaatcagtttaacgttttgttttgattttttgttttgagacggaggatgttgcccaggctggagtacagtggtgcgatctcggctcactgcaacctccgcctcccgggttcaagcgattctcccgcctcagcctcccgagtagctgggactacaggggcgcaccaccacacccagctaatttttgtatttttagtagagacagggtttcatcatgttggccagactgggtcttgaactcctgacctcaggtgatccgcccgcctcggcctcccaaagtgctgggattacagacgtgagccaccacgcctggcccagtttaacattttttgataaaagtaaatttcatttcattccaagaaaggtgttagacaactgctcgcctcactggccctctggagcctgccctgccctgcttcccccagaggaatacaatccctggggacttatgacaactgaacagtgcagaaggaaccagcagagggaaccgctgcctttcttcatcactgccggcagcaaaagctgactggaagccatgtcctagtccagatccgggcatgcacaccggctggtgttgagcaggcaacttgtgaattgcaagtcgattgcattggtggctttcctggcagagctttcggatctcagttcagacaaactcgtcagcacaccctgtcctgacctccccctaaactagggctggccctcttccgaccccttcttggcaccgtgcactttccttccctttgtagtgcttattatcataatgcaaagtctatgtctcccccactagacccgtgagccatgtgagggcggggtggccactgacgccatttgaaatcaggggagtcctcattgaatcattgcttttactctgggtaaaaagccagggctggaggggctggagtcggggttctctctggtacagcagtatactcccagggcctgggacagcacagatgtataggaaacatctggcaaaaggagagctggaatccatgtctgcctgaattacagagctgggccccgggccccaccagcacttcctgtgagcaaggcatttggtctcacttctgctgacaagcaaaacagaagaaaagatggtctccaaaaccaccgctatgctgacctttgagaatttagggtgtcaagacagtgaccccactttgtagaatggtaggaagcttttccagggtgtgggatgcagacccagagcaagtgaggaacccttagacagtcgtgctcgaaaccccaacttttcagtgtgaaatcactgacccatatttgctgactgaagttttccaagtctttcagcttcatggcattttggggaagcaggatggagatcattacctccatctgagcaagatgatggcgaggcttggaaagctggctcaccctgtgtagtcacctcaagctggctctggacacaggctgccttttccaaaggaggactggagcatactttggtataaattgcttgcactgaataatgatgttagaacctacatctctgggttcaaaggcacttcaagggtcattgcattctacgtcctagaagttgcagtgctgtatgaccacgggcaagtcactgcacctctctgagcttgtttccgtaattggtaaaatggagtgattgagagtgatatggacgagctgctggcactgagctgctgcctctttcctttgcaagagttaccatgccctgaataagatgggcacaagctattggctaagaatttgcaaagctgatttgcatgtgatttgcacatgggtgtttatcagaacccagaggttcaatttcagaaggctgagaagccagccctgttaaatctctcaaccaagactcactgcgccagcttgacccagagacagtggccctcgcctctgctccccctcagtgctaaagggaggcaaaaggtgctgaagctccagggactgcagtggggttacggccaggtgatctccaccaatccactcacccggactcccttactcaccccccagcccaatcaagctggttgacttcactgtagctaaaatactgccttctgaggggcacgttgggtgcatctggctctcttttaccagcggccaccagtgtctccactgaaccttgggtgagaagcggtagacccaaggaggacagagaccaaaggaaggaagacaggaaagaaggaagggaaaatggcaggcggttgaggccaaatgggcgtcgggaggcaggcaaggggctcaggctccctcctccacccccgctccagaggtcgctggggagagcatcgggccctgggccagcgcggggacgcttggagctccctcacgaccttgggttctccgcaggaaacgggccgggagcgcccggcgccctctcacctttgacttgcgtctcatactcagcctgcagcccccgctcccgccgcagcttcccgtgagcggccatggcggcctcgcggccgcgccgtcgaaccccactgctcccacgcggccgtgagcgggcccggcgccgggacttgggggcgctgcggccagcaccctgcgcgggctccgcccagccccgcccccagcgcggctcccggtggggcggggcggcccagggctggcactgcccgcgaggggctcctgggggggcagggcgccccttccagccccactgtgccccggccttgccgtcccctcccattgggcctgcacctaggctgccttgtgcccaaagccccgctgccaagcagccggagcaggtgtgagagccccaacgtaagctggcatcccaggctgccatcccaccacctccagaaggctgtccctggtcaccactgccagactgtaccattcacagcggggccgctggcccactgtaccagtggccatgaacaccattgctgccccaggctctggactccccctgggttgcctccttcccccagacatccgatggggtcctcccttcccaagtcagcccccagagaggcccagggagccccagggagccttgagagctggggtgggaagttcagaggggagggggaaggaaggtcagcaccagagagcagaacctcagcagctggctgccgttccctccaggcccccttggtaggggaggagagttcagctccggttccccttctgctcagccccacaatttccccataggcggttaccacttcctgctgccggaagagactgctctgcctcccttcccctgcagctgcacctgcccgtcataggcctgaggggggcagccccctcggagtgaggtcttagctaccctgggggcaagtcttggggcccccctcatccaggggtggtggggctttcctccaccctctaccacagggcagcagcttttctccgggaaatcgggaaggcgggaggcgggaggcggttgacaagccaagcagacaactggcttcaatttggtgggagggaaatccctggggtatagatgtggggagagaggcaaggcacttgggcaccaggcgtgtgttccgaaggcgggcgtgggggcactagtgcaggggtactaggcgtgtgtgtgcacggatgtcagagtcaggctctgtgcaaatgcgggcacacatgaccttgacctgcagatctggggaggggaggctgtgcgggtacttcctgcctttcaactgtgagcaattaattctcttgcccagaaggaaaaaaacactccctcagctccccgcccccttctcccagtaccaaggcccttctcgaacacgtcgtcgtgtgtgtctgcaggacctggggcttcaaggcctgggagctagccagacccaggacctggacttccagcagctggtctcggaagtaccgatgttcgagtcctccagcgagactagagagcctgcgcccctgcccacagcgcgtacagccgcacccacactccaacctgctcctggtcgggagactcacacgtcccaccgctgcctcaggccaaggggaaccagggagccccgcctctcactagctggccccaacacatcttgcccctccatccgagccctgactggtccccaaaggtccctccacccagcagagccagccacagggctcaggcaggcaggaaaggcctcagccggtgccttcaaacgctctcttcactccttttttcactccagagctattcctaggatgccccattcagcccgtactttagggcctgagtgttgggccctggcttttagggcacttgtttggcatttaaggccctgaacgcaactgccccctgctgctccgtctatccttcgctccattgttccccttcaaagcatccaaaagccaggcagcccgcagaaggcgcggacctgcccgcatggggacggaggctcagcggccgacaggcatcgggcccgccggggacggacggcagagggcgggccgggtcccatgggcctggccggggcggaaggagggcgccgcgggcgccgtgggagcctgggacacctcccttccaccggtgccggggcgcggccgacgcagtgcgcaagcccgcccttcccccgcaccctgcgcgcgagcccagtgccgccggaccaatcagagcctgggaacgaacctcgccgcgggcttgcgaaccggaagacactgccgccaggcgcggggcgggacaggactccgcctccggcccatacaaagggaagcccacgtcttaagccaatcaacacagcctcgcccgagccgggaagcggagagctgtgggcgtgcgcagacgcgcctttccggccccggccccgccctgccgcgctctgggctccgcttccacagctgccggctgcctgctggtcacgtgcgaggcgccagccaaagagaaccgagctccaggcctgtgtggcgagttttcaacccggcggaggagcagtgtgccacctgcagtagcaggacacagagagggctcaggaatacagggcccgcccaggactagggacagtaaatgatggctttgcagccggaggggagggaagggaaaggaggaaagacacagaaacgagcgttacggttagggtgactccatgaaaaacaggattttgatatatatgtgtatatgtatatatatatgtatatatatattttttttttttgagacgggtctctgtccctggagtgtggtggcatgatcagggcccacagcaacctccacctcccgggctcaagcgatcctcctgcttcagcctcccgagtagctgggattacaggcatgcaccaccacacccgggtaagttttctatttttagtaaagatggggtttcgccatgctgcccaggctggtctccaactcctgagctcaagtgatcccgcccaccttggcctcccaaagtgctgtgattacaggcatgagccaccgcacccaacagccgcccagttttgtattttgcatgaaattgttaatgagggaatacatggctttatgcatttgtgtaaccccatagaaactgtacaacacagacaggaaacctactgtaaaccatgggctgtagtttacaataacttatcagtattggcgcatcaacaataacaaatacaccaactaatacaaaatgtcaatggggaaacgcggggaattgtactaaaaataaattattttcaaatgcaaactcaggttagggagtagactcaagaggtatcatggactcactgaccattagggtggcaggggagggaggactcaaggactgttgatggggcatctggctgggtcattactcagacaggacatttgtagataagcccaatgagcagttggatgtccacatctggagcccacgggtatgctggggagctgctgtagcccgaagcaggtgtgattagggagagaaagtctgaaggtgaaggtgggaagagaactgaaggccaccaagagtgggagccctgctgttgagctttgagcctgagcagccccggcttgtgccacaaaacacattcagcgtggccaagcagacctccaaggcagggtctctcccataagtccagggcctccttccccggggccacagctgctgaaggtcatgagactagggagtcccacctccaaagctctttccttgtactcgggcctggcaggatgctctgggtcaaaaggccaaggctcacatccccaccagaggacctggagaaacacaccctctaaatgtgcgcgcgctcacacacaaagttccccagtgccacggagcgaatttattgtgaaagctcgtggggtgaggaggggatggggcaggctctaggaggctgagtcggaggcctctgagctgtccttgacatctgtgctctctgtggtctcgctgacctcgctgaggtccttgctgtccccaccactatcctcggcagccaggcccttctcctcgcgacaggcctctcctgagctcggaggtgaattgcctttgctctccaccttgttctcgatggcacccagcaccacgtgcctgcccttctctttcagctccaggtgccgcctcagctgccaccaggaacccagggagaagcgggggcaaagagacagggcctaagtttccagacaaagggagcctggccctgtcgctggctgaggagaggggcatagtgaggcagcagggctaggcaggacacgcgggactgagtggggacacctggctggagccccagtccaccgctacctgggcttaccgactaccatggaggcccccacgacagagcgctgccccttgaccagccctgccacccgatgagccttgggcagaaccctgactcagaactacctttgagcaggcaggccacccactggtccctagacctccccacttcccttctaaaagcctcctccctctgcctctcccatcaccctccaggctgctaggcagatggcctcctctaaagcccagcctaggaaactgaggtcgtgactcctggcaacgtagccacaagagctggcatccaaagtcggtctcgcctgcagccactgtcttggggctcctgagtgccgcccccgctcgccttgcttggcttcatgcaggcgcttacctcgtcggccatctgagtgaggtcccgcttcatggcataggcgtcctccccatctgcatagtatttgggctccacttcactgatcctgggggcagagggttagagagcaaggaggaagacctgtatcccggggacaccctcctccactcctggtatcgtggctactggagcaaggtgccatgttttctccctgaaggctccatcctgagacaacaagtccagtgtgacctgccctctgttctctccagcaaaggctccaggacacagcggcccgccccacccgtcctgcccccgttctgtgtccttagcctggatactaaggatccatttctgcggtttcttgtgagctgaagccctgaattcagccttccccttccctccctgccctgcgccctgtcccttactgagctgcctcacaacagccatcagaacccaggaaagacggtgagccctgcctgagcagctctggggccgtgactacactgggcaggtgtgtgtgcagactcgcgtggccatgtccctggaaggggagctggactcaatggcctaggctggccctgccaggcctaagacatgaggattgctgacttagctataaagcaattcccaccagacatcgtcatctgggtcacagatccctcttgccagcatccagcccagaggccaccgcccttcccaacagtccctcttcttcatcccctaccaaacgggctgagtgcagttagtgtccctccacaggcagcccaccccagcttcacttgcaagcacttttttccactgtctactgggcatgccaactgccaggttctctctagtgtgctaggcacacggggcctcctggtcctcaggcagacctcccccatccactaggctgcctggccactggcccttccttcctgaatgtgcattctcctcgattctgctctctcttggattcttctaggtgcttggtcatgcttgagtcctgctcctcagcatctgctcacgccagggacccacacctctctattcccaaacattactaaacagcccgtgtgcccttcgccagcctcagccatcatgggccagagctcctccatcacaacacatggagcacgtttcagcaggcaggtgctgtctccatgccggcttttcaaccatcagccgccgagtgaatgtggaggtatcctggcagtgctggggtccacagcctcttccccacagccggcccacccccgacctggaaggcaactcagccggtctcaggtgccctgatgggccagacctgggatcaaccccagcccattagaaaaatcgagatctacttactgaaagttgagggtgttggaatagaggtgcagggcggcccggttactgcaggggaacaaggcactgctgagctgcacggatttggccagggaggggtagcacgtccaggtcttgcccctcctcctggtccctccttccccccaatcccacttcctggatcttcaccaaaagctgaggtaccccaggacccccgtcaaggcagtatctctccccctcaatcccccttccctcagcccggcttccacctcttcctgacatgcagggagacatatttggcattgaagttctctatcatggctcgagaggcctggtccatcagtttctgagccagaccgaggcgccggtgggaacgcttcacagcctggtgggagaagagcagagatggggtgagggactgggaccttgagggctgccccaactaacccccacttccacccccaccagagagcctgggtggaccttacataccaatgaggtgatatgtccatggggcacatcatctgggtcctcttccctggagagggagaaaggagaggctgcaaaggagctcagtgtaggcacagccacctccagcccccctgccatttgtagagtggacatgcactacagccccctaagaccccagctgggggagagccgggagcctcttggatcagagcagccgatcctgccaccctctgctgcctgaaaaccccaagcctgccgggtgtggggcacacgcctatagttccagctacttggcaggccggggcaagaggactgcttgagcccaggagttcgagaccagcctggacaacacttttttttgtctctacaaaaaaaaaatcaaaaaattagctggatgtggtggcgcatgcctgtggtcccagctacttgggaggcagacatgagaggatcacttgagcctgggaggttgaggctgcagtgagccatgatcatgccactgcactccagcctgggcaacagagcgagaccctgtctcaaaaaataaaaaaagaaatgagctgtcaacccacgcaaagacaaggcagaagcttaaatgtgtattactaagtgaaaaaaagccagcctgaaaaagctgtatatagtatgattccaactctgtgacatcctggaaaaggcaaaaccatgcaaacagtaaaaaatcagtggttgccacgggttaaggagagggagggatgaatgcgtggaacacagtgaaactatcctgcgataatatgaaggtggacacatgtcatttggtcaaaaccatggggcttacaacacaaagagaagtgcagtaatgtaaactatgggtttagttaataataatatatcggccaggcgcagtggctcacgcctgtaatcctagcactttgggagacagaggtgggtggaaacacctgaggtcaggaattcgagaccagcctggccaacgtagtgaaaccccattgctactgaaatatacaaaaattagccaggtgtggtggcatgtgcctgtaatcccagctactaaggaggctgaggcaggagaatcgcttgaacccagggggtggaggttgcagtgagccaagatcacgcgactgcactccagcctgggcgacagggcaagactccgtctcaaataataatagtaataataataatagtaacatatcacattcatttatcacttgtcacaagtggaccacacaaatccaacatgctactaacagaggaagctggcagggaggggatgctgaggggtgctataagaactccatgtcctttctgttcaatttttctataaactttcaactgtactgaaaagaagaagcctattcattttttttaaagcccacagaggcatccaccagacacgtgtagcttctgtcttcctccttggtgactcacattttggccaggacataccccacaatcttcccattctcgtcctcagcaatgtaagagagctggtgacaggaaaacagagtgagaaaacttcttgtcggagctagaagagccctttagagggacacaaactggacgagtggcgagttgtgtgatggctcatgacctccgggctgagtggcttggtctccccctcgccacactgtgccctgcccatacccagaaagaagacgcaaagtggggatcctgcccctattctctgctcccttcgggcgccttcttttcctttgcccctgtctgccagctgaaaacacccaggacgccaccgaccatacagccccctgggctctgacagacttgtccactccctccaagatggccagatgggattttcctcggcctgctttcccccatgcccaaattcagaagctgcccacctggggccaggaaaggccatggtagaagtagtatttcatctggtagttctcgggcaggcagaggaggttgcagtgctgcatgttcattaggtcctctggctgcagggaaggagggcagtggaacgcgctcagtctaaggcggcggtgaccacgggtgagaagcctgctccccgtcggtctgctcggccccgctccctcggggctgggcaggcactgtgacgatctgactttgcacaacgcccggagcacaggaacaggagtgggcgccccggaggtccccggagcccacccaacggaggcccgacatcacgcaaacaggagggaatcgcagccccggccccgcgccccggcctcttcggcgggctgggccagccccataggtccagcggccgcaggcacactcagggccaccgggccgggctcggccggggccctcgggagcatgcgcggcagccacccggcccggcgcccacgcggcgcggacagcctcccgccccgggcgctcaccctcgcattgcggatgttcataacggcggcggggctcgcgggtcccagcggatcgtgaaggcgcagtcagctgccgccgcgctccgaagcgacgccgggacggccggggctgggaccggagctgggctcgctgggcgacggcggaaggggcggtgcgcgccgggccggccaccggccggaagtgcacggccgccgggcccgtcctcccggccgcttggccaatgcgcgggacaggccagcgcacggggcgggccaatgcgcggagccggtcagcgcggggcgggcctgggggcggggcgggcgctgccccggagctggagccggcccctccctcggcgcgacagcccccctcccgcgagcccacagacgcgcgcacagccgcaggtggagcggactcagcctttattccgcgcctcggcaggcgggggtgggggcgggggagggggcgggggcggggcggctcagcagggcgcccagcatctcctcgcacatggctaggcaccgcggcacgtggaagcagcctgcgggtagaggcgggcaggtagtgagggccgggggcagccgagaggcgcaacccctgcggccccgccctctcccccactcacctttgaaaggacctcccttgatggagagggccaccttgccctctcggctcaggtagccaaaccattccccgtactcgggatcgcgaaactggaataacagagacagtgacagctagcgcctgcaggacccgcccagatgccactgcatcgctaccaggggtcagagcctgggttgaccccaggtgacgtggctccagaaccagcgatcttaaccgcgacactgcgtcctccacaaagatgaaagcaggggtgggcgcagcaggcaggctacaactatataaccgactgggcaaggggatgagacactgctagatggaatgaaagaactctgccctggggtgtagaaacgttgtctatcgggccgggagctgtggcttgcgcctgtaatcccagcactttcggaggccgaggcgggcggatcacctgaggtcaggagttcaagatcagcctggacaacatggtgaaacctcatctctactaaaaatacaaaattagccggacgtggtggcacgcacttgtaatcccagcagtatactcgggaggctgaggcgggagaatagcttgaacacaggaggcggaggttgcagtgagctgagatcacgccattgcgctccagcctgggtgacagagcgagactccatctcaaacaaacaaacaaacgaacaaacaaacaaacaaaaaagttctctattgtgattgtagtcgtggttacgttgattcaaagaaacaaagaacccggccgggtgcaaaggctcacacctgtaatcccagcactttgggaggccgaggcgggcggatcacaaggtcaggagatcgagaccatcctggctaacacagtgaaatcccgtctctactaaaatacaaaaaattagccgggagtggtggcgggcacctgtagtcccagctactcgggaggctgaggcaggagaatggcgtgaacccgggaggcggagcttgcagtgagccaagatcgcgccactgcactccagcctgggcaacagagccagactccgtctcaaaaaaaaaaaaaaaaaaaggaaaagaaaagaaacaaagaaccctgatggaggcgacgacctgtcatgaaactcttaagaagtgactcccttggagctcccattcccggcttcacaggcctgtcttccagtagatgcacaatctcatctgactcctgtcctggctcaccattggtcccaaactcatctcctcctccctctgcccctgcccagtgcccattccactctctttccttctctctccactagcattccatggggcacctgtctcagggaggcttgtcagttcagccccttctcaaaaggatcatggactcaattacattgaagtccactatgaaaatgtctctttaaatggtggcccataagagttggtgtattcttctttgtaggaagtaaaactagtcctgggctgggcacagtggctcacgcctataatcccagcactttgagaggccgaggcgggaggatcacttgaggccaggagtttaagaccaggctgggaaacatagtgagaccccatctatacaaaaaaaaaattaaagaattagctgggcgtgatggcacacagctgtagtcccagctacctgggtggctgaggtggaaggatcgcttgagcccaggaggttgaggctgcactgagccatgattgtgccactgcactcagcctgggcgatagagaccctgtctcaaaaataaataaataaataaataaataaataaataaataaataaataaaaactagttctgtgtgtattcattctgtcttttgagttacattgttcaagtccttacttattttttgactgcttgacatgacacaggaaggtaaagaagaatttccttcaatgtctggatttttgccttctgtattctgttatgttggttgatgcataatgacttacctgtttttttgtttgttggttagttttttggtttttgtttttttaagacggagtttcgctcttgtcacccagactggatggagtgcagtggcgtgatcccagctcactgcaaccttcacctcccaggttccagtgattctcctgcttcagcctcctgagtagctgggattacaggcacccgccaccaagcccggctaatttatttatttattttttttattttttattttttttaatggagttttgctcctgttgcccaggctggagtgcttcccgggttcaagtgattctcctgcctcagtctccccagtagttgggattacaggcacccgccaccacacccggctaattttttgtatttttaatagagatgggggtttcaccatgtcagccaggctgttctcgaactcctgacctcaagtgatccacctgcctcggcctttcaaagtgctggaatggcaggcgtgagccaccgcgaccagcccaatttttgtatttttagtagagacggggtttcgccatgttgaccaggctggtccagaactcctgacctcaggtgatccacccgcctcagtctcccaaagtgctgagattacaggcatgagccaccatgcccagccgatttacctgttgattataacttttgtaattgtttaatgtcatctatatcttattaaaatgtattccttcaatttcatttttgagttagaactggtggcccctaacacacactctatgaatgcattaaatattaagatatagctgcaggtctaacaaccctgctgctttggaagtagtgacgaatatatgtgatacttgcagatgtctctctaactgcaatgcaatgtaaacacatctggatttctatcggtgacaaagccaggcacttctattaccaatgtggttcattgcctccactcataatggcagcaaatgctagtttcagttagaggttagtacaaataaagatgtgattctccgcccccggtttcgaagctcacagaccccagaataagatcccctgctatagtcctcgcagtaccagggttcaccagtggagtcggagtcgtggctttagaaacgcatgatgaatcttcattcattcaccacccaggccttgccaccactgggtgccatgccctttccactgggtgccatgccctttccactgggtgccatgccctttcctgtgttcagcagctcgagttgcctcctgggcagcagtcaagacagcttatcactctgctcctagcacttgggcttcagggagcccctggcttggttttcttcctgcgtcaccactgattcttgtctcctttgctgggcccccatttccctttttgcctcatagatctcagcagcatctgtactgtttttttttttttgttttttttttttttgagaccaagtcttgctcttgtcccccaggctggagtgcaatggtgcgatctcggctcactgcaacctctgcctcctgggttcaagcgattctcctgcctctgcctcccaagtagctgggattacaggcacccaccaccacgcttggctaatttttgtatttttagtagagatggggtttcaccatgttggccaggctggtcttgaactcctgacctcaggtgatccacctgcctcagtctcccaaagtgctgggattacaggcgtgagccaccgtgcccggccttttttttttgagacatagtctcgctctgttgcccagcccaggctggagtgcagtggtgtgatcataactcattgcagcctcaaactgggcttaagcagtcctcctgcctcagcctcctgagtagctaggactacaggtgtgcatgacacccagctaattttttaaaattttttgtagagaccaggtctcgttatgttgcccagactggttttgaagtcctcggttcaagcgatcctcccgtctcagcctgccaaagtgctaggattatagacatgagccactgtgccaggcagcatctacattcttgtgatactgaaaacattcatggtgagtccagatctctccgtctgaactggagactcaggaatcccactgctgctccaccagactgtgaaccctctgtccccaccagctcccacctgggccagccctcactggctgggatgacagctacagcttcctctgctgtcccagcttctgccctgttccctacagacttcccccataacaccctcccctccaagccccaggacccaggtaacaatggaatcagaccaggcagctggagtccgtcccttgcccactctgcctttatcctcccgggctgccaggcccccctgctgtgccacatgccccaccctgcccagactcccagtccctcagacacacccctgattgactcggcccctgctcagtgcttccctgctgccaccccataggaaagagcccccccacaaccctctccagtggtattattcccacagctgtcactctcaccaccacctaggtctgcttgcttacactctgctcctcccgcccccaccaccaaaattcgagctctaggagggcagaggcttcttcgttgactgaacgaacagcactggggctccggaaactctcagaccagctgagcgactgtgctcagcgagggggcaagagcgcagccgggccagactccccccattcccccattcagcctctagaggggacaaggaggcagctctcacctggcggaaggtgtactcagccacttggtagaagaggcgcagcagcacagggtccccactgtcactgtaacccatgaggaaggcaatcatggcttcactgtgtggccaccagagcttcatggcccactccagctgaggggagagcaggggcaggcatctcagcaggaaactcccctccgcaactttccagacctggctgcgtctccattggcccaagctactggaggtgaattgcgggacatctttggaagttctgaaggacccctcccagtgatatcagcttcctgacctgtagattcttgaatagacaccagggccccagacgaatggcatatatgtctgagcatcagcgtttcgccagctccctggtggcctccatatgacatggtgtcagaggtgtgtaaaccagagcaactccatcttaaacaggagctgggtcaaatgaggctgagacctactgggctgcattcccagacggctgaggcattctaagtcgcaggatgagatatgaggtcggcacaaaatacaggtcataaagaccttgctgataaaacaggttgcagtaaaggagccggccaaaacccaccaaaaccaaggtggcgacaacagtgacctctgctcgtcctcacttccaacagtttacaaatgccatggcaacgtcaggaagttaccctatatggtctaaaaaggggaggcatgaataatccaccccttgtttagcatatcatcaagaaataagcataaaaatgggcaaccagccgggtgcggtggctcacgcctataatcccagcactttgggaggctgaggcgggcggatcacctgaggtcgggagttcgagaccagcctgaccaacatggagaaaccccgtctctactaaaaatacaaaattagccaggcatggtggcccatgcctgtaatcctagctactcgggaggctagggcaggagaatcgcttgaacccgggaagcagaggttgtggtgagccgagatggcgccattgcactccagcctgggcagcaagagcaaaactccacctcaaaaaaaaaaaaaaaaaaaaaaaaaaaggcaaccagcagccctcagggctgctctgcctatggagtaaccattcttttattcctttactttcttaataaacttgctttcactttgcattgcggactcgccctgaattctttcttgggcaagatccaagaaccctccctcttctggggtctggatcacgacccctttcctgtaacactggcacagaagctgagagcaggcctctaggttccaatccagccccaggttaccctctagagaagcaaccacctccctgggcagaaagccttagaacagcgtgggtcacacatggccctgggcgctctcccacctgggtggggcagaagttatcagcatcctggaagtaaaagaggcctccgtggtcagggtcccatccggagtggaagggcaacaataggaacttgtcaatcacgtgggctcgaagttcggggtcgcctttccgaatgcaatgacggagcagaaaccagccggcttccagcgtgtggcctggtgaggggtggagtacggaagggcggggggcggggggtggggttgagggagggaacagagggagcaaaagcccctggcacctctctgctccctccctaacaatgagcgaggctctgagctccctggccctggaagcctgctcctctgcagaaacccccagccttgggaagcccatcctcgctcctctgcctcctcaaggcgcccccgccaggcactcccatatctgaagcccagaacacaaggctcagcgctcccctcctcctgggtggcccccagcccaccccgcccctcacctgggttctgctgtctccccaggcagccaggaagttccttgccaccctctgacacattctccagcacagcttgtccatccctctaccgggaaggagcagaagggaatgttgcctccagccctttcacccacccagccacccaactagaaagacccagctccggaaagcccttcctccctccctcttacccaagcccctggacctgctggcttgggtgggccaggctcagaggggcatttaaggaggggctgattcactcccttgggcctagcaagttgttgttttttttttttttttttttttttagacagagtcttgctctgtcacccaggctaaagtgcagtggccgcaatctcgactcactacaatctccacctcctgggttcatgcgattctcctgcctcagcctccctagaggctgggattacaggcatgcaccaccatgcccagctaatttttgtatttttagtagagacggggtttcactatattggccaggctggtctccaactcctgacctcaggtgatccgcccgcctcagcctcccaaactgctgggattacaggcacgagccaccgcgtccagcccgggcctaggaagatgtaatcctcacttctggcctgatcctctccagcaggggagggtgaaacattgaatggggacagacagggcgggtttcacggcccagaggcctggaagggacttgggtggggcaggaggggtctccttctgtcagggcttgcctggggctccgcatcctccctccagccctcaggccctccaccttccccaggtgggacatccccgaatctctgtctctccaggtgtgtcgagccccagggtgcccaggggagtgggggagtggaaggcctcccaccaccccagctccccaggcatcccccacctgcacgtgctgcagaatcctccgggcgcaccagtcccccagctctgcgtatttgcccgccagctcctcatctgcctccccgagctgctccaccaggttcagtagcatcatgggcaccgccatgggctccgcagccggggccccctggagctggggccggcccagtcccgacgcgtcctcctgcacccagtggacgatctgatccatcatctccaccgcttccgtctgggggtgcaggaggcaaggggaggcccaggctgaggctacatcctgtgccatccccctggacacggccctggggtgggagagccaattcctctcctgaacccagagacaccttcatccagggcctacttggggcctggcacccagcgtccagtaggggccagtcagatccgccccactctgctcccagtctgggggtgcagccccttccaggctgtggggtcagggtctggcagcacagggagcccagggaggagggaagggccttttcccagttgggggcagggcgtggatagggccctctccgtctgcgcccctgtgggggtaggggagcgttcagaggtgaaggggacttggcccacagatgggtccatgggaggggacttgcgtagtgagtgggaatgcatcaggtggccatggcagggtcgcagggtggggtcttcaggggcaccctcctctcacacacctggtaccgcacttcccctgtggctctccacagctcgttcatggccatggtgtagaaacactcactgaagatggttcgctgcaccttgaccgggcggccgtcccgagtcagcacaaaggcacacttcttgccaggaggtgccacccgggcataccgcagcaagaactcaccacctggaggttggggggttggcatgccaggggtaaggccaggacgccccgcacacaccacccttgagcctccccaagtccttcgctgcttctagatccctctaggaactccgcacatgtgccctgttgagtaaacatggacggagtcactgggagatgggcaggaagggggcacctacctgcttttgctgcgtccagaagctgagcatggcggaagcgctcgaaagtgcggtacaggcgacaatacatccatacctgcggggtacgggagggaaagtggcttaagtggccggctggggtgaggtggggagacctttgaggcgatgggccgtgtgcctgagcttccaggctgggaacaccatacctgcctcccctgcagccacacatacttgaggtcatcatacacccgcccctcgcggccaaggcacgtgaagaagcccctgtgggaaggcagggttagcaaagtctggaacgggccttgccagcccctcctgcccctctggggccagcaaatctgtgaggtgcctgagagtgagaaggggcctcaggaagggcaaaaaccctgctgaggactccagaagcacgccgagtacccgtgctcctggtcgtgggagtgctccatccagaaagccaccacgcggtccagctcctgccccacgcgctccttccaggcctgcagagtctctcgctctttctccatgtcctaggggaaatggggcttgaaggcgcagcccccacatgggacctaggcccccccagcctcgggaaccagccctcagggatctccccacctctgcacggggcttcagacgtcaccatccccgggaccctccaagacagcactccccccaagcaccccaccactggcctgtcgcgctgggagacccttgctcatccctcctgctcctctaggaagccagacagagttggtcgcggtcccgtgactgtcactcagctgacacagccgcgcccggctcaccctccccctcctcttcagggttccgctgggcctggggcggggctttgagcccgacccccgcacttgttcctgccgcgaccctccactcgaatgggccagtccctccagggcccctgctgggagctctggtctcaagatcctgcttggtgggaaaagctgggatggccggagggtctgggatgagggggaacggggctgccacccaccccgccctacaccaggggccccggcagggcggctgagggccttggccctaccaagcctgtggggcaggggtgcagcaggacagggaacagctagtgggcctgaatgcagaggtccctctgacctgtcaccacacagggtagacaggaggcaagttctgtttttgttgttgttgttgttgtttgtttctttgttttttgagacagtgtcctgtcgcccaggcagctcactgcagccttgacctgccaggctcaagcgatcctcccacctcagcctcctgagtaggtgggaccacaggtgtgggccaccatgcctggctaatttttgtatttttagtggagacagggttttgcaatgttgcccaggctggtctcgaactcctaagctcaagcgatcctcctgcgtcagcctcccaaagtgctgggattacaggcgtgagccaccgcacccagcctagcaagtcctctcttttgaatcagtttgtcaccaactacctcaacagtcagtaatgggcagccattggcgctaattttttttttttttttcccaagatggggtcttgctctgtcgcccaggctggagtgcagtggcatgatcttggctcactataacctccgcttcccgggtttaagcaattctcctgcctcggcctctggagtagctgggattacaggtgcctgccaccatgcctagctaattttttttttttttttttttttttttttagtagacggtttttcaccatgttggccaggctggtctcaaattcttgacctcgtgatccacctgcctcggcctcccaaagtgttggtattacaggtgtgagccaccgcgctcggccttggcactgacttctttacacaagtgacacagctctaaggccagacagtaactgcaggtaacagcccacaccccccttctctgggcctgttttccagctgcccagatctgtctgtagctctatgactgacccgatgatgctacaaggcagctgggctgaggtggttcctaccttccaggccaacagtgcacaaaatgggttccagcctctgggcgtgggtactgcactgctggtctttgatgccacagtggctgtctcagtccctgctgcaggctgacccacccaaccccaaacagttcccctttggggtgcttggtaatgaggctgatgccctggcagctggggaggcatcctctgtgtgctcccacccaccctcggcctcggctcatgctcaggggatgagctttgtgcccagccgggctgtatctacctgccctgctcacaggcctgtcatgttcacattcatgtccagcctccctcctgcctccccagactgagtggtgccctcagacggaaacgcggtattttcagataaacaccagaggcatgactgatgtggcccttgccttgtggagtgtgatgcagccgcggtgagacaagtgagctgaaggaatgcggagggtgggtagccccacaggtgccagctacagaagtggggtaggaagaagccttgtaccacccccaccaggcgaagcgcccacaacgccatttgccaaaggtatggcaaatccgcaaggcccctcggttctggggccagccccatgtggcccctggcctccaccagccccagccatgactcctaccgctctgctctgaaggacactttcccacccctctccttgggcctctgcgaggctaggctccaaggcaggtcacagttggtgcggtgggtaagacagagccatggctcctggtgtcaagccctggccagtctgcttccccccacccccacatgacacagcagaccccacaggacagaggcttcccagaagaggtcgcattcgacagggccttgcacacacacccatgccacaggtggagacacggaggctttggttactccaggagcttctggtagcggagtgcctgggtgctctgagaggaaggctgggcagtagaggtgtgtaggggaaacaaaggcaggcggcaggggcttggagggggcggggaatgcaggtgcgccaggagcaccaggccccagaagcagggtgtcactcccctcagacccgcctaggcctgtgctgctccggccaccttgccccggagctttctgggcctcctggtacaaattcagcccacgggatcccagctgtcctaccgacccagctgctaggtggtcagtctggatcacaagctcttgcttcttcccttgggggcatggctcacatttaagaggaagccagaggaagggatccacctctgcagtacccgtggtgtacttgactcagcccacctccccccaacccacccaaggaggctgccgctggtgacctgccaggcccttgccccatcctatcctctagtgcaggaggggagggagggagatctgggccccagacacaggaagtcagcagcagctgcccaaggggctctttggcccttgccctgcaaggcagctaccaagcaacctgctggaccctggtccgacttggtccaaagaccggaggccacagcagaggcctcactctggggccttctacgctttcaccagagctcaggtctccctccagggggctcccgtgagcctcgggcaggtctcagccttcccgctcaggcttcctgagaggatgccgggacacagtgagacacctagtggttatttcaaaaaaagtcttttaattgttcaaaatagcacaaaacgacatcgcactatggtaatattgagtcacaggggttactctacaatagtgaacggtgtactctcctcagaaacaaatcaataggcgcgcgagagaagggatggggtaaaacaacaggaccaggtgagtgggctccaaggtgactaaacgtgacattttccacagcgaaatatactataatacaacaaaccagaggccctggaggacacaggctgctgcgtctccaggcagaggtcggtaggggagggctggaaagattggctgctcggttcaaatccttctgacttgctggcaagccttgctcctcgacagaagtttggggtggggggcagaaaactccaagcagatcccccagcctcggagcctggcctgagttccatgctgcacagctgctgctggtggcctgctccattgccctagcctcccttgtgggtgacactacacagtcaccctcccaagctgcctccaaggacgcctggttcccctccattctccaccctttccatgacgatttgggggaggtggagcagtggctgcggaaaccagcagccctgtttgggaggcggtgccggtggtgctcagggagggggcatggggagagctggaaatccaggacaaggaggccccagccctccctcaagctcccctaggctcgaccctatagatgcggagtgatcgcccatgaggaatgagctgtccttcctttgttccagcggcctgaggacaggcaaaagggcagagggcaggggccagcaacaggaagttgggctgggtggcaaacagcaggcccctcgtggcagatttcacacctctcctgccctggctggccccagcttttcctccagaaagatccctgccaagaattagccaagaagaaaaaagtaaaaaaacaaaaacaaaacaaaacaaaacaaaaaaaagagaaaagaaaaaagattacacattctgtacacagctaacaacaacaaaaaagggacaaaaccccacacgctaaaattacaatgaaagtgtgaacttcaccaattgcaacctaaaaaacacaacaaatgcagcagttggcagtgcggcctgcagggaggtctgcacaggcgctgcccaggccgccgcggggctccttgccccttttttctttttccttcttttcttttttaaaatgggaaagaagagggggagggtagaagaggtgggagcacaaaggcctctgagaaaatgtgtaagcttcctgtggggtcactgagcagggtgggccgggggagcctgaggaagggaagttaggtgactggaaacacaaggggaagaaaagaaaacagaaccagacacccaggccagggtgccaggaaagccactctggggagggccaagagggacgcctttcctcccctccatgcctgcccccgacctggccctcaggaacgcacagccttgggagggcggagctggctgtcctcagctccgccttccctccccgcaaaagtctctccccagggtgggcggcagcggggaggaaaggaagcgcgctcctctctctgctttcccatctgcctctgcttcctcccaacagcaatggtaaaatgtgctttctttagattattttaaaaacagagagaaagagaaaggggagaggagtgaacagcggctcgcgagggtgaagtgcgaatgctgggacggggtgggaggggtgggccctggcgggtgttcctgaagcaggggggtctggagaagaatccaggggctagtcagcttcctctcactgaccatcggccttagatttctttggagcagatttccttggaaggcagaaaaaggaaagagaaagttagtgtgggccctgcaccactggaggccctgctggtgcagggccggttaggggcccccagtcatttgacaagaggctgaacccagctatttccacccctagtctcagaaggttcccgagaggggcttcctgcttacatttctggagaggacatgggccgcttgttggctggcttggtgccagagctgtctttactggtttctggaaggaacgggagagatgcgtgagcagcattgtgacagaacgagagcaaggaacacatgcgccctgcccgcctgcagagtctcttggtgccacatggcatgacccgcagctggcaagggtggggcgcctgccctatgggtggtcaccttttacgccactccttgggaccagaacacgacaccactcactcccctctggacgtaggttagaaacccactcagctcagctcccacctctcactgccctcccaggtcccagagccccaggggagctggagcaggagcatgacctgacaggaggcaggctggcctccatccctcacctgctgcactccagggacctgggacgtgctgttttcgggcctggaaacctacactttcccgccagccctctcactgcttgtcccctcaaacatcctggggtggcgtcccctgcacccccaggcccggagctgggtcccctgctctacttgatggccacccccgtggggggctgtgtgcgcgccaaaggaagcagggagacgccgcacatgggaaaaaatctcagatggtgacagttcctcctgctgcacccggcttcctgggccttccctgtgcctgaagagctccacgaaggacactcaccctgcagccacctcacttgtgtggccgggccatagcccttctcattgcgggcggcgatgcggaagatgatggcgggcttggtggtgtagtcgatgtgggcgttggaaaggctggaggactgcaccaggcaggaggggctgggcccgcagtacacccgcatgaaggccagctgggccggggtggagctcttgagctcgcccccagcctgtgagctctggatggccaggtacacggagtactcgataatcttgccggaggtcacagagggtggctcccaggtgaggtgagcaccatccggactctagaagccagggggtcagaaggtcaacagaacaggctagaggcttccagaactgactaatcatggttcccataagccattttctaacacagtagagatattccatgtggtagttcaaggagcttcaaagagatcttcccccaagtggaaggactaagacaaactgggactcaaaacctagctctcctatgcccccccccggccacctcatgtgctgaggcaggcagaaaccaaccagggacagacggccaccccacagcaagactcactttgctgattttaatggcacaaggggcccctgggaaaccaggcaggcacgtcttaaaggctgagatttcgctgaagggcccccggccacaggcattgattccggcaacacgaaacttataggctgtgcctggctgcagctcctgcttcttcagctggttatagtcagggacggtgcccaaatcatcctaggaaaagaggagtggcatgaacgccactgtggagaaggcagctctgggccaccccaggaacactgcaggtccatggtaactatgggccagagggaaaagaggtcagcggtggctggcccctcacggcaaggagggacgtggcgaggctgactgtggcccggtactggcgggaaggaaccaaagctctccttttctactgcttcaggggggatggtctctgcccaccttcctcaggcttcctggctactcagcttggcccaaagatggaggagtttcctgtaagccccgctcagggtggtggagccaagacccacccacctgaggacatcagcacctggggacacttacgtctgatgggacagcatcatctggtggcaggaaatagtgtgtcaccattacattggtgcccttaatgactcccacatcaaaccactggttttccttcttcatgggggctttgctgggtgggggcggcaggtctggcttctgcaagacagaatcggtgcgacgagatcaggccctcagcacctagaggcagtgctgccccccaggccacggactcaggagccccaacacacccgactcaccacacccagggactcgatgccattggccacttcggtcagggtagctgcagcctgcagcttggctgggctggccaccacaaccggctggggggccacaaatgtgttggatggagccaggcctaggaagaaagaaggtgtcagcgggaaagactcgggaaacctggctcccaagtgagaccgagcctcccgtcctgccctcacctccctgggtgcccccaccaccccagcaccaattcgccctcagtcgcttactctcagtggccgttgagggcagcagcgccacagtgctggggaccgtgccggccagctcattgaggcaattgctctcaatggctgggtcgttgagactgtcggcaggggccagggcctcagtggggaggtggtgatgctgctgctgggcctgggcctcctgcagctgctgctgctgcaccagggcagccagctcctgctgtgtcagcacaatgggtatggtggtggcctggccctcctgaccctcggccgacaggtgccccagctccgcctgagtcacggttgctgctgcctcggaggtgtccatgggctcgccggtgcctgctccagggtcgagagaaacactacttactaggaaggctggccagaagcgggcagcccgggcggaggcccccaaagcctgtcctagagaccccgtccacctcctaccgtgctccactgtaggctaagccctggccgaggggccctgcctgtttcccaggcgctaaccccagccagcctgttctacacggcagtctctactacttggcctgcctggggtcccctgtgctcgtcctccccatcacatctggctcatgccaccctcgagggaaatgggctcctcttcccaggctgtctccgcggcctattgctcccccgagcggcccggcttccccagggttgcaccggcactcacccatgacggcctgctgcgcggcctggagcaccgcctggatggccagggcctgggcttcctccgtggctgcggcctgggcagctgcttctgcagcagccgtcactgccagctcctcgggggtgagccccgttaccatgagggtggtggtgccagcttgggcctcggccattagctcttggggaagtgataactggtctacttcggactgtgtgggtgggggtggctggaccaccacagtggccaccaccgcagagccggcagactcctggcccgaagatggctcccctgtgctgctcagatccacggcggccgggagctcaggggtctgggaggctgacaggacctcggcggactcccccatcagggctgtggaagccgactgcagaagctgccgtggcggcagctgctggcgaggacctggcgacacctggagttcctctgggggctgcaggatgtcaacagcagagaagggcatgtcagaagtttctgtgttggctatggtcactgttattttggccgggatggggacttcagtagtcagagcccttggggcagtctcagtcattgatgagatcttctagaaagggagagaagcccctgtcagaggggaggagaggggccagagccaggcagcagggctgagaagcaagccagccctcacctttccttgtgggcctaagttttcattcttgatgggccagctccagcccatgttaaatagggaggggacagtggttctctgaccagcatgaggagaaaggcccttgagacccccggtcaggtttaacccgtcctcagtcaccctggcctggacaaatgggcactcagacccccgccatgtcttatacaggctgcggtgaagtgacacgcgatgagaaccagtcccagaaataaaagcgccccagagatgcgggggacggtgaggctcctgcctcctgccgcagcaggcaccgaggctgcccttttatggtccggaaaagggaccaggagcggccccatgcctggtacaagagcgacatctggcgtctgagtgtggaactgcacgggcgtaggccgggaaggcggggaagaacacggccccctgggctcttaccggcacagaggggcccgggaccggtgtggactgcgtcacggtggtcacagcccgcgtcagtgtggaggacacggttgtcgtgatggcactggagctggtgatgttcacgctgtcgccctgggtgctctccacctctccctgatcgctggcagcaggtggggggtctgtgggggcgacaggcaggcggctgctcagcaggagcccccccggcctgtacttggcttgaccaccacaggcttcctctaccaccaaggggagggccagataaggcaggacaggctcctggagacctctgtctgcttcaggtacagccaggacgccccagctctccccactggtaaattgggtgccaaggagcctgactggtggactctggacggacccccgccatcgttgtcttggcctttcagcctggggggctgggagaccatgaaagccaggctggccaccttcacttaccttggtttgaactcatgttggaagtgacagtggtggccgtgtgagtggtgcccgtctcgtgggtctcacagggggggttggagcacaccctctgtgttgggaaaggagccagcagcgcggtgccagcctggggggtgacgctgggtgccgccgccacctctaggccagactccacggtcctgtgggaagaagtggcgtcgggaagcagggcacccacgctgaccgacatggtggtgccagtggaagtggtctggtgtgtctcacaggggcgaccagcagggggctgctgcccaccctcgggctggcccgtgcccccgtttgaagtagcggtggtggccgtgtgggtggtgcccgtctcgtgggtctcgcatggcgggttggagcacaccctctgggcgctgcctgcattcgaggtagtggcggtgttggtggtgcctgtctcgtgggtctcacatggtgggttggagcagacttgggtcacggtggccgaggggcacagcagtgcctccagggctgtcacagtcactgtggtgctgggcgagccaccctggaggctctcgcacacaggtgccatgcggggctccccagcacccacgctggaacgggtcatggcagcggtgctgaccgcatggctgtggcgccccgcaggaaggtccttaatgcttgggctgctcagcctgactttgctgctcagaggggccaactgcacaaaagcagggctgcggcccccgggctcccgtgccatgctcggcccaaggagtgggccggccgagcacggggccccggtggccatcacagtcatggtggtgctggtcgcgctggtctggcgggtttggcactgggacttagagccctgggctgcctccagcgccccagtggccacactgatccggatcacggcaggggtgccagctgcacaggcccgacgggcatctcgctggtggttggcgccgacgctcgacatggctgtagtggcagtgttggtggtgcccgtctcgtgggtctcgcagggtgggtttgagcagccatgctgcccggccatgttggaggtggcggtggtggcggtgttggtggtgcccgtctcgtgggtctcgcagggcgggttcgaacagactcggaccacgctaccattctgctggcccacagtcgaggtcacaagagaagcagctgcctcctgtctgtcacagacgaactgcacttgggtgggctgggggtgtcccccaaggttagccacaacagtagtggtggccgtgttggtggtgccagtctcgtgggtctcacagggtgggttggagcacaccaaggtgacagtgccaggctgcacatcaccctggcctgagtcggcgatggtaactgtggcggtgggctgttctgtagtcggggaggccagaatggacacagggaggtcatgcacaggctgggcctccaccccactaggtgccgtgatcagagttacctgggtgggctgggacacgggctggggagacacacgaggaggagagttagtgctgcagctggctgtctgcctgtccctcccactgtcctgcactgtcaccacacaggctgggaccactgaccacttctcaacggccctggcagacgtaagacccactcacccctgcccccaagacactgacttgctcagaggccagggaagaggcaccactttgcctcaaaggcaactgggatgaggaagaggctgtgaggacagggcaaggggaaggcaggaggctggctgaagtcaagtcctttgtcagagaatggaaatccccctcaatgctcaaaggccaacaacaaacgtttcaccgttttccttaatatgtatgaacagaacactgcacacacatgcagacgagctgcggcgtcctgtagaacactgcgagaggaagaacccggtgttcaaacaccaggcatggccaaaccatgacagccaaaccacggactatgacacagggaccatgtgacaccagggaaaatgccccaggtgaggaaaggcctgccatggctgcacccggcagcagcgcaacaccaggaaggaaaggcctgtggacggacggcgtgagcctcacgtgcttccacttgtgtggggtccctcgcccacacgtggcctcaggccctgccctacctgcatggtgatggttggggttgtgagcccgcctgccgctgtcagcgtggtctgtgcggccgacacagtgatggcagtggggttgatcacctggcttgagagggtggcaatggtgcccaaggtggtgatgggcgtggccagggaagcactagtgctgtggccccccgccccggcaaggctggtggagacggtgcctgtcactgtgcctagggtcgtgacacctgaaggaaaggaggcaagagttgggccaaggctgctgctgtctccttcccagcagctcctcctgcacaggctggggcactctggagctgcttgcatagaaggctcgggagagaggagctgctgtgccacccagctgtgccatggggattgaaggccagccctgcttcgttataatctaggggtggcaggggacctggcctatgggtacacacctgtggtgcctttcacaaccaacgtggtgacggctggcttgacggcggagacggtgacgggtgtgaccaggcgaacaccccccatgggcacagtgcggaggatggtgcctggctgtcccggggcccccttaagcaccacctggaacaccagaggaaagtgccaccaacgtcaccaccaggctggtagatgccaccgatgctgcccctcccaggcctgtcgggaggacctgcgtggcgtgctggggtggactgcactaggacactgggctgagagacggctgggagtgcctcacctgggtcactccctgctgcccgtggccagtggcaattttggggacagcagtgatgattttcgcaggtgctccagttcctgaagtcatcaccttggtggtgatgatggtgatgggggacttgatgccaggactgctggtcacacctggatgggagagtggggcccaggggagacaggctctgtgagggctgcccctgctgcccctagactataatgaacatccacaagtcacagccatagccctgcccatctcctcactacccttagacacaaaaggcagcaaggagaagatagaaaagggtaaactaaacagaaacacagcacgccttataacccggactccatttcccctccagtgaggacttgcagacactcatatgtcgggggaggcccctacccgtggcgcccgcctgggtgatgatggccgacatggggatggttttgatgatggtggtcgtgccgggcttggtggtactgggggagacgctgctgatgcccaggatggtgggcttggtccccgccccactggcctgcgtggtagtgatgatggtggtgggcttgccatctgctgaggtcaccagcttcaggattgttcccgctggcaggggccctttggtctgaaagggggaagcaggtgcatgagccggcatcactgccaggaagggaagtgtggtctggctactctccgccggcagccttggcggctcagggaatgttctggaggctgtgggcgaggggagtgagcagcagaacttgctgagccatgtgtgctcatgggatcttccatgggcagggacatgagttcttcctgtggcctggcacccaggcccccactcttgcgtatgtgcaaagactgagagctcacctggatgatctgagtcacaggacccgtggacgcctggcctgtgactgctgaagtctgaactggtttggtctggaccaccgacatcactttgcccagattggaaatctaaaaaggaagggatggagcaaggagtgatctggaaaccaaacaagggcatggcctggctgagactctcctggagctggcccagggcggccattcaccactggcagtggccgtagcctggcagcacccatcactcaccagagcactgcctcctgggacagagatggggctcttcaccagggtgatggtcttggtgaccccgcccacaactgtggtcaccacctgggcttgctgggccactgtcacagtgcctgacttgtgcactgtgatgatagggcgggtagacgtgttggtggcggaggaaaccgatgtccccacctgggcggctgcagtcttcagcatgcgagtggcagggttgctcacctggaggaggcagagacgagtgacaggccaggcaaagaaagcgatggggaaaccacccaagatgtccacggtgggcccatagctcctgcctcaacactcaccttcctcctcctcctgctcccaagcccaagaacagcttggttcccccttcctttaacaggcaagggaggaggctgagcctgcagctctcacctgaggccatgacgcccctaatggagacagcttattctgcagcccacggtccaacggctaactctaaagcccggagggaatgactatgcttgtttgaccacagtgacaagccccggaagacgctcaccatgactggcgaggaggccaccttcacagtggctgggagggtggtagtgccaggtgtcacagccatggtcttcacgatggtggtacccgctgggacactcagcaccgtgggtgccgaggaaggggggatcttctgggtggcagcggccgcagcggccagtgcggccatcccactcatctgtgggctactgccaatcacctgcagcaggcacgggcatgtgaggccaggtcacaggtgccacccacctccctgcttggtggacctcaccggaacctgcccaggggctgccctgctcttgggagcctcatcccgccagcatggctcagctttctctactgccagaccccgctctcctggccccagacacagagggctcccaccacccaccatgcacggcaacccccgtggcaagaggcagctgggagctctggatcctttctaaagaccagagtcaggtcccgttgattctcatgggcctgtggcaagcccagctggctagatcctcctctcaggctgcaggacaagaaagtccacgtggcaaatgctcttaggatcaggcagcaggttaggccttctaggcattaacctattaattcccaccatgacctcgcaggagcgtttccccatctgcacgtcccaggagggaaaggtgtggggtgcgtggtaccagagcccgagagggatgtgaacccctcagtacacttgcaacttaatccactggatcaacaggaaatcccacccgccccagtgaccactcctcaccgttccctgggcactctgtgttggcacaaccatccgcactccggcgggaagggaggtcacggtgacaggggctttcccagcctggctggcaggtcgcatggtgaccaatggagttcctgttgtagcctgaggaccggtcactttgagaacagcagggacacctgatgagagaaggggccagccgtcagccatcaccttctgcacgatgtccccagcccctttgcaggcagccctgagccacttctgttggcctgcttgtgtgggagtctggctcttctctgtgccctgagagtgaccatttccacaggtggggccaggctttagcatccccctacaacccttggagacaagcccaaagctcccggctgctggcctgctgtctaggctgccgtctcgcagcccctacttggccgctgcctctccccggaggctagccccctactttcaaacgtccctggtcccctggctcaccttgagtcctggctgcggtgggcacagaaatggagctgccaggcaccgttggcaagacctggatggtggtggtggtcgggggtgcgggggcagcctggggcaggagcgtgatgcctacttgggtcagcggctgcacagcaggtgcggctgctgctggggcagggctcttgggagggttggcaggcacagatgggaccggattgggtgtaggggaggtggcagtagcagccgtggcaggaatgtcatatttctggagctggagaaggtagctgtcggctgttgccactgccccccagctcacctccagggagttggtgttggcgcgtaccagttgtactcgggctgggggtggtggcttttctgtgggagaacgcagttggtgagaaggggcgggaggctatgggaggaggggagtcggctgggccgggcctacctgtctctaggtaccagaggtccttgcagcagacctggttgttccaggccttgcggtagccgtcacgcccactccaaatgtacaggcgggtgttgatggcgactgcgcagtggccagcccgagcacgggggatgttgtcctccagtgtatccatcaggatggtctcccaggccatggtatctgggggagggcagacaagggaggtcagcaaggaggatggaggaaacccgccacccctggttgcccttggttcttttgttgtcaaggatgggaattaaaatcaagaagttattggattattacattaaaaacaacaaaacaaagaaaccctttgtggcaaaaagcaacacaaaaaataaaattacaaaccaccaacggccaactaagaaaaccatgagaaacacagtcagaggtttacctccttgcccgttaaagaacactacaactcacagaaagagacggcaatgggaaagtggtttagggaaaacgtgatagaaagatcttaagaaaaaacacacactctcacgcaaaagaaatctaaacttcaaccatcggcgcctggcatttttattttcaggcccgcagcagctggggctcaaggtgagccggagggggagcttcggccacccatcaggcttggcaaagagtggcctgaccattccgtgagggcaccactggaggcgcctacgtgggcacagcctctgtgcagggcagttcagccgcatcggacagcaaccctacttctaggttttcacccctaggatacacttgcacacgggtggagatggtgcaaggatactcacggagcggcgcctgtacaagttacagcagcacaaccgcaactcgaaggaggctgctgcggggcagggacgtggagtgatctccaagatacggcggatgagaaaggccaggtgtggcactgcgtgcgccaggctgccactgtttgtttttaaagggacctatggctaatgctcagatatgaagagcccctgcagggtggacaggaaaccacccacatggctgcctctgagaagcagaaccggagaaccgggaggagggaaggaggccctgcaccgtagaggcttttgcacttttggatgttgggccatttggatggagagctcattcaaaaaactcagaggcggaacattgcttcagagagctctgcccactggatccttccagtggattccaaagggagccgggggcccagcttgctccccgcacaccccacacagctcttaggctgagaagggccagcctcctgcagcctcccacaggccactcggagcccgaggaggccatacccaggttgagacaagccagcgtgttggtacacttccactccttctcgtgtgtggccactttgacgtcatccatgacgagaggcacccagccaccaaacacgtacattctgggagtgaggagggaagagtgggaaaggattgtagagttggtgccaagctagaggccacctctgctaccccagttctagagctcagtcctctggctctccccaggagagtccccaaggatgcgtgaagcctcctgacgtggccctctcctgcctggtggctcagccctcaggagaactgtgtcacctctaccacataaaagtgccgttcagctcatctaaagctcaccttcatgtccacagtttctaggttccctttaggacctggacatccacaaagacacccaggtgcttgcacagaggacctagaacactctgtacctgatagggcggagcctcacaggcccggggagggtctcagactcagcttgtgtgtggccctctcccccctgaatctgtctttccttggtcccccagggtcgtaatggaaaaacagggctgccaaatgccagcccagccagaaagaggcatcctcaggccttagggtctgacaggacaaaactgagtgagagcccttcgggggaggggccacgccagtctagagaagagagacgcaggtgagcagccacttacttatttccgatggtggttgccgagtggagactgcgaggaagaggcgccaccccgctgagactgggcttattccacgtcagggtgtctgcagagagacggaggggaaagggttacacaaggtagactgcacacaggtcgttccctggattcaagctagctcaggaaggtaggatctgtctcagtgagagaattccatccctggcttccctatagcctacggcaggccctctgactgttgtcatggtagctagattcctgtgttacccaggcggtttcgaccaggctagcaatagcgctccttcaggtacatcctgagcacctgccctgagccaggactgcactctgtgctgggggaggagtggtgggcacaccccgaactctccatgaaatacgttcaccgccataaccaccttaggctacagacattttggcaaactgttggaaaattctctcacgggaaactgcttctttggagtgccgactctgatctataggacaacatcgccatctcctctctcccagctgaagaggcctccggagatccacagttagtaatctttcccagccactcctgataccaccacctggtgaccggcccaagcagtccccgaaggcctcacggtttaccggcatccaatggtaccacagcagtcagaccaggatgcagcactccacacagtctgaccactgacgagtcaagagggactaatgctacccggatccagagaattccattctagaaagccttaatgacttattctcttataagcccgcagaccaattcagcccactcagccagcacagggcagagataacagccccaaacctagggacgatccagggttccccaccctggcccaccatgacaagaggaaagcacgaagtggtatgctccagctccctaagagccccacctcaccatacaacagcgccacccacggggccagccaagaggcagacccgctttgtcccatggctgctggggtgctaccaccctgctcaccaatatctagggtccacaggtcccccagcctgcagccactcatcccgccgtagatcaccagcttggacttcttattgtctttttcggtgtagaccacggcagtatgtgactcccggggtggtggtaggaccccgtaagtgatgggaatgtcccaggctaccactccagagcctggccgtaattccaggatatataagtcattcaggtacctgacgaggaaagatcagttacggcaagtctcgactcctcacgccagaggcttcgctggatggctatcagtgagtggcagcctccccagaacacaaaggggctagggctgtgggagctctgaagttcttctaccctagctcttgaggaaggggctgccagaagctccctaggatgagtccaactggaacaggggacacagggtgggtgaggctgcacagcagccccgagtccagacccagcagcaggcccccgccatgcacacaaagctgggtattatatgagggctccgcagagcaagagggggcgctggcttgggactacctccagacagagagtccttggccacgggccttggaaaatacccatcaggaaacttgtaggcagcggaggctgagaaggaacgcgagcagctctaagccgactccgagagctgggccagcccaaggcaaagtggcttccacctccagcttggccctcctcccacgaggcctgctcagggtcagtagcgattttggagcccgaaagctcctgagagggcatccggtgccgctctctcatttacaacccagcacgagaaagggacccggccacggggctctgctgcgcacattctttaggacaccatggagccctgtgcatgtgagagcacacccacccggggggttccagagaaaaggaccaagcctcaccttggaatgttgttctttgggtcctcgctatcattggccagacccccaaacaggtagcatttgttgcccacaagggagaagctgtgcccgagtcgaggacacggagggggcccgtttttgggcgtctttgctttgagtctcttccactcccaccggctcgcctgcaaaatcaagacctggagactgaaccgtgggatgagaaggccaccactagggacccggggcaacttgtggtggaggaggaaatggccgggggtgagcgaggtgccttgctggagcaagaaggtcctgggtgttggtccttgctgccttcttctgaggtgggccaagttcagagcagccttggcagactctcaagcgtcccttccacctcccgcttgcctcaaccctgaagccactaccgtcaggtcacatggggccaaggaggcagagtgagaacctggggctgctttacctggagttcgtagaggtcattgctgtatttcccatactccaccatcccaccaaacaccaggaggcgagtcccgtcacacacgaagccataggctgcacacccagggggaatgtcccccctcacggctgggatgaaccactggttggttgctggggaacagaaggaggcagaagtcagaacacccgggagcccccattcctctcattccccaaatgtgccagccgtcaagcttggtgagaggggctgagccagcaccatccctgcgggcgctctagcaactccagctgcgctacctgggccatcttccaaacccctcgacttcaggccagtgcaaaagagcctgtgaccaccctgcttctcgccaaggtcatcttaatgagcgggaagttactgtgcaagatccctcatcagctactgggaatctagccactgccttccttccctagcactcagtgatcagacatgaatttctccccaaaataccctcttggtgggcctgtgctcctcctccctggagcccacatttttgtcccttcatcacagggtcaggacagccagagcccagagcagcactttcaagtggccaaaacagtgaccgctgcaggctacgaagagccatggggatgagacccggcctctgctctgacctcccggacttcctctggtctcctaggtgatggtccaccagcatccctccctgcccctgctgccacacctatggtactccagaacattcttgcaagccagaggcagcagtctcagcagagctgtgacagaagcttctcaaaagctcatgagggtgaggcgaccaccaagaaagagggaaatcagaccttaggcactgctttgcttccacaggatggcacagcagccttcagctgggaccaggcccctccctcatgtcctcaaacttgactcccctcacacctggcaggccagggcttccccgaaaacctcctcctatgaggggtccctcagaggattcaccacactctttccagaaaccccaaactgggggccaggtgcaaccccgactctgtgcctctgagctggcctgggtgagatctcagcaagcagacggcagaaggaactgaggcccctccacatgactcaagacgcaagatgggtcccccaggacgtgacagggcatggggggattcctgtggggtgggaaggcttccacacagggatgctgtgatattgtgatataatacagactattcagtttggtggccaaaagtgttgtgagaccatagaagaggaaaaacagtgttttttttccatattcaggtgtgcacccagggccaggcggctgaccatggttgggaatgcatgccccactgcactctggtcccacccagtctcacactgtcacccccagggctcaatgcggaaccgtgtgcaaggctagcccttatccaaagcacaactcccagcctgggtagcacagggagaccccgtctctacaaataattttaaaacactggctcagtgtggtggcatacacttgtggtcctagctactcaggaggctgaggcgggaggactgcctgaccctcagagtttgaggctgcagtgagctgagaccgcaccactgcatcccggcctgggcaacagagcaagacctaacctcaaaacaaacaaacaaacaaaaaaaacagaaaaccccacacagcacaactgtaccaccaccgctcctcctgaggcgagagcacccccaccccgctctccagcacccactctgcgggtaggcttcgagcaggctgacagcctctgcagccattcagctgagtcactgggcctcggacatgccgagcactagagctcccctgccatttccctaaagcagagggacaacacctgtgccgcccgcatgtgcaagctcggatcctggccctctgcctctttctcattcccagtgcaaaaaccaccccagaaaagcaagagctgccaaggccaacagccttgcgcactggagagccgtcctgaccaatccctggagggagctccatgcaagctaccagggtaaacgcataacgagacctaaggctgcctgggccaactgctctcggtaggtaaaggggcagagcccaggagggcaagcgacacctgaggtcacagcgtaaaacagagacagagacaacagccccatcactgacttgaagcaaccgatctgtgccttccctagggtcccatgtccaggcagccaccctcactcccctgagcaccctcgtggtcaaagcccacagctatggggctgcgggtcagagtttgggacaaagctaaatggcacgtggggtcagtgggcagctttcctatcacacgctgatcagtgagccggtgggccaggccagaagcgccctgtgatatctttggggatcccgctcaccagatccttctacaggacccaagaggtgctgatctcattctagaacactccaggcagggcaggggccctccccacccccgtcaagagaggtctgtcagggagcacagctcctggtgtgacgacaaacctgcggctcctcatctcacccacgagtcctggttccgccccctgaaagcacacgagcaagctctcctcccttctcccagcttttcaatgtgacagctgctctcagtcacccctgaatcatctggggggtgtcatgtaacccaatccttgggcccctcatcctggaaatgctggctctcagctgggaggggaaggtggggaaaggaccctgcactagatgaagaccactccagctcccctctcctgagcaaggctgtgccccggcctctctgtgtttcatcagctcccccaaccacttcatgctctgcaagctccatccctggttgccactgtcccatcaccacctagagactggtgcccatgcagtgaggtggccggtcaagttcaacgagctgccttcctctctgttctacctgtcacattagagcatttcctgtgtggcatacgacgtgctgggaggcacagaggacaccgatcttgtgctcatactcccaatggggtaggaaggctgcatgcccccctcccacgatgagacaaacaccctagaagagctctgaccaagccgggcccttgggagcacagagcagtgcgactgctggagaggggaggacaggagtggaaagggcttctcagaagaggtgacgtttcagccgggccttgaagggtgaacaggatttcccgacaaatgaaactagcagggccaatcaggaagtgactgcaagagtctagtaagaggagaggagggcttggtgtggaaggggacacatttgatgcctgcccaacgcaatgaacaattagatacagggacagaggagagaatggaggcatttcaaaggtgatgggccccaaagacaggtggcagaacggcctctatgaaggtttgcactcccgcccaactccgccaccagctgggagggcgaccctggacctgtcacttcccctcttggaccccaatttcctcatctgcagaaacaaggaagtagttccactaggtattttccaaggctccctccagctccaagaacctatggacattacagagccaccgtagccaaagctctcgctcccccaccccccacacctggcagcactctgaatcctttggcttgccacatggaactaaaattccctaaggacaagcacagtagctaccctaagagctctcaaagcacacaccccctgaagctttcttatcctagcaacgggaaccccttccagatcagctctctccaaaggtacaaggctttttgaggactgatcccgcagaactgcaaggggcacaggcgtgagaatatgccctgatctcatcccaaacacaacaaaagaagacaagacaaaggtgacgaggccgggctggcgggagggggcagaaaccccggtgaggaagagggcttcaggtctgccagctgctctctcgtctgaggaattgccgatgacagtttccaaactgctaccctggaggatcccagagcttcattttaagcagccctttggaaggcaggctacccctctaatgcacaacctgtctttgcagactggtaatgaattcatgccaaagtggtcaattcattttaataaactaatgaatatgcagaggccccaggaagccaaggcagcagtggtggtggactctggagccgactgtaattaggcccctgccctactttctaaaattgcatttccctgccagggagcctgctccaggccttatgagaagaaagtcggtccacagagtggagaaggtgctgctcatggtgacggtgcctctataaacagccccaccactggagaagccttagcttactgagctaattcctgctactgcagctgcctgggctggcgcggggcaccaccaaccaccaagcgcccccgcccgggggctgctgagaaaggccctgctccctggaggcaacaggtgctgagagacctggaacgaaaaacggtcacagacaacccaccagcctttcaaagtcaacgtggtaggtggcgataatctccgagatgtggagaaaccagcactttctgccttggggggtggggaaggaagcggcacccaagagcccagctccagccttcccaactccctaaaccaactttctccctccaggcagctccagcttcccacccccagagcatcgaggcactggagctcagccaaagaacagcagcctctcaccgctcaggacacaaagcccactcagcgagggtttgtctgcagggccaccaccgaggccaggggatcgctagagcccccaggagagaacggccgcggagcaaggggttagtgctgggagccgtgcctgccactcaggactagggcatcccaaggccctcccccagccgcctgcagggggcttttccctcacccagactcttccagctcttgcctgggaccgaactcaccctgaccctgccttctgggcaaggccagggtcctgtgggccaacgggcagtcagtaggcaacttgggaactgacccttgtgctaggggcacaaaacgggccaagtagccaccaagaaaaaggatgccacaaagctgtcgtggacagcagcaggctttctgccctagagactaagcaaggctactaggcagaggcaacaacaaacggcccccacgaaggccgtggtgcatcagccatacctgaagagagaggttcctccccttcccaactaacgggctttgggttttgcagggaggcagaagagcgggtggggtaaccccctggatccgcagaagcggggagacacacgactacgcaggccgctgaggggtaactggaattcagcttgtaaaccagaaggcaccagattaggagaaggggcgacttggaaagaaatgctgcagaagtaaacgtggaaagggagaggcggccctgccgccggcccgtcctaggggtccccaaggctccggcattacccgggtcggcggatgttaaactctgcgtcctaagagcgcttcccttccctccctttttcgagagacagagaacgaatctgtaatctagaaatggtcatttctccagaatgggcactcgagatgagggagagctgagcaggcgcaggagaagggagggagggagggaggggagctctgcctgcgccaaggggacacatccgcccgccccagccccagccccagcccgctgggtaacggtgtgggtctgaagtcaccaccgctggcgacagcccctctccctcaccagtcggactaggggctttcttttaactaacgaaaaccaatcctcaaacacgggagagacaagggaacggggagaagatcagagaaaagcactgaagcccggcacagcaaaggggaggggcaagccgatcagtggggagggagggggaggaggggagaagggggagggggacggggagaggggagaaggacgggtaagggaggaggggagagagagagggaagggtagagggtgagggaggagatggagggagggaggagagggagggagcagatggagggagggaggaaagaggagggagagggaggagatggagggagggaaagagccgaagacccagcgggctttgcactcacccgtgttgtacacgtgcagttcgtccactattccctcgttgccgccgccaaacaccacgatgagctccttgatggccacggcgcggtggccgtggcggggccgtggcaccggacccgaccagcccaccactcgcttccagcggggctgcagaagcaccgctggcaagttggcgggcgacacggccgaagccatagttccgggaaagggtgcggtggggagaagtcaacaagcgggaagggagcccctcaattcctttcacacaccccctttcgtctaaggcagctctcacggagaagcggtttctcacacagcggtagacgactccatggaggccgccatcttaactgccctccttccctttggctcttccctttcttctcgctcaccccgtctccgcaagagccgcccgaaactgtcgagcgcctaggctcaagaagctggaggccgctgagtcccgtcgccccgactacttgtccgggcgctcccgcttacaagctcgggcgggaggccctgggagccgccatcttgagccgcctctctctcctcccttcctcagtcgtagccctcccccgccggaaatggcggagccccggcccggttcccacacccccaagtccccagcactggccggcttccggggcgggtggaaaggagccacaagcgccgcggtcgtcgcagccccgccggcgctcagaccacaattgtgggagccgccatcttgagaccgtcccgcttccccgcccagcgccttagtgcagccgccgctcccgaaacagcctcgacacacctaacgaatggaggcgggccggaggccggtggaaccagctcgagctctcgagggccgtttgggggctcgcgccgtacggcttgtgaagtctcgcgcctctccccttagtccgcctctgctgctcaggctgcgcctgccgccgtgggagccgccatcttgagactagctccccgttcccccctattctcttcctcctaggtcagttcttccactgcacaccaaactcaaggcggtgtccgatcctcacttcccgccttatgactccttcccacaggagccgcttcaaagagctagagttaggccccgaagcggcaactgtacggcagaagaagcggtaacggcagggcgctcatgcctcctccctgggagccgccatcttgtgtgaagaagtaacaactaaacatggcggcagcggcgccggcggtcgggcgaggaggcggagccgggtgacgtcaccgcttccccccactcgccctcgcaccgcttcgcccctgggcccaagcctcttaaaggacccctgcgctgcctcgcggcgggggtgggggtcggcgctgccgcgcgctgggctaaagctcgagtcgcgctcagatcaggtgcaggcgcaggcgcgccccgccccacggcccccccaccgggcgagcctccacgcctccgccctgggagccgccatcttgccacttcccctcgcccggccgtccgcgggcgtcaatagcgactttcagcacaaaacaaagatggcggcggcggcatctcggaaatgcccggatgagactgctaacccctccgacgcgctcggccccgcccccttgggaacggtctctcgggttgataagggacgcacgcccgaagaactgcctttaaccagcactggggacagcggcacgcaggtggccggggttggcgaacagccactgcagccgcgcctgcggccgggaagcgagcattttcgcgccctgcacacccagcagccgcaggaggcggcccgaggcgcgccgcgggggagccgggggcggggcgacagtgggaggcgacgcagccgagcgccggcgcccgggggtggagcctccgcccgctcccaggctcccaggctgcggggcccgccctcgggcgccaccgcctccgcccgcgccgcagcaaaatgagccgggccgcgcgccccagaccgccgcgcgctcggccgcccccactgccgagaggcccgcagtcgggccggtggcgcacgagccgggcgggcgaccgcgggaggcgtccgcgtcatctcgcgtcacctcgccccgcccgcttcccaggcttcgagtcccgccctgcgcgcaggcgcaccggcgctgctcggatcctcccttttcggagatttgaatttcccccagcgaggcgagtgaggcgaaatacccgtatggtgatagctggccttttcgcgccaatactgtaagtgctcaccgcagccctgggaggtgggtcccggcctcgcccccacgtttcgcctcctctaggaggccgcccgggcgcggcggcggcggcggcggcggcggcatccgccctgccacgcgcaggccgcagcgcggggacccaagctgctgcccgggagcggcagtcgccagtagaaatggacagaccggtcctgtcagagcctgtggcttttgttgtaaacgtctagaagttcagttaaattacaagatctaccagatctaccggcgggcagaattattactttgaagttactgaagttatgcgtcctgctggaagaccttgtaatttaatgcgttagtaaagaagcacacgtcaccctctcacacattttcaacaatatttttaaagtcgcctctcaacatattacatgtattttgtaatcgtctgtgttttagttcatgcagttggaagtatccatttgagaagggacaaagagaagaattcttgcctgtctgtgccaccacctgctctttgtgaccttggctagttacctcacatatgtccccaagtcccccacccatggtaaataagaaaactaaggcctgatgcgttggctcatgcctgtaatcccaacactttggaaggctgaggtgggaggattgcttgagcctagccggggcaacatagcgagacccggaggcatggtggcacacgcctgtggtcccaggtacttggaacgctgaggtgggaggatggcttgagccagggagttcagggctgcagtgagctgagatcgcgccactgctccagcctgggcgacagagcaagaccctgtctcaaaaacacacacacacacacacacacacacaaaagcagctgctggtttccaagggccttgcctggaatcagtccagaagctaaattaatgttaattgatattcctttatccacagaaagacagcaagaaaggtcatgcggagcgggggacataactaaccataaatgctaaaggcctggaggtgacagtgcctgctgtttaaacgcgtgcgggagagtctggggcctttagccaggagattgtcaggcttcccagggcttccctgaaagaccccagacccaggggccagtgctgttgaggtgttggctttcccatgccaggcgctgggggaagctgtgacgagatttgagtgtcacataataaggatcatggcaattcaaaggtacagggaagctaggctataaggtaaccagctcggttttcctgggggtcttggacaggtgctttgattacatggtcactgtcagcccgtacccccggtcagatagactgaacccctgcagccggaaagaggagttgctttccatgcccttcctggagttcttcctcgatcaagttgacagtgtttgactcttgttccagctctccgccctgcttgctggcaggcaggagggtcagactagcatgggtgccatggggccctaggtgggtgcagggaaggacctgtagacgccatgcggggcctcagctggtgtctcagctggagtcaggagctgaacggggaagtgcctgagaggaaatgacagctgagtcaagggcaatggccaggcgaagtgggcaaagggcttccaggacagagctgggcctgaggagctcacagggctggatggggatggcactttaagtctggccaagactttgggacatgatccaggacatggaatgggaagctggtcatggaagggtggaaagccagggcagacatgatcccatccagggctgctcaaagatgctggggctgcggtgtgcacacccctggacccagaggcttttttgactgggaggacggggcaggaggagttcgggtgccccatgctgagatggcaggcttgtgtgaagcaaggacgtatggagtgatagtgaggactgtggttcctgtgtggcaacaccatgcttcagagggcaatggggcacccacatgccaagcctggtggccctcctcagcaacggaactccaaggcaagaaggctgagaatgaggcccaggaggatgcggtgggccccaggacctgcttgagaagtgaaatagcaaacaggactggtaaaagggagcagaggtgctggctttgttctttaatataattgaattgaaattgagcagggcttcactgggcatctgaggaagagcaaggaatcagaccctgtcccacccatttggggcctaaattgcagtagggcagatggacattgcacctcaaaaataaacagtgcttgtcacatgaatcatttgcaaatattttctcctatattgtctcttcattgttgattgcttctgtgctgtgcaaaagctttttactttaatatactcccatttgtctgtttttgtttttgttgcctgtgattttggggtcttagccataaaatctttcctggagcatttccccattttcttctagtagttttattttatttattttattatttgtatttatttatttatttattttttgagacacagtctcactctgaaacccaggctggagtgcagtggcacaatcttggctcactgcaaccttagcctcctgggatcaagcgattctcctgccacaccctcacaagtagctgggattacaggcgcatgccaccaccctggctaatttttatacttttagtagagatggggtttcaccatgttggacaggctgggctggaactcctgacctcaggtgatctgcccgcctcagcctcccagtgtgctgggattacaggtgtgagccaccacacccagcctttttttttttttttttttttttttttttttaaagacagagtcttgctctgtcgccccaggctggagtgcagtggtgtgatcttggctcactgcaacctcctcctcttgggttcaagcatttctcctgccccagccccctgagtaactgggattacagatgtgcgccaccacgcccggctactttttgtatttttagtagagacggggttgcactgtgttggccaggctggtctagaactcctgaccttaagtgatctgcccgcctcaacctcccagtgtgctgggattacaggtgtgagccaccgcgctggcctcttctagtagctttatagtttcaggtcttacttttaagtctttaatccatgttgagttgattactgtgtgtggtgagagataggggcctagttttcattcttcttcacatacttatccaattttcccagtgccatttattgaagagaccatcctttccccaatgtaggttcttcgtgcctttgtactacttataatagctaagatatggaagcaatctaagtgtccaccagtggattgatatgtaaagaaaatgtggtatagatacatgatggaatattattgagccatttaaaaataaactgttggcgggcgcggtgtttcaagcctgtaatcccagtactttgggaggccaagacggccagatcacctgagatcaggagttcgagaccagcctggccaacatggcgaaaccccatctctaccaaaaatacaagaattagccaggtgtggtggcaggcgcctataatcccagctacttgggaggctgaggcaggagaattgcttgaacctgggagacgcaggctgtggtgagccgagattgtgccactgcactccagcctgggtgacagagcgagaccctgtctcaaaaaaaaccaaaaccaactataaaaaataaaaaaaataaaaaactattggctgggtgcagtaactcacgcctgtaatcccagcactttgggaggccaaggtgagagggtcgcttgagcctaggagtttgagaccagtctgggcaacatagcaagaccctgtctttcaaaaaaaatttaaaaatttgccaggcatggtaacatgcctgtggtcccatttacctgggaggctgaagtgagaggaccacttgagcctgggaggtggaggctgcagtgagctgcaatcacaccactgcactcagcctgggagacagaacgagaccctgtctcaaagaaataaacaaactaataagataaatcttgttatttgtggcaacatggatgagcctagaggacgttatgttaagtgaaataagccaggaacagaaagataaatattgtatgtgttaattcttatgtaaaatatttaaaaaatcaagctcatggaaatagaagcatagtgggtattagaagctggaaagattagagagtagggaaagattcggaggagtcggataacaaatacaaaatgccagcttcatagcatgaatggatcctgctgttctgcactgtagggtgagcactgttaactacaatttcttgtgtattttcaaaagactataagaaaggatttggaatgttcccaacacaaagaaatgataaatgttccaggtgatggatatgctaattaccttgtttgatcattatacattatatacatgtatcaaaatgtcactctatatgctattaaaaataataaaataggctgggcacagtggttcacgcctgtaatcccggcactttgggaggctgagggggacagatcagttgaggtcaggagttcaataccaccccagccgatatggcaaaatcccatctctactaaaatacaaaaattagccgggcgtgatggcccgcctgtacttccagctactcgggaggctgaggcaggagaatcgcttgaacccgggaggcggaggttgcagtgagccgagatcctgccactgtaccccagcctgccccacagagcgagactctgtcccaaaaaataaataaaataggccaggtgtggtggctcacgcctgtcatcccagcactttgggaggccgaggcgggcggatcacttgaggtcaggagttggagaccagcctggccaacatggtgaaaccctgtctctactaaaaaaaatacaaaaaattagctgtgcatggtggcgggcgcctgtaatcccagctactcaggaggctgaggcaggagaatctcttgaaaacgggaggcagaggttgcagtgaggcaagatcacaccactccagcctggacaacagtgcagacagtgcaagattccgtctcaataaaaaaataaaataggccaggcacggtggctcatgcctgtaatcccagcactttgggaggccgaagcaggtagatcacgaggtcaggagttgaagaccagcctgaccaagatggtgaaaccccgtctctactaaaaatacaaaaattagccgggctaattttagttgtaatcccagctactcaggaggctgaggcaggagaatcactcaaaccccggagggagaggttgtactgagccgagaccacgccactgcactccagcctgggcgacagagcaagagtctgtctcaaaaaaacaaaataaaatgaagtaataataaaatagtgctaagtggtctgcatatacagatactttttttttttttgagacggagtctcattctgtcgcccaggctggagtgcagtggcacgatcttggctcactgcaacctccgcctcccaggtttgagcgattctcctgcctcagcctcccaagtagctggaactacaggcatgagccatcacgcctggctaatttttgtattttagtagagatggggtttcaccatattggccagggtggtcttgaactcttgacctcaactgatccacccacctcagccacccagagtgctgggattacagacgtgagccaccacgcctggccactttttttttttttttttttttttttgggggggagagggagtttcgctcttgttgcccaggctggagtgcagtggcgtgatctcggctcactgcaacctccgcctcccgggctcaagcgattctcctgcctcagcctcccgagtagctgggattataggcatgtgccaccacacctggctaattttttgttttgttttgttttgttttgttttgttttgttttgttttgtttttctgagatgaagtctcactctgccgcccaggctggagtgcaatggcacgatcttggctcactgcaacctctgcctcctgggttcaagcaattctcccgtctcagcctcccaagtagctgggattacaggcgtgcgccaccacgcctggttaatttttttgtatttttgtagagacagggtttcaccatgttggccagactggtctggaactcctgacctcaagtgatccacccgcctctgcctcccaaagtgttgggattataggcgtgagccaccgtgcccggcctaatttttttgtatttttggtagagacggggtttcaccacattggctaggctggtctcaaactcctgacctcagatgatccacctgcctcggcctcccaaagtgctaggattataggtgtgagccactgcgcctagcttttttttttttagagatagggtcttgctctgtggcccatagctcactgcagcctccatctcctgggctcaagtgatcttcctgcctcagcctcctgaggagctgggactataggtgcaccaccatgcctggctaatttttattttattttttaaatttaattttatgtattttgtgtagagacagggtctcactttgttgcccaggctggtctcaaactcctggactcaagcagtcctctcaccttggccttccaaattgctgggattacagatgtgagccaccatgcccagctacatatgctttttgatgtataacagggtaatgtccagataaacccatcataagtcgaaaatataggaactggactttcaacttaagaggggtttagctgggtgcagtggctcactcctgtaatctcaggactttgggaggccaaggcaggaggatcacttgaggccaagagttcgagaccaggctgggcaacatggtgagaccctgtctctacaatttttttttttttttttttttagatggagtcgcgctctgtcgcccaggttggagtgcagtggcgcgatctcagctcactgcaagctccgcctccagggttcacgccattctcctgcctcagcctcccgagtagctgggacaacaggcgcccaccaccacgcctggctattttttgtattgttttagtagagacggggtttcaccgtgttagccaggatgctctcgatctcctgacctcgtgatccacccgccttggcctcccaaagtgctgggattacaggcatgagccaccatgcctggcccaaaatttttttaacaaaaattagcagggcaggccgggcgctgtggtagggaggctgaggtaggagaatggcgtgaacccgggagatggagcttgcagtgagccaagatcgcaccactgcactccagcctgggcaacagagcaagactccgtctcaaaaaaaaaaaaaaaaattagcagggcaaggtggtggtatatccctggtcccaactacttgggaggctgaggcaggaggatagcttgggcccaggaggtggaggctgcagtgagctgtgattgtgccactgcaccccagcctgggcaacagagcaagacccccgtgtctaaataaaaatacccaggccatggcagcagaaagcaaggaagaagccacgtggaagccctcctggcgcttcttccagggaggtgagcagagagcacctggggccaggaggcggcatgcctgggtttctgctcctcctcactgtaactttcagccaagtcaaactgctagagtttcagtttctttatctgtgaaatgccggggctggcacagatggtttctaagatccctcccaggcctggaacttctaagcgattaggtcaaaggtgagctaaccgggctgggcacagtggctcatacctgtgaatcccagcactttgggaggctgaggcgggtggatcacttgaggtcaggagttcaagaccagcctggccaacgtggtgaaaccccaactctactaaaaatagaaaagttagccgggcatggtggtacacgcctctaatcaccgctactagggaggctgaggcaggagaatcacctgaacctgggaggcggaggttgcagtgagccaagattgtgccactgcactctagcctgggcaacagagtgagactccgtctcaaaaaaaaaaaaaaaggtgcacaaaccgaggcccaagacagttaaggtgcaagatcacatggttagtaagtgggagagccaaggtttgaacagtctggcatcagctgaccaggaactggagcccacccttctctctccctgagcccgcctacccgcccaccctcttgagtgcgaaatttattaatatggaagggagaagagctttaatgattggagtcattttcagagcattaaagctcttctcccttccatattaatgtatttctcagctactagggctcacttacagcaccagtggccccaaagcagttgacagtcagtggtaattaaattgtctctctggttctgtgactgaaggagacagaaggctttatggtggcctgaggaaagaaggtgatttggggcttggcacttcaggagagggcaggcgagtgagccagggaagctggcctgggaagcctgcgggtcacccccttgcctcccggcctggtgcttgagtggcagacggtgaatcctcctcctcctccatcccccaccttgtgtcagaggccagagctcggactccatctaatggtctctagttcagctgggtatttggtgaaaagggctttggggctggagacgtccacttttataacacactgacatgggaaggcgcattctgagttgtaatgacagagctagacaggtcttgtctgtagatgcagtggctttaaggaaactaggacgatgggcaggattttcctaggtgccaggagaaaggggtgatagaggattctagaggcttgagagagtcagtgtgcagcggtttcactctgatttgcttctccagtgaagatggttggtagctcctgaggccgggggtcaggaacatggaggcggtgctggggacggtttgttttctaaccacactccttttgtaaccacaaaggaaaaaggcagaacgttcctccgctggcgccagccaatcagcaggactcctgccttccttcggggcaaggtcgcagcatctgcctcggaaatcacgaaatcacggggcttctttctgctggctcagccgggaggcccagagtgttctgcagaggctgcgtattgaaggctgctctctgaagctccctgccccaggtcacgccgccggttccagatgaatccagagtgggggcaggccttcgtgcacgtggccgtggccggtggcctctgtgccgtggctgtgttcacgggcattttcgacagtgtttccgtgcaagtgggctatgagcactacgccgaggcgcccgtggccggcctccctgccttcctggccatgccgttcaactcactcgtgaacatggcctacacgctgctggggctgtcgtggctgcacaggggcggcgcgatggggctgggtccccgctacctgaaggacgtgttcgcagccatggccctgctctatggccccgtgcagtggctgcgcctgtggacgcagtggcgccgtgccgcggtgctggaccagtggctcacactgcccatctttgcatggcccgtggcctggtgcctctacctagaccgcggctggcggccctggctgttcctctctcttgagtgcgtctccctggccagttatggcctcgctctgctgcatccccagggcttcgaggtcgcactgggtgctcacgtggtggccgctgtggggcaggcgctgcgcacccacaggcactatggcagcaccacctcggctacctacttagctttgggggtgctctcttgcctgggctttgtggtcctcaagctgtgtgaccatcagctcgcacggtggcgtctcttccagtgcctcacaggccacttctggtccaaggtctgtgacgtgctccagttccactttgcgtttttgtttctgacgcatttcaacactcacccaagattccatccctctggcgggaagacgcgttgaacccagggaagaacctgctgaaaaccgatgacccccagcattgaaatggactctgagatggcagcgtggtgccagtgtcagacatcctgtgtgtgatgatatgcactgatcacacaagactgccctttcctgagaagctgcgggcttcggtgtggaggggtggagtgctgtgatctcgacaacttactttcaaagacataaagcacagatctccgcacaggggatgtgtgtgttcctgatgtaatttgcataacttttctgtagtttgaaatgtttccaaataaatattggcaaggggagtggaaatgacaccaagaagcccctcatgctcatggttggacagagagcgatcgtctggagtatctttggggtgtcagctctgggtgtggactggcagcagtgaggcaggccagtcagtggggtaccagtgagtgtccttagaggcggctggattcagggagactgagtcacactaaatacgtgcccagcagactgatggggaaatcactcaattatccccatgacatctgtgactgttaactgtaggcaggtcacgtgagagccacatcacctcagatcgtctgtggaaccaggcagtgtgcatccagatgaggaaacacacaaatgtcaaaagttgaactctcaacagaaagttgctttgtgggtctcccctcagagccagggtgtggcttagatgcccttagtggctacagtctgagcagtccccacctgcccgtcacccaggtccttgcgaaccagtctgctgacagtatcgtcaggcactgtgctggaggcggcacgtgcttctcatgcaggcaacagtttttgagccctcgagcccaaggcccagactctctagtttgtggtcaggatgctgggtcattcttagccgcagccagagaggcactgaggactccgtgccaccctctctactcccgggacagtccttcctgccggtcactatgttacttagaggcctgcctcacctcctttcatctgaaggcatctggtctgtaaaggggacttccttttttcgagacagagtcttgctctgttgcccaggctggagtgcaatggtgtgatcttggctcactgcaacctctgcctcccgggttcaagcgattctcctgcctcagctgcctgagtagctgggattacaggcacccaccaccacgcccggctaatttttgtatttttagtagagacggggtttcatcatgttggccaggctagtctctaactcctgacctcaggtgatccgcccgcttcggcctcccagtgctgggattacaggcatgagctcccgcgcccggcctgtaaaggggactcctgaagacaggtaatgtcatttaactcaggggctcttcatcccagactccatagtcttgtccctggagccttaagtactaaggagggtctgctttaagcccacaaattaaatggagaagtgaccagctccaaaggtgagggcagaggagagaggatgccctgtccctgccaaatggcatctcagcatgggccacccatgtgcacctgctcagtgccctcgaggttggcattcggcccacgactgtgatgactgagatgtttctggaactgggcacctgggctggatgttctgtcctggctggctgagcacattgccaccaggtaaggacctggggcaaatggcaggacccgacccagggcttggggcctgggggtggggcacgtggttggcaggggagagcaaggacagcacctgcttgggaaacagcctggttccatttgaggtcgtctcgaaagcaccatgtgccctagaagagggaagaggctgcacacatcaccagagaggccacccttacttcacagaggctggagggagggcgaaaagaaggcgggcttccatgcgggctcagagacagggtgggggcaggctcttcatccagcagtgggggatccccttttgtgatttctctgtgagtagctgtttccctcattgacagaggactgctgggacttcatgccacacctcgcagcaacaagcactcatcacgattttactttttcttcctaccaatacctgtgtaataaacagccctgcgagcctcctgggtcaggcggggtcccacgggaaacaggtggtgtgcctagattggggtgattcagggcggttttgtgggacacctggaagagtggaccccacccaaaggagaggcttatgtggaggggacacctccagaggggcagggactgcaggaagcctggctccgctccctccctctcctgccagagttgccagattatacgccaggcgatgaacaatggttttgcacaagcgtgtctcaaatgttgcatgagacatttctcctactaaaaaagtattgtttacctgaaattcagatttcactgggtgttctgattgttatttgctaaatccaacaaccacgtcctgagccaacacaagcagagccagaagccccggaacctgcgcaaggcagagcaggtggcaaagaaggctccaggcaggccccggcctggaacctgcactccccaggccctttttgaaattagtgtttctccaagtatggccagttgccattagtcacacagcttcctgcatcccttcctgcccaggcgaaccccccttctggggccgggacctcagagtgcctcagccctggcccggggtttgcggattccaccaacccctgagccactggaggaaggaggctggcggctgtgcctccctccagctctgcagtccacggaggagctcggcctcgcccagggggattggctgtcagggccgccgttgccgttactggtcttggtctcagtctcgctgctccactgcgtccccagcacagctggggagccaatggttgccagatggggcctctccccgacctttgacctaacggtttagaggttccaggcctgggagggatcttagaaaccatctgtgccagccccggcatttcacagataaagaaactgaaactctagcagtttgacttggctgaaagttacagtgaggaggagcagaaacccaggcatgccgcctcctggccccaggtgctctctgctcacctccctggaagaagcgccaggagggcttccacgtggcttcttccttgctttctgctgccatggcctgggtattttctccccacataaaatagttttagggcctggcgctctggctcacgcctgtaatcccagcactttgggaggccaaggcgggtggattatctgaggtcaggagtccgagagcagcctggccaatatagtgaaaccctgtctctactaaaaatacaaaaaattaaccaggcatggtggtgggtgcctataatcccagctactcgggaggctgaggcaggagaatcgcttgaacctgggaggcagaggttgcagtgagccgagatcacgccactgcactccagcctgggcaacaagagcgaaactctgtctcaaaaacaaacaaacacacacacacacaaaaatagttttaagcccggtgcagtggctcacgcctgtaatcccagcactttgggaggctgaggcgggtggatcacctgaagtcatgagttcaagaccagcctggcgaacatgacaaaaccccatctctactaaaaatacaaaaattagctgggcatggtggtgggagcctgtaatcccagctacttgggaggctgaggcaggagaatcgcttaaatccgggaggtggaggttgcagtgagctgagatcgtgccattgcaccccagcctgggcaacagagtgagactccatctcaaaaacaacaacaaaaatagttttaggccaggcgcagtggctgatgcctgcaatcccagcactttgggaggctgagaaggaagaattgcttgacctcaggagtttaagaccaccctggacaacgtagggagaccccatctctaccaaaaataaaaaaaattagctgggcttgatggtgtgtatttgtagtctcagctactcaggaggctgaggtggggaggatcacttgaacccaggagatccaggctgcagtgacacagttgtaataagatggcatcactgcactccagcctgggtgacagagcaagaccccatctcaaaaaaacaaaaaaattacagcatagggcacacactatcatgcattcgcttttctgggccccattttggcttggtgacgtgccaaggtctgctagaaactgcacacactggcccggagcaggcccttctccagttaggtctcaggagtgggattgtagggctgaagggaacttcagtttcaaatccctggagtgcttttcccagtgacgttcttgattcacatctctagcagcaatgtgagaggcttctccgccccccaccagcaaatgtcagggtgggtgcattttcatggtgtgccaatctgatgagggtgacatgagatttcattgtgactaactcagaccccttcccctctctcaccgaccccccgccaaaagtagtgtgtgtgcatttttgagacagggtctccctgtgtcccccaggctggagtgcagtggcgcaatcatggttcactgcagccttcaactcccaggctcaagagatcgtcccacctcagcctcccaagtaactgggactatgggcgcaggccaccatccctggctaattcttttgttttgtttttgtttttgtttttttgagatggagttttgctcttgttgcccaggctggagcgcaatggcgcaatcttggctcactgcaacctctgcctcctgggttcaagcgattctcctgtgtcagcctcccgagtagctgggataacaggcatgcgccaccatgtctgactaatttctgtatttgtagcagatacggggtttctccatgttggtcaggctggtcttaaactcccgacctcaggtgatctcacctcggcctcctaaagtgctgggattacaggtgtgagccactgcacccagcctccctggctaattcttaaaaaaaaaaaaaaaaaaaagaaaatttttttttaaaattactatgaaatgtattatttgttattaagttacaaattttttttttttttttttgagacggagtctcgctctgtcgcccaggctggagtgcaatggcgcgatcttggctcactgcaacttccgcctcccaggttcaagcaattctcctgcctcagcttcccaagtagctgggattacagctaaaattagcccggctaatttttttgtatttttagtagagatggggtttcaccatgctggccaggctggtctcgaactgacctcatgatccacccgcctcggcctcccaaagtgctgggattataggcatgagccaccgcgcctggccagagcccagcctaattcttacattttttttctagagatggggtctctctgtgttgcccaggaccacactcctgccttgccctcaaagtgctgggatgacaggcataagccactgtacccaacctcctcattttgtcctcggactcctgggctaaagcaatcctcccaccttggcatcccaaagtgttgggattacaggtgtgaaccactacacccagcctattgtttgtcttctgaagatttatgtggtcatgcatgtctgtctttttcttcgtagctttcggggttggtcttccttaaagcagttttctgagtgtctaggtaacacttgtctgtacctcagctaactttgttaaatctcagcatcgcctgtagctgcttcagatgtttttattataacattttcattataaaattattagatagttaaaaattatgtttataaagaaaacaatgcggctgtcacattgctgacatgacggtttacgtaactatagtgaagtagtgcacttggtgagggagggaaatgccagcacgcttgggcaaggtgcctcattgcagcctgggagaacgaaggtgggtgaggcatttccctcccacgccgaaggcctccgggaatagaaataccgggtaaatatccactggccagttcgtatcctccagtgggtcatcatgtgattggggagcgcttcttcccattcaaaggggatctttggggacccgggtttatggaaccctctctgcgttggtcctgggggctgcttctctgttcagtgaccctgtgactggagggcactgccttggcccggcgcgtggccatcttgttcctagggtcactggagcctgattgctgtggtggcacgccaggtccttcaaagctttcatgtttttattttattattatttcttttctttctttctttctttctttctttctttttttttttttttgagactgagtctcactctgtcgcccaggctggagtgcaatggcgcagtctcagctcactgcaacctccgcctcccatgttcaagcgattctcctgcctcagcctcctgagtagctgggatgacaggcatgagccaccacgcctgccctattttattattattttaaattttattttagtttcgggggtacatgtgcaggttggttccatagacaaattgcatgttgtgtgggttttgtgtacagattatttcatcacccaggtattaaatagtaagcctcatacccaataggtgatttgtttctgtttttctagcctttccttccattgccggcctttcactttgatctttgctgtctgtttctctttggaaccgctgacttctggttttgctcttgcctcttctcggccccacttgacctccactggggcctgggctagcttgtgtgtgccgccaccatctcggccagctcaggtctgtttctttggaagattctgtgcccctcccatgcctctcctgcatgtggcccatgcacagtagtgtgtggctgccctcgcccttgtgtgtgggttttttgttgtgttgttgttgttttgttttgttttgttttgtttttgagatggagtcttgctctgtcacccaggctggagtgcagcggcacaatctcggctcaccgcaacctcctcctcccaggttcaagtgattctcctgcctctgcctcctgagtagctgggattacaggcgtgcaccaccatgcccggctaatttttgtatccttagtagagatgaggtttcagcatgttggccaggctcgtctcgaacccctgaactcagctgacccacccacctcggcctaccacagtgctgggattacaggcctgaggccctgctcccagcctccttgtgtttctctacgtgcacattgtgcagagcctccccacccggctggacgtgaccgatggcacacgtccccagtctcacgctcctgtgcacgcctcttggtgcctatgtgtgagagcttcgcatttcaactcgagtagaatttgccaaatcccttgccagattgggggcagagctcctcaacagcacttgatgtggtcaccggggtgatctgctgatctgacaggagtgagtgacagtttcattttgtccttgtttgcctttttcagcttaaaatcgaggttgcctcaaaacattaaacatagaattcccatagggtccagcagttccactgctgggtataggcacaaaggagttgaaagcaggagcttgaagggatgcaattcacagcacccaagaggtgagagctggccaagtgtccatggatgaatacatagataaacacaatctgctttatccacacaatggaatattattcagccatgaaaaggaagggaatccttacgcaggctaccacatggatgaacctggaggacatcataattagtgaaagaagccaggacagaaagtacctgattccacttttgggagggacctggtgtcgtcagactcagagacacaccacaggatgatggtcgccagggtggggagagtggtggggagttagtcttttttttttttttagacggagtctcgctctgtcgcccaggctggagtgcagtggtgcaatctcggctcaccgcaacttccacctcccgggttcacaccattctcctgcctcagcctcccgagtagtgggactacaggcgcccaccaccacgcccagctaattttttttgtatttttagtacaggtggggttcaccatgttagccaggatggtctggatctcctgacctcgtgaaccacccgcctcggcctcccaaagtgccaggatgacaggtgtgagccaccgcgcctaacctggagttagtcttttttttctttctttctttttctctttctttctttccttccttcttttgtcctttcctttctttcttctttctcttctttcttctttcttctttttctttccttccttccttcttttctttctttctttctttcctttctttcttctttctttgcttccttccttttcttttctttctttcttttcttccttcttttcttctttctttgtttttttctttctcttctttctttccctttcttctttctttccttcctttcttctttctttccttccttcttttccttctttcttttctttccttccttcctttccttctttcttttctttctttcctttcttttcttctttctttcttctttctttctttgcttccttccttcttttcttttctttctttctttcttctttctttcctttcttttcttctttctttctttctttcttctttttttctttctttctttctttttttttttcagagactcactctgtcacccaggctggagtgcaatggttagtgcgatctcagctcagtgcaacctctgcctccccggttcaagcgattctcctgcctcagcctccagagtaactgggactacaggtatgcaccactgtgcccagctaattttttatattttattttattttattttattttatttattttattttattttattttatttttgagatggagttttgctcttgtcgcccaggctggagtgcaatgcacgctattggctcactgcaacctccacctcccaggttcaggtgattctcctgcctccgcctcccgattagctgggactacaggcctgcaccaccatgcccggctaattttgtatttttagcagagacagggtttcaccacgttggccaggctggtctcaaactactgacgtcaagtgatccacccccactcggcctcccaaagtgttgagattacaggcgtgagccaccgcgcctggcctctacttatttatttcttgtagagatggagtctcaccatgttgcccaggctggtcttgaacccctgggctccagtgatcctcctgcctcagcctccccaattgctgggatggcacacatgagccacggggcccagcctcctcattttgtccttaatatctgcttgtaaccacctcaactcagaatacctaccaaaacttagtttggatgtgtttcccaggttgcaatcctcaaatttggcccaaatacactctccttgtattaattttacctcagtgtgttcctttaggtcgacctcataaaatctggtatgggtaattctgcagagccactccctcaccaccgctgtctcgggccatgctggctagcagcgatcgagggcttactgtggacgaaagtcagtttagagaagttgaatggccaagttcacagcagtaggaagtggctgcggtgggctttgccctggggctttggactttgcctggagctgctcctcactcattccaggaagctcttgcaccatgaccgctgtgacttgggatccaaatttcaattgaaaatatatttttttcaatttttttcatttttaaaatttttttagaaactgagtctggctctgtcacccaggctggagtgcagtggtaggatcacagctcactgcagcctcaacctcctgggcttaagtgatcctcccatcccagcctcctgggtagctaggagtataggtgctcaccatcatgctcagctaatttttcttcttttttctttcctttttctttctttctttttttttttttttttttgtagaggcagggtcttgctatgttgtccagttgtcctgggctcaagccatcctcccacctcagcctcccgagttgccaagattacaggccactgtgcctggcccgatgttttttattggggtaaaatacataataacataaaatgtaccatgttaaccagttttgtggttagttagttcagtggtgttacctacattcgtaatatggtgcaaccaacatcatcgtccatctccggaactcttttcatccttctaaactgaaactctatccccattaaatgctaactccccagtccccctcctgcagcccctggaaaccacccttcaggtgtgccacaggtcaaatgtggacacagggaggccactgcacccggccctcagcatctgaacttccacccctgctgcttgaagctctccatctcgccgtccagacaggctgccttccccgctggctctgtataggatgcaaccccaacaggtggagaagctcagcccgcagcacccacacggagccgagatgtgcaggttgccgagccggccccgctgggggggcttctgctgggacagacataacaaacagcagatgtagccccctgccgaggacttcagattgggaattgtcagagattccggagattgtcagattggatggaaacccccacttccagcatatgctgtttactagagacacacctcaaacatatgtccatggaaatattacatgtgaaagaatgaatgctaggcagttactaccaaaagcaagctgccatggctatattaacatcagacaaaataggctttgggacaaaacaaaaacagtttaggaatgatgttaaaataggctctacatatcttaagcaaaagttgacagaactctagggagaaataggcacatgaagcatcgtagagggaggtttcttttttttttcttttttttttttttttttttgagacagagtctggctctgtcgcccagactggagtgcagtggcacaatctgggctcactgcaagctccgcctcacgggtttgagggattctcctgcctcagcctcccaagtagctgggactataggcgcccgccaccacgcccggctaattttttgtatttttagtagagacggggtttcaccgcgttagccaggatggtctcgatctcctgaccttgtgatccgcccgcctcggcctcccaaagtgctgggattagaggcgtgagccaccgtgcccggcttgcagttttcttttttaaaatgtttatttctattttgtgattcaaactgaggatcatcttgctgcaaagaagtttttaagttgataagaaactgctgaacagtgattcaaagtggctgtgccatttcacactcctgctggccgcgtgcgaacctttcatgcactccgcctcctcaccagtgctccctgcgaccagtcttcagtgacagtcattctgggtgcgattttatcttgcatttccccatgagaaatgggcatctcttcctatgcctcagtggggagaaccagagacgggggcagaagaggggcaggagaaggcagggagggtggttggaggagagagcattgggtgggggtggcaagtgctggaggagggggacggggaagtgggccctttgctcttgaaccattttaaccccaagcaaggtgcattcagggtttgggcaggggtctggccctcatgtcaccagatcctgagtgactgtaggggcctctcatcatgtcttcactcctggacttgctggctccaggtgagaagacgtggacactgctgtgggctgcagaggtttgggggtgtgtgtgtgtgtgtgtgtgtgtgcatgtgtgtgtgtgtgtgtgtgtgtgcgtgtgtgcgtgtgtgcatgtgtgcgtgtgtgtgtgtgtgcatgtgtgtgtgtgtgcatgtgtgtgtgtgtgcatgtgtgtgtgtgtgcatgtgtgcatgtgtgcgtgtgtgtgtgtgtgtgtgcatgtgtgtgtgtgtgtgtgtgtgtgtttgagacagggtctcaccctttctcccaggctggaatgcagtggcgcgatctcggctcactgcaccacggacctccgggctcaggtgatcctcccacttcaaccccctgaataactgggactacaggcgcacggccccatgcccagctaattatgtaattatgtcacttttcatagagacggggtctccccatgttgcccaggctggtcaggaactcctgggctcaagcgatccacccgtctcaacctcccaaagtactaggattccaggcctaagccactgtgcctggccttcagggttttaaggaacagtttcatttccacagtggggcggcttgagaagtaggggcaccccaccagcagctgagcagagaagaaatggtggctatcagacagcccaggcctagtgaatcctccagtgaattattcctggcctttaagagacaggtaattccagcgaggcgcagtggctcacgcctgtcatccaagcacttcaggaggccgaggtggacggatcacgagatcaggagatcgagaccatcctggctaacgcggtgaaaccccgtgtctactaaaaacacaaaacattagccgggcgcggtggcgggcgcctgtagtcccagctactggggaggctgaggcaggagaatggagtgaacccgggaggcggagcttgcagtgagccgagatggcgccactgcactccagcctgggcgacagagcgagactccgtctcaaaaaaaaaaaagaggtaattccagggtttcaaagaaagtaaagtttccagatgtgctttatgaagccagaataacctttgtcccccaggagaatgttagtgtcacaaagacagactcttgtgggtcctgcttgcttctccgctctgagtccacagcggtgtctggcacacagtaggtactcctgggtgactcactgaatctggttgcagacttgacacacacacacatgcacacacggaaaagtatcgatactgctgttaaacactggtaggcatttctaaaataaaaacattagctaatatcatccaaaagcagatcaaggcatgaatatccaggctgggcgcggtggctcatgcctgtaatcccagcactgtgggaggctgaggtgggaggattgcttgagcccaggagtttgaggccagcctaggtaacatggtgagtctgtctctaaaaaaaaatacaaaagttaggtggggatggtggtgcgagcctgtggtcctagctactcggaggctgagggagaattgcttgggcctaggagtctgaggctgcggtgagccatgatcacaccactgcactccagcctgggtgacagagggagacctgtgtgaaaggaaaataaatcttggggcccccaaatcactcagctaaagggaaaactcaagctgggaactgcttagggccaacctgcctcccactctattcaaggccactcctctgttcactgagataaatgcttattggattgcttcctttggagaggctcatgagaaactcaaaacaacacaatcattggtctcttatctacccatgacctggaagccccctccccacttcaagttgtccctttctggaccaagccaatgttcatcttacatatgttgactgatgtctcatgtctccctaaaatgtataaaaccaagctgtgctctgaccacctcgggcacatgtcgtcaggaccatcctcaaccttggcaaaacaaactttctaaattcactgagacctctctcagatattcagggttcacacctgactcttaaaaaaagcaaagaagtgaataaactataaccaaatgtacacaacatattgttattaaccatagtcacgatgatgtacaacaaatctcttgaactaattggaattcctcctaattggaattttgaatcccttggccaacatctcctcatccttccctccccacccaccaccctgcagcccctttatgagttcagcttttttattttctacatatcagtgaggttgtgtggtatttgtctttttgtacctggcttatttcatttaacatagtgttccccagtttcacctattttgttgcaaatgacaggatttccttctcttttatggctgaatgggattccgttgtgtacagatatcacactttctttatccattcacccattgataaactcttaggttgattccatctcttacctgttgtgaatagtgctgcaatgaacacgggagtgcaggtatctctttgacatggtgatttcaaatttaaatatatacctttaaatatataccaagtagtgaaattgctggctaatacggtagttgtgtttgtagtttttggactatactgttctccgtactgtctgtgctactttacattcacaccaacagcgtacgaggttcccatttccctgcatccttgtcagcatttgttatttttttaaacatctttttgttaaaagccattttaactggggtgagatgatatctcgtggtgcttttgacttgtgtttccctgatggtgagtgatgtggagcattttttcatagacctgttggccatgtctattcagatcttttgcccactaaaattttctttttttgagacaggacctcactctgtcacccaggctagagtgcggtggcatgaccacagctcatgcagcctcatcctcctgggcccagtcaaccctcccacgtcagcttcctaagtagaaaaaggccagctgtggtggctcacccctgtaatcccagcactttgggaggccgaggcaggtggatcacctgaggtcaggagttcgagaccagcctgaccaacatggtgaaaccctgtctgtagtaaaactgcaaaaattatccgggcgtggtagtgggcacccgtaatcccagctacctgaggctgaggcaggggaatcacttgagcccacggcacgtggatcacctgaggtcaagagtttgagaccagcctggccaacatggtgaaaccccatctctactaaaaacgcaaaaaatgagccaggtgtggtggcgggcccctgtaatcccagctgtctgggaggctgaggcaggagaatcgcttgaacctgggaggcggaggttgccgtaagccaagatggttccactgcactccagcctgggccgcaagagtgaaactccatctcaaaaaaaaaaaaaaaaagtgaaatctgcagagatgacagcttcatgagctgattgtatgaagccacaaacagtactgtgcttaatggtgaaacaccacagcattttcattagtcaagaatgagacaatattcccaggatcaccactgtttcttcccgtttcccaatgttaaattggccaatgcaattgaaaaagttagccggacgtggcgcacaaggaatacgtgttggaaggatgaagcaaagttctcattctttgtaaatcacttgattgcaccactgaaacgtcctctggtctgctgggcaggtttgagtcaggagattctggctgtcttcactgggcctatctgagactgggtgtcatttgctttgctcttgtctgattttactgtcagacatcactcctgtaaccagtctttgtagtaagtctcatttcttgcatgtacttggaagtacatgcaataaatggttttattttcccagcgactgtgcccgcccccaccccattgagttgtgccaaatcccccttaagacgtggggcccgagtccatcatgtttcagtcaggttgcttgtaattagtcttattctggttcttttttcttttcttttctttttctttttttttagacagagtctcgctctgttgccaggctggagtgcagtggcacaaactcggctcactgcaacctctgcctcccgggttcaagtgattctcctgcctcagcctcccaaatagctgggactacaggcttgcaccaccacacccagctaatttttgtatttttagtagagacggggtttcaccatgttggccaggatggtcttgatctcttgaccttgtgatctgcccgcttcagccttccaaagtgttgggattacaggcatgagccaacacgcccggcctggttgtcttttcttttctttctttttttttttttttttttttttttaagacagggtctcactctgtcacccaggctggagtgcactgatgagatctagactcactgcagcctcaacttcctgggcttaagcgatcctcccacctcagcctcccgagaagctgggactacaggcgtgcaccaccacgcctggctaatttttgtatttttagtagagacagggtttcttcatgttggccaggttggtctcaaactcctgacctcagctgatccacctgcctcggcctcccaaagtgctgggattacaggcatgagccacgactcccggcctacccttaattttttttttttgaagtgcacaagctaattttttaattactatttgtagagattaggtctccctgtgttgcccaggttggtcttgaactcctgagctcacgcaatccatctaccttggcctcccacaatgctggactgcaggtgtgcaccacgctctggcatcattctggttcttaaacccaagggtacttattttccaacatgaaccttaacctcacccttccagaaacttctcaggcatgggcaaggttgcagtctcccttactgcaggcagcaatgactttagcaacaggtgatcttggtgggctcgtaggggagtgggaatgggcagtggcttttgtcctccttttgttgtccgctggggatcttggttgggaagcctgaacccagcattgtttcctagccctgtgttcaacaatgccgggagcgaggtgccttcctatccccgtgataaacagttctgggacctgttgctctgccacacaatcctgagaactagcacaagtcaattcgcttgcaggaccaacacacccatgctcctgaaagatgagactcgcagagcccggcccgagactgcacccagccgtccaaggctgaccatgcttcccacccggccctccccacgccggctcggacttcgggcattttctctcctcctttcctccctggtgatctgaggccggctctgtcgggggagtgttcttcctctttgcagtgagtccaataaactcagctttgcctgaacaacaggtttttctggtggtgattttggggagtctacagccaacagctgaaattgggaaaacggggcgggggtggggaatccctttttgttttttgtttttattttttacagtaaagtgaaagcaagtttattaggaagatagaggaataaaagaatggctgctccatagacagggcagctgggaatcccttttagcacctggtggctgcagatgggtagaaatacagaccatatttggttcttagtttaattagccagagacgcagaacagggtgggaagccagacggccacacctagcacctcatcaggctgcagccaaccagggcctctcggggctgggaaaactcgattcttgctgtacttgggcttactcggctctccatcttatgcaaacacctctccttatgaaaggcaagaagaatttgttctacactggggatgggttgtgcctgtcacatggagcagcctggggacctagagggaccctttagaagcttagcacctagcaattccttttcacatgtgactcatggtctattcagttttagtacttcttttttttttgacagagttttgctctgtcacccaggctggagtgcaatggcgcgatctctgctcaccgcaacctctgcctcccaggttcaagtgattctcctgcctcagcctcccaagtagctgggattacgggcacgcgccaccacgcctggctaatgttgtatttttagtagagacggggtttctccacgttggtcaggctggtcttgaactcccaacctcaggtagtccccctgcctcggcctctcaaagtgctgggattaaaggcgtgagccaccacgcccggcttttttttttttttttttgagatggagtcttgctctgtcgcccaggctggagtgcagtggcaccatctcagctccctgcaacctccgcctcttgggttcaagcaattctctgcttcaccctcccacgtagctgggattacaggtgcccaccaccatgcccggctaatttttggatttttagtagtgacggggtttcaccatcttggccaggctggtcttgaactcctgacctcgtgatccatggcgcctggcctactacttctttattcatttattttttgagacggagtctcgctctgtcacccatgctggagtgcagtggcacgatctcggctcattgcaacctccacctcccgggttcagcttcccggatagctgggactacaggtgcgcgccaccacgcccagctaatattttgtattttgtaagtagagacgtggtttcaccgtgttggccagggtggtctcaaactcttgacctcaagtgatctgcctgcctcggcctcccaaagtgctgggattacaggcgtgagccactgtgcttggcgcagttttactacttcttgagacaactctgaagatttctatttttcacagaaagtcattcagttaatctagacttttcaaatgtattgccataaagttatatttactattttaaaattttaatttcctccttaacccaacatttatttaaaagggtcatttcagccgggcgtggtggctcacgcctgtaatcccagcactttgggaggtcgaggcaggtggatcacctgaggtcaggagtttgagaccagcctgggcaacatagtgagaccccatctctacagaaaaataaaaaattagccgggcgtggtggcacacatctgtagtcccagctcctcgggaggctgagatgggaggatcacttgaacctgggaggtcgaggttgcagtgagccatgatcgcaccactgcactccagcctgagtgacagagccagatcctgactgctgctcatagagatctcgcctaaagatcttgcctaagtgcaaaaacacacacacacagaaactggaacaaccgaactgaccctttggggaggctggcgaaataaatgacatggagtacattcatacagctctaaaaaaggacaaaagtcagggacatctgtgtccagggaacactctcgatttgtcttgttaagtgaaactggcgaggcgtggaatcatgagagaagcgtgagtagaggggacttaaaccagggactggtggccacagctagtgttagccaggggactggaggctgggagactgagaaggagattttcttacttcgtacgtgtctgtactgtttggattttttttttttttttttttttgagagggtattttttaaaaggaaaagcttgttttgtttttctttttaaaaaataggctctaaaaattctggagagaaataaaaaaggcaacatggtggccgggtatgggcgtctcttctgattccaggctggttggcactggccaccttgctcaatggttgccttagaaaccggcctagcgagggggtgtcagttgtctctggtagccattaaggcagtgactcagcagaaaacccaacccaagagggagttgttcattcactgactttccttctctcccagaaaagcatgggtgaggccatttctgttacatttgcgatcgggtggcagctgctccgccgtgaaggcggtagcgagaagtctgcccgctcctccagcctctcactaggtgagtggcgtctctgtgctgccctgtccctcagaaaccacaggttccggtccctctgccagcctgtcccctgtctctcccctcccgctgacagggtgaaaccagcttccgctcacaagcacttgctgggggttgccacaggcatggctcttggggagatctttagtaaaaaacccaaccaaacatcacgagtggaaccgagtgtggatcataaactcaactgagagaaaagccaagggacgcatgtgggcaaaatacacagaaaacccagcatgggcgcgggggctctcgcctgtcatcccatcactttgggaggccaaggcgggtggatcacttgaggtcaggagttcgagaccagcctggccaacatggtgaaaccccatctctactaaaatacaaaaattggtcgggcatggtggtggacacctgtaatcccagctactcgggaggctgaggcaggagaattgcttgaaccggggaggcggaggttgccgtgagctgagatcacaccactgcactccagcctgggtgacagaatgaggccctgtctcagaaaaaaaaaaagaatcacgtgctgagacatgctacaacacagatgaaccccaaaatcataatgctaagtgaaagaagccagacacgaaagatcccatgagtattatcccatttatatggagtgttcagagtaggtgaatctatagagacagaaaggagatgagtgactgcctcagctggaagggaaaatggggaagaaatgggtagtgactattaaaaggtatggtgtttttttttctttgtttttgttttgttttgttttgttttattttgtttttttgagatggagtctcgctctgtcacccaggctggagtgcagtggcatgatctcggctcactgcaacctctgcctcctgggttccagcaattctcctgcctctgcctcctgagtagctgggactacaggcgcccaccacgatgactgggcaatttttgtatttttagtagagatggggtttcatcgtgttggccaggttggtctcaaactcctgacctcaggtgatccacccacctcggcctcccaaagtgctgggatgacaggtgtgagccaccacgcctggccagtgtttctttttggaatgatgaaaatatgctcaaatagagtgctggttgcacaagtctgtaaatctattaaaaacacggagttgcacacttcaaacaactgaaccttgtggcgtgtgaggtagatgtcttaacacagctgttaaaaagcccaggatagctgggcacagcggctcagctgtaatcccagtactttgggggggctgaggaaggaggatcgcttcagctcaggggcttgagaccagccttggcaacctagcgagaccctgtctgtactaaaaataaaaataattagctgggcatggtgacatgcacctgaggtcccaggtactcgagaggctaaagcgggggctgtgggcaggagaacaaggctgcagtgagctatgatcacgccattgcactccagcctgggcaacataatgagatcctgtctcaataaacacatgaaagagacacatactgttatttcaaacttcactcaaaatacactgccttctatgtgctgggacccagagagggtttgtggcatgtttgtaggaataagtccggatcagaacggagctgagaatgggtgttcactcgtattcttcaatgtctcctattgagatgatgttatccacttgttattttcttgaccctattttctgccaagaaataaagtaatttgagagagagagagagagcgagatctaacgtggaaaaacagatctgcaggaaggcatggaacgcactagaaaggtaaaaaatgggctgtttagaccaacactaatagtgtcctttgggatttaaaatatacgaaaacaagagcacccgaggcccggcggaaacacagtctcgctgctgggaggctctggcgttgcttgagccactgcaccgcagactcaatccctagggtaactgctggagtaataatgaaaagtgacactgagaaaaggcaaaaaaagagaaagaaagtaaccaacgacagatgggacaacagagaacaaatggtaagctggtcctcacacacagccagagcaggagggtggcgggggtcagggtctaatggtgtggaggaggaggaggaggatgttgagggtgaagaaacaaagcccatgcccccgagttgtacacttataaatagttaaacagatgaatattatgttgtatatattttatcacaataaaagatctcacatacagccatattggcaaatccattaaaatgaaaatggataaacacacaaagattgccgggctggcgtagagggaaaataaaaccaatcaatcaatatgctgcctcaaagagacattctttctttcttcctttctttccttccttccttcctttctctctttctttcttttttgacagagtctcactctgctgcccaggctggagtgcaatggcgtgatctcagctcactgcaacctccatctcccggattcaagtgattcccctgcctcagcctcctgagtagctgggattataggcgtgcaccatcataccccactaatttttgtattttcactagagacagggttttaccatgttggccaggctggtctcaaactcctcacctcaagtgatcttctcacctcagcctcccaaagtcctgggattacaggaatgagccaccgtgcccggctgcattttattttattttattttatttttgagatggagtcttgccctgttgcccaggctggagtgcagtggcgtgatcgccgctcactgcaagctccgcctcccgggttcacgccattctcctgcctcagcctcccgagtagctgggactacaggtgcccgccaccacgcccggctaactttttgtatttttagtagagatggggtttcaccatgttagccaggatggtcttgatctcctgacctcgtgatccacccgcctcggccttccgaagtgctgggattacaggcgtgagccactgcgcctggcccattttatttcttaaaaacagcttttttttttttttttttttttttgacagagtctcactctgtcgcccaggctggagtgcactggtgccatcttgactcactgcaagctccatctcctgggttcacgccattctcctgcctcagcctcccaagtagctgggactacaggtgcccgccaccacgcctggctaattttttgtatttttagtagagacagggtttcaccatgttagccaggatggtctcgatctcctgacctaatgatctgcctgcctcggcctcccaaagtgctgagattacaggcgtgagccactgtgcctggccaaaaacagctttattgaggtataattgacataaaataaactgcacatttaaagtgaacagtttgaaagttatatctgccaaaccatcaacacaatcgagaatgaacccaccaggccaggcgtgggggctcacgcctgcagtcccagctacctgggaggctgaggtgggtggatcgtgtgagcccaggaattcgagaccagcctgggcaacatggcaagaccccatctctacaaaaaatacaaaaactggccggaactgggatctggaaggcggaggggacgcagtaggcatttgtgcactgtgagtcctggtgtggggccatcgcagcactgccagctcccatcaggtctccctgatcagatgttccaacatgtgtatacagatgtgtacaacacccaagagaaatgagtgtgtatgtgcagcaagacagattcggaaatgttcataacagctttatgccagccccaaactcaatccaaacgcccaagagtagaaagagtcaaatgcggcccattcttacaatggaacgctacctgggaaggcaaagcaatcgcttagcgctactcacggctgcaacagaacaacagtgcagagcaatagcaggcagacgcgagttcgtaccacgtgtgttaatccattctcacactgctgtacagaaatagccaagaccgggcaatttatatagaaaggaggttcaatgggctcacggttctgcaggctgtacaggaagcatggctgcatctgcttttggggaagcctcaggaagcttccaatcatggcgggaggcaaagggggagcaggcacatcagatggccacagcgggagcaagagccggacagtggaggtagcacacactgttaaacaactatcatgagaacagcacccagggatggcgcggaagcattcatgagaaatctgcccccatgacccagtcacttcccaccaggccccgcctccagcactggagattggggcagggacacacatccaaactaaatcacgacacaatctcattgacatgaaattccagaacatgcaaaactatctatgtgtttaaagccaggtttggatgttctctggtgctactctcatcaaaaaaggcggcccacagcgcctctccccttgcatacactggcctcagaggcttgcgtctagtgagcaggctgccggggaagtggcagcacctgatccccaggccaggccatcagatgacgtggcctccgctgggctttctagcttgagatgctccccggagaacccagcctcacaggcacatggaggtgtcctcaccccggcagcgtcctccgctggacacgaaggagccgctgggtggttccagctcgtggccatcgggctgccccggctaaccgactgcagcgggtgagctctgccaactgagacctcacagagcacaggctcgcgagcaaaacaaacattgccattattttcagcccgtacatcttggggtggcttggtacctagcaagagataactggagcagattcatatgtgggtctatgtggtggctgccacatggccgtgtacatataaaacagtcattgggctgtacgagtacggtttgtgtacttttctacctttaacttatacctccctaacaaagtctttcagaaaagcctaactcctgaggctctggtgtgggcagctgggtgggcgctggaactagtcccacacgctgaggtgggaagctcatggtgaaagggaatcccaagtctgcttggccatctaagtttacggtgcctgtgagaaaaatcagaaggccaaaacctcaggagagagagcatgacggaggcgctgccgtttgggaatggacatgatagagccgtgagaatgaggaagatcaccgtcgggaatgagtgcaggcagctaagaaggcgcagaggcgtgtctggagggactcacaccttgtagaggctgggtagagagagcccacgcacgctgagaaagaacacagacttcagcgtcacagaggtcacaagagacaagcggttggtgggggagtaggcaccggcgagagaaagtccaagaggactggatggatttgacaacacggagatccctggtgttctggatgaacgctgattggatggagtggcaggggtagaagcagaggaagagggactgcacagggaatgggcaagtgagaaaacagacaaggattctgaaaagtttagctacaaagaggaacagagaattagggttgtggttggagggggtgttgggtcaaatgagtttttatttttattcttcaagaacggaagctaccaggacatgtttgatgaaaatagatccagaggccgggcgcagtggctcacgcctgtaatcccagcattttgggaggccgaggtgagcggatcacctgaggtcaggagttcgagaccagcctggccaacatggggaaaccccgtctctactaaaaatacaaacattagctgggcttggtgacacatgcctgtagttccagctactcaggaggctgaggcaggagaattgcttgaacccgggaggcagaggttgcagggagctgagatcatgctgctgcactccagcctgggtgacagagtgactctgtctcaaaaaaaaaaaaaaaaagaaaagaaatagatccagaagcaaggaagaaattgatcatgtcgggtgacattatgagtgaagaagtcctcagaaaagaggagaaacttgcaattctggccacagtggaataactgatgccagttgtaaacacctaaaacactgggcaactatttttagatatcggacaataggctgtgcagggctgtgaccagagagaaaacaaagaaggtgagccttacaagtaccctgagtttctgcctggaggcactttcacaccatggttcagcaaaggggcctgagcggaaccagcagtctcactgaattactagagcgaccaagccaatagcagagaaaaaacagaatcccagaaatatgtaattaatccaaaagtcaaaacagatggggtaatagaaaacaaataacaagatgatagacttaactccaaccattaaatggaaatggattaaacagaccaactaaaggcagagattgtcagattgtttaaaagaataaggctgggctgggtgccacggctcacacctgtaatcccagcactttgggaggctgaggcgggcagatcacttgaggtcaggagttcgagaccagcttggccaacatggtgaaaccttgtctctactaaataaaaatataaaaattagctgggcgtggtggcacacacctgtagtcccagctactatggaggctgaggcagaagaatcgcttgaacctgggaggcggaggttgcagtgagccaagattgcaccactgcacttcagcctgggtgacagagtaagactcttgtctgaagaaaaaaaaaaaaaaaaaaaaagccgggcacagtgcctcatacctgtaatcccagcactttgggaggctgaggtgggtgaatcacctgaggtcaggagttcgagatcagactggccaacatgttgaaaccccgtctctactaaaaatagaaaaatcagtcgggcgtggtagcggacgcctgtaatcccagctactcgggagactgaggcaggagaatcacctgaacctgggaggcagaggttacaatgagccgagatcgcaccattgcactgcagcctgggtgacaagagcgaaactccatctcaaaaaaaaaagtaaatatacagacagccagggacaggtgcagtggctcacacctgtaatctagcactttgggaggccgaggcgggcggatcactggaggtcaggagttcgagaccagcctggtcaacatgtggaaaccctgtctctattaaaaatacaaaaaaattagccgggtgtggtggtgggcacctgtaatcccagctactcgggaggctgaggcaggagaatcacttgaacctaggaggcagaggttgcagtgagctgagatagcgccattgcactgcagcctgggcaacaagagcaaaactccatctcaaaaaaagaaaaaaaaaaaagaatttaaacaaggtcacagaatatacggttcatatgcaaaactcaaccgctttttttttttttttttttttttttgaggcaaggtctccctctgttgcccgggctggagtgcagtggtggaatcatggctcactgcagcctcaacgtcctgggctcaaactatcctcctgggtcagcctcctgagtagctcaaactacaggcatgcaccaccatgcctggctaatttttgtactttttgtagagacggggtttcgccatgttgcccaggctggtctcaaactcctggcctcaagtgatctgcccgccttagcttcccaaagcgctggaatcacaggcgtgagccaccgtgcccagcatcaattgcatttctgtataatatcatgatgaactagaaaatcaaagataccatttagaatagcataaaaaacatggactacatcaggaaaaacctgacacgggaagtgctgggtgtggccagcccagagtagtaacaagaccctggacgctcaagaaccctgaagtgtaaggcatcaggaaagctcaaggctttcggtgcaacaaagtccacaagtagagcccgagattgcaacatacgtttttattactcaaggacaacctggacgtcaccaatgcccagcttcacgggggcatgtagtgtgactcacggctgaacacaaaatcactgtgaagcctgtgctacagccctgggctacttttggacacgcaagaggacactcggttacatgaaacctgacttgcttctgaagacatgtgatacatgtcttttccctgaaaatgtttcccttccctgtctgccatgctcccaacttttctgccttccaggggcttctcactgtctgggtaactaggtcttgggcctagctagaccttgggtagtggcccctctgccacaatcagtgcctgggcctgaggctgagcttgtggcctccgaagcctgacctggctcggagctcgtctgtggcgcccagggatggcctggcttgcaggccaccacattaggccagctcgcaggtccccagtaaagcctgaagacactggcccgaggttggaggtgggtgctgctcgactttctggaggatctcagaattctcgcttcttgctaggactgaaccatgagacttacagccatacttcacttttcccagggtttttctttttgaaacagggtcttgctctgtcacccaggctggagtgcagtcatacaatcatgactcactgcagcctcgacctcccaagcataaatgatcctcctacttcagcctccccagcagctgggaccacaggcgtgcgctaccacgccaggctaatagtttaaaaaattttttggcagagacagggtctcatcatgttgccctggctggtcttgacctactgggctccagcgatcctcctgccttggcctcccaaagtgctgggattacaggcgtgagccaccgcacccggccacacttttccaaattgtaagcaggtaggagggccctaggcctcgtcggccccattgtgcagggtggccactgtccaaagagatgggcaaagagctgctgccagaggcctgggctgcagacgccctgcatggctctcaggggagccagctccctactccacacccctgcacagcagcccctctcctcccctcacgggtctgtgcagccagcagcctcccaacatgcgccagcctcctcactggatgatgccagccttccttgcccccagatgctggcatggaggcagggttccactctgcctgcctatgcccacagagcctagaacagcagggccacctccttctctcccccgcgggcatgggcccccacccccactgccggcagagtgctgaggactcgtgcaccatgagaacttctgaccatgagaactttgacttccggatttgggggatctgcccaggtgaacacatcagctctgaaattcatcactttcttcgggcccctgcctgtcctgttccaggcccaagcctacagaaggaagaggaaagtccgcttagcaaatgggggaggctcccctactgccagaagccctggctcaaggcctgggccatgctcccttatctcctggggcgttcgtgggaattgagggtttttgtttgtttgttcatttgtttttgagacagggtctaactgtctcccaggctggagtgcagtggcttgatcacagctcactgtagcctccacctcctgggctcaagtgatcctcccatcttggcctccaaaagtgctggtattataggcatgagccacctcgcccagctgagggttcctaagcagtggttcttcaaatagtacctgggatggaaaattcctgctggggcttcctatttcctgaaagcacagagtggggcaggcaccctcgggctaaaggaggtgctactgtcaggaggcgagggaaggagtgggccagggtcttgctaagggaggcatgtggggccggctgggcttctagaggtcgccagagccagtggcctgcccggctgccccacgccctcagcgcagtcgggacagacactctgctctttggggctgacacggatgcgcctgagcaccccagaggccagcctgggcggcagcacctgggagggagctggacgacagcagctgcaggctgtccagggccccatcctcgtacagggccagcttctggaccatcttctgtcgggcagggttgatgataatctgcggtggctctgacgacgatgatgcagagctgccaagggccagtcctggggtggagatggcactcccttagcctcatgctgtggctccccagcccgcagcctagcaccctgcctccctggcctcaggcctgaattcctcagagaagtccaagggcagggcccagctctcaggctaccagacagagccctccttgttcccagccttcaggaatggggtggggggagggctggagagcaagctccacctgggaaggatgtggcctggggaggggaaaccagggttgctaaggtcacagtgagctgaacatttggccctggttctcttctagaaggctggggtggggacttacaggggctttggcccaaagaggccttggtccctctcctgggaacccgtctccccagctaccttccacggctgtgggccgggatcctgggccactcccccagctcgattctcctgccgtgtccccctgaggacagccggcctccctgaggggtgctgggtccagagggcagcttggagtcaagtgccaggagcgcagggcagcagagaggccgcctaggctctcgtcactctccacgggctggttggggcctctctgcagctgctctgctgcctgggcactggctcctgatggcgctgccaggggctgccatggagcagccccactgtgggctctgccagtgctggacacgtaggagttctcctgcggggaaggggggatgcagctggcggcctccgaatgcccgggcacccccgccaccactgcctgcagcttctctagcctctcgtacacctgcaagtggaaaagagggactctcagggtgagatggcagccctggccggtcaccccgtgggcaaaccacagggctgctccaggccgtccgtgacctgccccagggctctaaaatgacataccctgcagctgggaacgctctgcccctcgcccctctgttcccatcacagggagtgctgagaagcgcggctgccaaaagcaaggactgagaatggcctcgttcttttctacaaaatgaatctcactgccccgctgccctcaaacggggcctctccattttcaactgtcaccagaggagaagaggtggggtactagggaggggacagaaaaaggcagatgcagtagtgcagtgcgcccagcagggggcgcggcagcagctctttccttctctctatgtgaagggggtcggagctgggctccgcaaagcaggactgcccggggcccctcagttcagaggggcgctgccccaaacagaaccaaagggcaagcaagaaatgtgtggagactccagagagacctagcaggtgctgagatggggtcactacagagcaaggcctggaatgcgggctttctatctggccaccccgtcccagtgcgcagctggctacctgggtcataggaggcctccttttggcccggcggtgcaggcagcagcaggccagctggcccaggcccaggcccagctcaggtgggcagggcccgggcctggggtccaggtgcttcttgtagatctgcatggcgatgggagcagcccaggcatctgcagccagacctgcttgcagtgtgctctgggtgcttctcaaagccactccagcctcctcagcctcctcttccaccaggtctttctgtgggataaatactgtcagtatggctaccaggtggccacacctgcagctgcagtcctcaggtccttgtcactcaatcgtatgggttttgataaaaaaaaaaaaaaaaaaaaaagagatggggtctcgctttgttggcctggctggtctccaagtaggctcaagtgatcctcccgcctcagcctcccaaagtgctggtgttacaggtgtgagacactgtgccacagctcttggtctttctacaacttactttttttctgagacagggactcattctgtcacccaggctggagtgcagtggtgcaatcatggctcagtgcagcctcaacctcccaggctcgtgatcctcccacctcggcctcccgagcagctgggattacaggtgtgtaccaccatgcctatcttgctatgttgcccaggctggtctccaactcccaggctcaagcgatcctcctgcctcagattcccgagtagcttctagagatttattaaacacctactgtgggccagtggtgctctgggccctagggatacaggaacaaacagaaccctgggacccggtttgacagagctgacttcctggtgggggagagccccatggagctggggtctgaaggcaggaagtagcctgagagggcagagccgagaaggaaagcgccccacagagaggtgccccacagacaaagaggtaccccagagagagaggcgccccgcagagaggcgcccccagggtggaaacaggaccggaggccatctccagttctgaaatcagacagaccaggaggaaccacctgggtgggcggtggcttttctcgcagagcgaacggcacatactaaggctgtgaagcaggcagcagggagcgccccgagtcccagggacctggggcgttggggggtcaaccacataagggactgggccttcaccccaagagcagagaaaaggcaaaggggcctttgaaaagagcactttggctgcagggtggggagcaagtggggaagtccaaggacccccaaggagcctggtgcgcttcttcagcaggatgcatggatggacggacggggaagggaaaggaaggagggctcaagcccggctcctgggttctcagcggggctgaatcctgacggagaccccacagcacacaggaaccgccccaaacaagaggagaagcagtgaagcaattactggctgagcacattctgtgaagtctgttttgcatatgggaaaacaggcccacaggggagcaggaatttgctggaaggccactgtcaggctggggctaaaacccaggtctctagtctcctggccccaccacagtccacggtgaggcagactgagtggagtaagaccgtgaggcagctcaggctgccctgcacggtgcggagagctcagctgcagcctgctggggcccaggaggttcctcggggcctgcttcttctctaccaccgcctttctccggccagagtcctctgagttccactgcagcttgggtctcagtgccctgggaccgcccttccccctgcccccagcccaggtggggtctgtacaaggcccatagtgtctgcaggacagacaggtttgtcctcggcaaggtaaacgaagttgtttggagccctgcctactttcaaaaatgaggccactgtggcagcagaggcatccatgggcactgcgccccagttatccccgccactggggctgtgcctgctggctgccagcagctgtgtgtccctcctggccctgcctcaaggggctcaccagatacttggtcctggcaccgtgcgtcttcacagccctctgaccagccaaggtctctagcactacctggagagagggaagagggagagcatggcagtggccttggcagggaagaggcctctggtgtggacatggattgggcctgacaagggtgtggacaaaggcagagccagatgttatgggactgaagctcgggcaactcggagagcccacttgaagacaaattacaaacacacagttaggtgcagggtgaggaggagggcctcggagggagggggaccctggagctgcagcctcctggggtcttggcagatggcccctggcccgcagtgcactctgcagcccccacctctgcctgcctgtggcttctcctcctctgagccagcagaggggtcagtggctcaccaccccaaagctgaaggtgtccgtgtccacagccagccttcccgtcttgatgtactcctcgggcaggtaggccagggtgccccgcactgtctgtgtccgggccaccatgctgctctggctggggctggacccggcaaagcggctgaaccgggccaggccaaagtctcccagcttgggtgtcagcctctcatccagaaggacgttggaacttggggagagaagacagtggcgtcagcccggtcctagctcctacacctgcccggcttagataaggctggactcgaggctgccagcccggtgccttgcccacagaaagcgctggcactgccctgagcgctccagctgcctgggggcctctgctcatcagtagggcccatccttggcccgttcccacacctgtgcgatgccggggtgttgaggtcccaggccatgcctgatccccacattgataggacgcggggccccccttgctgcaggccctgccccggcagttctcaagggcccctcctcacctcttgatgtctccatggatgaggctggggctgtcctgatgtagaaactgaattgcccgggctgtacccagaaggatgtccagtcgctgaggccaggagagaggtgggcaggcctgggtctggggtggcaaagggggacaggggaggttgctggatggccgttccttgatcccaaccatccttctacctgtcaccgtgcagcctggaacagccacttcactctctaggcctcagtttcccccttctggaaaacgaggagcaaagtctccgtgacctgcacttcttaagcaatggctggggacacgttcaatagaatctgctgggcttcggctcccagggctcatccctttgtccctggtggtcgggaagtccttgaaggcattcttcccgctctccccaaacgcagcatgcaggaggaggcaagggggccctccctcagctgtaggtggtccagctggtagccccagaccccctcgcctccggggcttgctgatgagaccctccagctacgctgcttgcaaaggggagaggcctgggaaagagctctatagaaaacattgggtcgggccaggcgtggtggctcacgcctgtaatcccagcactttgggaggctgaggcgcgcagaccacctggggtcaggagttcgagactagcctggccaatgtggcaaaacctcatctctactaaaaatacaaaaattaggcaggtgtggtggtgcatgcctgtagtcccagctactcgggaggctgcggcaggaggatcgcctgaacccgggaggtggaggttgtggtgagctgagatcacaccactgcactccagcctggatgacagagcaagactccacctcaaaaaaaaaaaaaaaaaaaaaaaaaaaaaaattgaccccaccgtgggccaaatcctgagccgggtgctgctggggagctggaagtgcaggcctggcctgctggcaggacccactcacacaggctgaaagccctaggccccgcgcccggctccagccaggtgtcaggagtgctttgggtcctgggaagcgtgccgggccaggtgagcctacctggcagtggagacggtcctccagggagccgttgggcaggaagccgtacaccaggcagtagaagccgttctgagcacagtagccagcaaagtccacaatgtttgggtgacgaaacctgtttgaaaaaggggagcactttccatcaggccagactgggtgggcagccctggctggggcctcagctcgcccgggcctgccaggcctcaggtgcccaagggagccaggtcctgtggtgtgcggtctgaagccccacgggacctggtgtggctccccctctggcctcacctggacagctgctccacctcggtcaggaagctctgcttcactgcagtccactccaggtcagcgttctgcagcccccagggtgcggtgggggaaggggcagggaagacgggcagcgtgaggctctcgaagcgaaggccttcgggccaccagtgccacctacccgaggcccagaaccaccaaggggccagggaccctacgccagaatgagggctgaaggagttgtgtggggaagcgagggggaaaggctggagaagtggtgagggttatctgatggccttccagggtccctgccagggtgcgacactcacctccttcagcctcttcacagcatacaccgtgttcctcatcaccgcccggtacacgcacccaaagccaccctccccgatcttgagctcctccgagaagttgtgggtgccccgggaaatctcacagaggggccagcaaaacggaaaggggcgggctccctgcaggagggacactgagctctctgggcctggctgtgggaagagagcctggatcaggtggggtccctgtctcttcccttctgcccaaggctccaggctctccccaccacagctgcctcccagctgacccagcttggctgactggggctctgcgctacatcaaaggctgaattccttcctccttgtctcgaatcttccctggggggcaggggacacctaccttggtagaagaaggggctggagatggcggtggaggccacagggaagcagggcttgggaccaggccgagctcaggccctgaatgggtctgggagcctggaaaagcttcataaagacaccagtgagaggcaggcagagaccagcagcagggtctacagccgtggccgtggtcaaggtgggctcttctttgggtccaccgagcctaacaaccgggccctcttacctggggagaggaaggtggaggctgaggatggcaacttccgggggctccaggcctcggcctcggcgggtgcagggatgctgctgggcctcggggcagtggtgcctggggacggaagcggggcgggagggtgccctgggacgccaaggaaggaaaggaaggttgaggcccgggtgggggagccccgtggggcccgccggcctcccagccgtggggtgcccggagtcccgcgctcacaggctgtgatgatgtcccgcgcacggagcagctgcaggtgcgtgaggatgtgcacgaggtcggccacacgggcgttgcggttgatccagggccacaggacgctggccgtgcgctgcccggagcgctcgcacagccgcagctcggtctggtcgcgcacgatcagggcggctgcggggcggggggcgtcaggcgtcggcgccaggagcccgcgcgcctcccgccccccggcagcccgccgccacccaccgaactggcaccagtcggcgggctccagggcgtccatcactttgtagaagcggcacatgacccagggcggcacctcgtacaagaagtgctgggcgccgggggctgcgggctcccccgggcccggccccccggccatggctgccgccgccgggccgggacctgccggggcctctcagggccgcggcgggcgcgggcctgggccggccgggtccgcggacactgactcacttccccttcgagccggcctcgtgcgacgcccggcggggcggaaggggcggtgcccgggcccgccgccatcttgcgcgccgcggccgcgcgctgggtcacacgggggcgccccgcgccggggagggcccgggtcccggcgggttccgcgagcggcgatcggcctcccgggctcgcccgggcggggctctggaggacgaacggcggctcccggcgttggggacagagggcagggcggaggcccgggctgctcggaaaggggccggggccgggccttccgaaagctcctgggcggccctgccggaaccctgctctccactgcggcctgcagggctgttaccaggagccctgcctgcccgccccacgtctagccccctgcacacggcagcagccttgagccattcagtctccttaggtgtcctgaaatatgccgagaacgctgcccgccacagccgtgagtgtatgcgttgctgctgccccagccctcatttggcaagggtgagctcaggcagctgtggtgaaggcttcctgagcccgccggcagagctcctgccaccccgtacctgtcccctcctgggcatcgtccttgattacttgtctggaccgccacccccggtccccgccctgagatggggaagaccccacaagcagcaacgcagacttactcttttgtttctccagctggatgtctcctccagcgacagttccccttgccctcttgatcctgacagcgaaggggttccccacccctagccctacagacttaggacttttcctagaaacgagaagtgcccaaggcccacagctggcccctgttggagtctctttcctgaagccaccaccactgtggccactcccaaggaagatgccaaccataccatgaaacccatggcttctcacgggacagactttactgagatgtaccaactcaagtatctgaaatgactgcacacccatgctaacctccacgggggcacttggtcctacttacacacaaaggcccatcagctcacggaacagggctggcatacgagatgctcaatgcatacaagttgacttttcaaccctgggatctacctttgaaggccaggccttccgagggtaccttctagcatgtgcatgtgaagctggactcctttgagcagttgtctcctccagccccttaccaacctggtgaggctgctcctgagagccaaggaagccagtaacaagggggccccctttgggcaaacccctcagcctgcccttgcctggtcagagaaccacgttagcagtcaacagagggcacgtgagggtcctggccagaatgagacacaggaggagccacagcctgcgggggtgggggtgtccaaaagcaccacagcacatccagacctagggggtgcccctaccatacgggtctggagcagggaggttgtgctgcaggctgactcatgccaggcccttcccgtcacacgctggagcagtgtgcctggagagcactggcttggaagaagctgaggggccagcgaggccagcatatggaggaggcttcccttggccgctcgtggcaggcctgaaggcagctacctgtgtccagggacagccagatccaatgaggaaacgcagcaccatgctgtcatgtgagctggagggggacttctgtcttataatgaaagcccagaccttgagtcactttcacagagagatttatcgagaatgctaacagcacaggatacagtacttcccaacaaaaggtgcaaacgcgtcacttagaaaggcatgctgagtattctttgctttcacatgtattaaaaaacttacaaaaataaaataaaactgcgtgctgcccatcttttccaatagtaaaagaaccttatgaaaaaatcacttgatttttacaacaaaagacacaaacggacatttttatgtaaatttataaggcaaactctttatataataaataggttacagggattcagtggggggggggtgtttttgaaacgtatacaggtacattcagacaggtttactgaaatggtacaaatttccttaataaattgccttttgtttttaaatatatcagtgctttcagtcatttggctatacacaaagaaccttttttctgaacactacaaaaaagcaatcaataatttttgtttttaaaacgacctacttattttctaaagtaattgtcccaaaacacaaaaactgaaggtgaatacgatacagggcttttagagacatctccagctaagtgtgtcccggcctctccctgtgccccaagtgcacctctcccaacctcagacaggtttccaggctggagccagctcccttctgcacagggtggcctgtgttactggcaatgctgtccatagctctcggcctctgggctggcacaggggagcatgacttcaactcaggagggggcagacaccctgcctagctcttccagatgctgcacccggcatgcaatggtcactacagtcagcactctccgcctctcagaggagggaggggctgtcaggtgttttgggagcccaaaaccatgcctaatgagggtaatggcttttctaaggagatgttttcgccatggaatgggaaggggttttctcacatctaagttttgctggcgatcgggtgacagccaagagagtgcaagccccctccatggtcattttattgccctgggaaggggagggtggggaatagagatgtcacagtgttgagccctggaggatggggtgggatgtgacggaagtgtcttaaacagtaatgcccacggggcacaccttggagagagaatgcccaccacctggcctgtccaggaagagctgcatctgccaacattagcctgacctgtgcccacagcagagcgtcccagcctcctgcttgggtgggcccagccccattctccccagctcttcagctctgcacacacacatcccctcctggctcccctcaaggaaacatcaatcttgcctttccttaaaagcacgggatggtggtaataatctcggggggaggggaagcaaaacaagaatccactgggcggaacaaaacctggttttgcagtgacttggaaagtggcaacacatcagctattcggcttgctggcttggagtgggactcctgggctccactgctttgggtggcttctggctgatctgggcaggggtcatctgttcagctctcccctctcatctcagtcaccatccccctccctccgaatgcttttgtttgtaaagaaaaagtgtctagaaatatttgtctctggaacaattactttaaacatagttacaatacagacttcagttcaaacacagaagagatttacttagcaaaattcctttcacccaccaaaaattacacaaatataagcctcaacaccacagttaagaggaccagtagagagaacctcatgtttggaacacaaaaggagaaataaaaaccaaaccaaacccaaacagaaaaaccccagaaagacaagtaaagggcaaagaaggaaggggaaggggagcaaacacagcacacgttacagtgtccagatacacgggagcccagcatgggcaagggctcggcacacattgagtaacagtcctggtgatatttggtcatatattcattgactactgactctggagcggctgttattgattgaagcagtgacaaatcaaacggaaaggaggccgtggtagcaagggaaggagcaggcttcaagttctgcaagccttttgcactccactgtccagctccccagaaacactgaaccgggtgggccccgctccatccgggcagggctagaggtcaccgggtgaggctaactcgggcgtcgatttcatgtcagtcagaaaacacgcacgtggacgcacgcagacacccacctgttcacggccaaacatcagcggcaacggcctcctcgcctcctctgcccctatcccaggctgggtgggaaagagcatcatgacccactgctaacactgaacacacgccggagctggccccggatgtgggcccagaggctgccccagccctggtcctccgaagggctcacgggtagcccggccactgaaagggcctatggctgtttttcttttggattcaggcctcagaagaagcaatgacagcagggagggaagcttttggccctggtgattataatgctctctgctttggaagaacaagtttctggatttttttggtgtttctaattattaaaaaaagatgatcaaaaagaactgttacagctaaactctctagcagatattgctcattaagaattacaaaagcaaatgcaattactcgtaggatgggggagaagaaagggacatttctggagtcttcactactcctggaggggaccccttggactgacgcacatgattctggggtccctggcgttctacctggtgcagctcacaggttccgagacaggccaggcctcccgtctccgctccagcccccaggctcgacagagtgggaaggatgaaacacactcggaccctactggcagggaggcctgcgaggctgactccacatgggctcaccctgaccaggtcacgggaaggggactgggggagtcaggccaccccagtggactccagctcccagaggtggaaggcgaccaggctgtgccgactacgttccggacttcagcaggtcaagggagcgctcctgcacccagaaccttgggacctctttcacaagcacgggagaaacaagagtgcaaaacctgggtgctgcctggagcctccttcacctggcacaggaaagcccttgaaagaagcgaggaaaagaccacgaatctgcttggacagaagaagtgaccagcagacagatttgtcgtttttttttcttttttttctttttttattttcccttgtcctatgctatggttatcagaaatattgtaattaagcaacaggtataattttaacaggtctttttttgtgtgtgtggagccacaagcaaaatgagtttataattgtgcaatatacagatatatatataaaaattcaactgctttgtgtgtctagtcggtgcgttaaataaaagggacagaaaaactaaaagcaaaactaaaaagcaaaacaaaagcccaggatagaggagacaaagcaggcctatgcgcacagtctatgtgttactggatataatcagggtcaccaggaagaacagctttgccacttgacacacaaacactgcggggagaggggctatcagtgggcaggagccaaacctcttggccttttcacctcatctgctctcactgctgagcaggacctgattaaaggtaggacagaatgggggtttgggggcaaagagatttccaaattccccaaatgttcttgaattcaaaggtaggatttcctccagggtctgggctctgcctgtgcacaagtcggagcccggagcgggagctgggggttgtgctccctccttgcactgccctcacacctgcttccttctgcctcctgacagggcaggcagggggccttggggaggcagtgagaggccagctcagaaggctcagctgatccgaggcgagcagagcaggagtgggcaaggcaggctgcccctcaggcagaagtgccttcctagttccctgggtgttttcctgacacgtcagcgctggggcaggctctgtcaagatgagaagagtgggaaggagggtggtgctgggccttccaggtcactggtgaacgctccaccttccataccactcccaaaagacaggttcagaagccatgtcctcaggtcggctacctccagattccccttgcctgtaatgctcaccaggcatctcaggccaagtgctaagtatttttagatcagcactgttgtaaaagcttgctcgtattcattcaaaaacatcgaaatgtaattttctgccaaatgttttctaggttttccttctaaattgttgagaactgacttcagtgttcagcttttcccctctaatatgtaattttagaccctgggggaggcagtatcctaacgatttataacaagtagactatgccttttctaaagattgatacaatatctaaaagagaaagacaccaaaatggagagaatcaacaaatcccgtcagagcagagagaagagtaggaagacccggagggagcagggctctgcccccccaccgggcaggtcctccagacccactccatggtaggaactctagaaacagctgactccctgaagtctaggacacaggtcctagaatctgcaggtgtgaacttgaaacaggaatccatttggggcaatgacacaggctaaaaatgtatatgcccaaagatcttcttaaagaactggtacctgtaacctcccctggcccagtcagcccagagagcctgactggaatgctctggaaaaggagctgtggttagacgggggacacagagttctggctgtcaggctccacttgggctaaaccaattccagatggtcccgcgcaggggactccgctcgtatccctctgctccctcctgggcttgagccgcttactaagtgatttaaaattcagagattctgtcagctaaagaaactcctttctccacccaacttggcagtttgtgtctggttattaccctctttcgccatcactgtcacagcaatgaaaagctgggcagagaagcaggtgacaatttggggctgctccctgtcccaggtgcactgttcatgcttcgggcctggaatgatgccacccaacagaagattgtctgcacccgcactggcgctcacgagtagcagcttccgccatccagcgagctgagaagctggggccgttggctagtttggcactgatggattgggggatgtggcgtttctgggtgtcccctgtgtcttttgatatgggaatacagcatcaacagaagggagctgtgctagcgcctggctgtgaccaagtatctccagctcactgagctgtcaagaccggcaatcccactggctatgacaagcccaccagcaggcagggccgggaggggtagacctggggggagctcgacgacatacagtattgtcaggagaggaggtagtaactaacaactggaacaagggtgggggagactgtggatgtggccttaatgacctagccccatgggtactggaaagctgtcggtcaattctgctgttcacaaattcactgaaagaggcccccatcttcataatgttcaagtacagacaaaattgaaattgaggtcacaccccaaaactgggccggacacagctggtgagaatcctgcagcttaaggctttccctccaacctcctgtcaacctgaccccaaggcaggggcagcatgagagctgcagggcccctgcctgccagggcgataaaccgccaaggctgcctgctgaaaggcgactgactcgtgatgcctttgggaaagacgagggaatgaggaagaaagggggaaatagagagaaaaccctaaggagcctcaggccccactggcagctctggaataaactggaagggaaagaggctgggcaactgcctctttgagggagctgcaggtggggcccgaatgaaataaagtgacgcttgaaatgctgtgttcccaaccacgactgccccatcggccctgaatgaactgtcatgggtgacaggggggcctggtgggccacgcactcctcttaccaggaccagatgacgcccaggtgacggggaagcagctctggacaatgattccagaagccacattacatttgactaagtataatacataaaaacccaactgaccaaaataaacatcttctcagtgacaacctggtcggatgctgcgctctcgtggataagtgtcctttggtagtgccaggagttcgaggccactatgggggcaggagccttctgtccttggaggaagagttctggaggactcaccctctcttctgaccccccttcccttcctggggaagagtcagaagtgaagctgggggggtcatcagcagagcaggtggaagggatcagggatcagggattgggctgatgggagtttggttgcaggacttgcttttacagcataaggaaatggacacatatatgctagaaagtccaactatgagactctacaaacagaacggggcaaactccctcacttctaaccattccagaagagacaaacacggttttttcttaagctactgattggaactgtcaactatggttcctgatcactaaagactggcaaggaagtgctagacagtttctatgatgtttcactccttcatgattacaccatagtaaggaagccagggacaataactgaaatacacaagacaacacacacttgacagttcatggcagcagctcacatgggacatgcctgtgggtgtttctggaagcataagactgctgtctcatttgctactttgataaggtacttctcagttggacagatttagatataagagacatctctgtaaacacagaaaaggatataccaatatgatgaagatatgcagctagataaggacttcctgaacagaggttaaaaagatgggatcccacatgaaaactgatc

SEQ ID NO: 2216 - DNA, 531 bp, Homo Sapiens
  misc_feature (153)..(153): n is a, c, g, or t
  misc_feature (335)..(335): n is a, c, g, or t
  misc_feature (408)..(408): n is a, c, g, or t
  misc_feature (416)..(416): n is a, c, g, or t
  misc_feature (498)..(498): n is a, c, g, or t
gcaaggctggtgggcgtggactcaaagcatggcagcggcagaggctggagcagttggggatcttcagcttctaaatgctaattacacagtgagctttgggctattttttccatgagcttaatgatgctttctctgggcttttgggggagggtntccaccagcttcttcagctgagcccctgcctccctcatgtcttgatcagggctgaaaagttccatggcagcctcataactggagggtgtgtccatgaggagggtttcgatgacacgctgaaagctcgggcagatctctgcaggaagcggactgccagcagagagccagtgtgaccaggggtnaggggtgacagcgagttttcatgggtggaaggagggggatgctcttgcccttcttcgttccccaatttccctncaaccccnggggatcccacttagtttcttaagaagccgccccccaacccggttgggaacttcccactttttttttcccctttaagttaanggttaatttttcgagctttggcgtaaatcaatg

SEQ ID NO: 2217 - DNA, 619 bp, Homo Sapiens
tagttgaaatgtgtttgtcctctacttagaccaacaaatttccatgtggtcttaagtattatctcaaaacttacttaactagaagagctcagaagacggatgcgggcccaatcatgctatgtactcgtacgtaaggaccaaggaagcaagaacaatcacaggtcaaacaacttctagcatctcacataattttggggcactagaaggcagacatgatggggaggtgaaaaagttctagaaatggtatcggacaggtatcggaatctaggacacatggtaactggaggaattacttagaggagactgtaattttgctctacatttaagtggcactatctatgcagcattatcggaaacagaaatatccagcaccctttctctgcttctagtgaggtacaagaacatttcaattctatcattttccttgttaccaagggctgaatgtatacaacatacagtttaattggttagcatttatattctactcagaggaaatctgttggtacctgactcaggaacacaaaacaaaatgacaccaccatctcttgccctgaaagtcctcattctcatttcctctccttactacatccatcatctctactatcctgctcaaataaaa

SEQ ID NO: 2218 - DNA, 263 bp, Homo Sapiens
cttttcaatgttggtcataatccattcaactgatctcatgaccacagtttaagaaacactggtctaggttatttctaagggcatttaaggtttaacacactaggttcttttcttttttttttattttattattattatactttaagttttagtgtacatgtgcacaatgtgcaggttagttacatatgtatacatgaacatactaggttattttctatcaagaattcagactagggaccaccagatgatggcaagttcatgaa

SEQ ID NO: 2219 - DNA, 668 bp, Homo Sapiens
ggaaggagaggaagcggatgccgtggggtttacagcaggaaaatccgtggagacagcagatccgagaagcggcgatgtttgcgtagaaccctgtacgtgcttccttcggcctgtcgctcttcccttctctctgaccagcaccatgcttctcctggtgacaagccttctgctctgtgagttaccacacccagcattcctcctgatcccagagaaatcggatctgcgaacagtggcaccagcctctagtctcaatgtgaggtttgactccaggacgatgaatttaagctgggactgccaagaaaacacaaccttcagcaagtgtttcttaactgacaagaagaacagagtcgtggaacccaggctcagtaacaacgaatgttcgtgcacatttcgtgaaattgtctgcatgaaggagtcacatttgaggttcacgtgaatactagtcaaagaggatttcaacagaaactgctttatccaaattcaggaagggagggtaccgctgctcagaatttctcctgtttcatctacaatgcggatttaatgaactgtacctgggcgaggggtccgacggccccccgtgacgtccagtattttttgtacctacgaaactcaaagagaaggaggagatccggtgtccttattacttacagaatccggaaccctgtgga

SEQ ID NO: 2220 - DNA, 519 bp, Homo Sapiens
tttttcaaatatggaagcacctttaatgagagttgacatgacttgggggatttcctaaccatcatgctcttaacacaggtgcctggttaggcaggttccttccacctggctgagcccagacaccgatctgtgagagcagcacagtgcaagggaaggctccctgcaagggagggctgcaggctaggctggcccttcagggtagtgttttggttctttcctgaagcaggaggcctcgcttggagcattgctttgctcctaaattacttaaccaaacagcgacttattttccacagtcaggtagacaaacaccacaatgatgaaaataccaagcacagcaagcttcaagcccactgggaaaccttcttctctccagctctcgatagtctggtcttccgcgcagtagtctctctctttggtgatagtcccatatgtgattctggtgcttggtgctcttgcagcccaccttcttcccttggaaggcttataatccaagcaataggtatctacagctttccgttt

SEQ ID NO: 2221 - DNA, 415 bp, Homo Sapiens
taaatgtttcagccttgggtactagattagaatttaacatgaaatagttgtgaaatgggaaagcctagaattgatggcaaacacatatgcataaagttatgatagaaacagccaaaaaaattaattaaagtaagcaaccctgttaccaggaaatcattaacctgggaaaaaaaaaatctaagaaatggtattgcctgaagtaacaaatggtggccaaataaaatcttcacttcttttgttgttttaaactactatattcttaatatccaagaatggcatcatacaaggaaacaagctatcatgcagctggaactacttataaactgtaattccactcattatttttcactgtcctgaactcactaaataaggctacacctgaaatctgcacactgaaggtttgatgttttctctc

SEQ ID NO: 2222 - DNA, 648 bp, Homo Sapiens
ctcgccctcgccctccgcccacccggtagaggacccccgcccgtgccccgaccggtccccgcctttttgtaaaacttaaagcgggcgcagcattaactgcttcccgccccggtgacctctcagggtgtctccccgccaaaggtgctccgccgctaaggaacatggcgaaggtggagcaggtcctgagcctcgagccgcagcacgagctcaaattccgaggtcccttcaccgatgttgtcaccaccaacctaaagcttggcaacccgacagaccgaaatgtgtgttattaaggtgaagactacagcaccacgtaggtactagtgtgaggcccaacagcggaatcatcgatgcaggggcctcaattaatgtatctgtgatgttacagcctttcgattatgatcccaatgagaaaagtaaacacaagtttatggttcagctctatgtttgctccaactgacacttcagatatggaagcagctatggaaggaggcaaaaccggcaagaccttatggattcaaaacttagatgtgtgtcgaattgccagcagagaatgataaaccacatgatgtagaaataaataaaattatatccacaactgcatcaaagacagaaacacaatagtgtctagtctctgaagtctcttggatg

SEQ ID NO: 2223 - DNA, 581 bp, Homo Sapiens
gcggccgcaaacgttttttttttttttttttttttttttattttggaaaatgttaaaatttattaataggggttaacatcacatagttaattaaactagttatgtattgtacataatgacaacatcttcactagactgagtgctcaaggatttgagatgattcgctattcatcacaccccgaagattgagatccactgtatttacacaaagcaaagccatgtcagcaagggactgtcaacctgattctgagaacataaacattcaaaatttattttccagtgttcctttttggaaaccaacaacacatctttaatacctacacacacacacatctctacctttaaaaaaaaaagtgtaacttcacagatagtacctaatcttcaagcttaaaatttaagttaaaattaatctctattttgtgggcaccctttagtgaactaaaatctacatgaaaccttttggcttttgtgtagcaggaaatacccacgttttgggtcaattagtgcagatgggagcagcagaggagctacaccagacagcaaagcaagactagagcaaacgagaaggaccagcccctagc

SEQ ID NO: 2224 - DNA, 482 bp, Homo Sapiens
ttttcatttcacttggcacaatgctgtatggtttcgtcctacaaactatttataagccgttgttcattacttttggctaccgttatgacatctgtagaggagaaacgaaaagtggctttagattcagttaaactgcgacgcccagaaggtaaactggaggtcccttaacagctggttctcgaagatttcctcgagggaagaaaaaaatatggttagtttcccctaatgatctctctgaaatgattgccaaaaaaactcaaagcaatatccagctttctcgcctcctcctgctcgccccttttacccagactgagccgaggatggcggaaggaggcacattgtcacatttcttattaaacacatctggaatatgcgcgctctggatttagtgccaggggttttacaaagagtttatgactgtgacagaaaattgtccttttaacaagtttacaagcagtaatcacgggggcttttacagaacc

SEQ ID NO: 2225 - DNA, 466 bp, Homo Sapiens
gctggacgcggaggcgctgggcgcacggcgcggagccggccggagctcgaggccggcggcggcgggagagcgacccgggcggcctcgtagcggggccccggatccccgagtggcggccggagcctcgaaaagagattctcagcgctgattttgagatgatgggcttgggaaacgggcgtcgcagcatgaagtcgccgcccctcgtgctggccgccctggtggcctgcatcatcgtcttgggcttcaactactggattgcgagctcccggagcgtggacctccagacacggatcatggagctggaaggcagggtccgcagggcggctgcagagagaggcgccgtggagctgaagaagaacgagttccagggagagctggagaagcagcgggagcagcttgacaaaatccagtccagccacaacttccagctggagagcgtcaacaagctgtaccaggacgaaaaggc

SEQ ID NO: 2226 - DNA, 422 bp, Homo Sapiens
ttttttttttttttttttttttttcttattttgaggaactttattgttacatttttgcaataattgaggcacaactacctcctgcttttccaacatcttaataaaaaagacaataaggattaacagggaaattaaaattaaaaaatacaaaagcctaaggttctggaaacaaaactgactaaagtctatgtgtgtagccaagttgggaatgacagtttagccttgcagagtttccttcttctccaattacaatgggttacaaaatttggaagggggtgtctttaaaaacgttctaattcaccccggtcatgaggaggaggaggagaagtccagctcaacaaggccaagtgcctcggccagggcggtggggtcagcgctgagcgggtcaagagcctgcgccgggggccatccccctgcgcttt

SEQ ID NO: 2227 - DNA, 774 bp, Homo Sapiens
gttgtgtcttcgttctttccgccatcttcgttctttccaacatcttcgttctttctcactgaccgagactcagccggtaggtctgcagagtggtcttcctggtaatttagttgtgagtgaatgtgtggaggagccagcgggcttaggacaggtcctgtggcacagtccgtggctttgagggaaaagggcctcgcggtggtcctccgccttcccccaggtcgtgatgcaggcgccatgggccggtaatcgtggctgggctggaacgagggaggaagtgagagatatgagtgagcatgtaacaagatcccaatcctcagaaagaggaaatgaccaagagtcttcccagccagttggacctgtgattgtccagcagcccactgaggaaaaacgtcaagaagaggaaccaccaactgataatcagggtattgcacctagtggggagatcaaaaatgaaggagcacctgctgttcaagggactgatgtggaagcttttcaacaggaactggctctgcttaagatagaggatgcacctggagatggtcctgatgtcaggcaggggactctgcccacttttgatcccacttaaagtgctggaagcaggtgaagggcaactataggtttaaaccaagacaatgaagactgaaaccaagaatattgttcttatgctggaaatttgactggtaacatctcttaataaattttacaggttctgccaaaaaacaaaaaaacccggctctttcggtcgggaaaaggttgaatggctggaagttccga

SEQ ID NO: 2228 - DNA, 411 bp, Homo Sapiens
cacgaggacatctcctacgacccgcacgactgggatgctgaagacctgcaggtgtttgtggtgccccactctcacaatgacccaggctggatcaagacctttgacaagtactacacagagcagacccaacacatcctcaatagcatggtgtctaagctgcaggaggacccccggcggcgcttcctctgggcagaggtctccttcttcgccaagtggtgggacaacatcaatgtccaaaagagagcggcagtccgaaggctggtgggaaacgggcagctggagattgcgacaggaggctgggtgatgccagatgaggccaattcccactactttgcattgattgaccagctcatcgaaggacaccagtggctggagagaaatcttggtgcaaccccccgctctggctgggca

SEQ ID NO: 2229 - DNA, 4791 bp, Homo Sapiens
caactataagactttgattattatctgcgcactcttcactttggtcacagtacttttgtggaataagtgttccagtgacaaagcaatccagtttccacggcgttcgagtagtggcttcagagtggatgggtttgaaaaaagagcagcagcatctgagagtaacaactatatgaaccacgtggccaaacaacagtctgaggaagcattccctcaggaacagcagaaagcaccccctgttgttgggggcttcaatagcaatgtgggaagtaaggtgttagggctcaaatatgaagaaattgactgtctcataaatgatgaacacacaattaaagggagacgagaggggaacgaagtctttcttccattcacttgggttgagaaatattttgatgtttatggaaaggtggttcagtatgatggctatgatcggtttgaattctctcatagctattccaaagtctatgcacagagagccccctatcaccccgatggtgtgtttatgtcttttgaaggctacaatgtggaagtccgagacagagtcaagtgcataagtggggttgaaggtgtgccattatctacacaatggggacctcaaggctatttctatccaatccagattgcacagtatggattaagtcattacagcaagaatctaactgagaaacctcctcacatagaggtatatgaaacagcagaagacagagacaaaaacaagcctaatgactggactgtgccaaagggctgctttatggcgaatgtggctgataagtctagattcaccaatgtcaaacagtttattgcaccagaaaccagtgaaggtgtatccttgcaactgggaaacacaaaagattttattatttcatttgacctcaagttcttgacaaatggaagtgtgtccgtggttctagagaccacagaaaagaatcagctcttcactatacattatgtctcaaatgctcagctaattgcttttaaagaaagagatatatactatggcattgggcccagaacttcatggagcacagttaccagggacctggtcactgacctcaggaaaggagtgggtctttcaaacacaaaagctgtcaagccaaccaaaataatgcccaagaaggtggttaggttgattgcaaaaggtaagggattcctcgacaacattaccatctctaccacagcccacatggctgcattttttgctgctagtgattggctagtaaggaaccaggatgagaaaggtggctggccaattatggtgacccgtaagttaggggaagggttcaagtctttagagccaggatggtattctgccatggcccaagggcaagccatttctacattagtcagggcctatctgttaacaaaagaccatatattcctcaattcagctttaagggcaacagccccttataagtttctatctgagcagcatggagttaaagctgtgtttatgaataaacatgactggtatgaagaatatccaaccacacctagctcttttgttttaaatggctttatgtattctttaattgggctgtatgacttaaaagaaactgcaggggaaaaactcggaaaagaagcaaggtccttgtatgagcgtggcatggaatctcttaaagccatgctgcccttgtatgacactggctcaggaaccatctatgacctccgtcacttcatgcttggcatcgctcctaacctggctcgctgggactatcataccacccacatcaatcagttgcagctactcagtaccattgatgagtccccaatcttcaaagaatttgtcaagaggtggaaaagctaccttaaaggcagcagggcaaagcacaactagagctcacaaccaaaactgcacttcagcctctgctgtacacagaaactacaggctctgtctcaggagagcataggcacattttaaaaggttatgtactaggtttttgtggattctatcaaagtgataagtgatccttaaaaccagccttctaaaataattgcattccatgggttgggtatttagaaatgtaggtggcatttagaacacaatgtttaatcaatgggctgaacaaagatgcttcactttgccttgcccatcaccctatacagtttcgcagatagtctagtcactctatgtgagaaagataatggtaagtagttgctactggccaactgtctagcacttacctgaaaacttagtatggagctcttttaaaatgtgattatttatatttatgttgaaagcggactttaaaaaaaataatgtgctgtaacacagtaaatatgtacttgtagcctggatagcagactgtgttcaactttttaaaaagatgtttcctttctatagattaatttcttgggagcaaatgagtatttgttgcatttgttcaatttgttgtatatggtgaatatttaattatggttttcttgaaacgtgtaaattaaaaacacaatcagtgttcaggcttcagttatataatgtaagcacaactaaaatgaaacttgttgactgcacaagaaattacaaaaatgtttctgttttgaaacttgatctacaatcagtaaaagtttgataatcagtatatcccttcccaacccccattgtgacagtttctttttgtcactgtctagaattttgtattttatttcagactataccttggagttttgtatattttgagagagatatttttgggacattattttggaaacttattacaaatctaaatttggaaaggagctagtagctttaaggccaccaccatattttacttttttaggatttttccccctttaaataaaaatattagatcaaatactatatgcaagaaatcatagcaaagtttttttttcctaccaagatcattcttgatcatcagcttcccaaactagtaagtctgtgcatcattgggtgtttttttttaatttaattttaaattatcccagctattagatagaagggatgttactgcacttatgtgtaatcagatctttatttaggtatacatatcctcctataccgcacataaatagatttcagagcccccatacaatgggcagtgtctgctatagggcttcaggcattaaataaaaccgagggttgttgattttgctgtgacagtacactaaatcaatactatatcttatacagtttgaaaatatgataccctacactttcaggggaccgagtctgacaaacacaatacatttatctgtgacctatatcaagtacacatttaggagccaggtaggttacctgcttacacactatattttaattgaattcaaactatcaagcactacttagaaactggaaaacatatatatgttagcatcaaagggggcagaagcaaagaagatacagatctgcactgaagacattagactggccatagaaaagtaagcttgaactcccaattgatgtgaccacctcttcttaattttgttcacagtaaaaacacttttttgagttattaggcttacccctagcttttgacctttgcatttcatatatgttagatgtctcagcaagaatatctggtctcccctaatttttattcccagtgccgatgttcaaaataaactttctccagtctgggaaccttttttacttccccatatttgttattatttagaatggttcatacgtctgctttgtttgcatactggtcttcagattatgagactcgatgataacagtatggtactgcttctgtgacaaatatcgtgccttaacaatgtggctgtccttttccactgaagaaggaaagacgttttgatctagaaatagcgttgtgatttccttgctgttggttttacactgccttccacattgcaacagcaagttgatttcttgtgatcccagaattttctaagaggatgagttgaatctatagcagcattgtcagtacagaccagtggttctcaaactttaaaatgcctcagcatcacttgggagcttattgaaatgcagatcccagagtcagtaaatctgcctgtgaagtatgatagtctgcatttgtaatgagcattcaagtgattctgatgcaggtgagctgggggcatacagggaggaacactgccctggactatccattgcatttttgcctctaaacaactacagaattttctagggttttaaattatgtaaaatgtttacttattctgagcttagagagaatggggagggtatttttaaattttattgttttatttctttaagtttttctttgctttaagattataggtattaggtttgtttttgtttttccacttatcttgagttcactttgatgttaaatctattgctacttcagttgtaaaaccagccaaaagtttctggatgaaggtcaagtttgaccttttaggagttattgtacataaaggcttcatccacgaaccatccagcgcacagaagcaagtgcaaaaatgacacaagcacaactctccagacgtggctccttctcctttctcagtgcagactctcactgaaagctgctattttcatcctccttgtggttgcttttcttgtttctcttccattgtacatgtgggttatataccatatgttaaatatgcaataaagtgtttacaggatgtccttctgaagggtagtcctttgtaaagctgtacagactttgcagtttaagcacaatgtgcacatgttagttttatatacagcaaaacttgattttttgcagatggaaaggtattttgtttctatacaaagtaaatggattgtttgtgcttaatgtaaagccgctttataaaactgtaaaataaagtttttttcttaaaaag

SEQ ID NO: 2230 - DNA, 813 bp, Homo Sapiens
cccttgagacttaagctataggaggaaccagacgttcctcacctaggctaccagcaaagccgatggtcagactacttagaatctactaggaggagacgcgtcatattaggctacggacaggcaacggtgggctttgacgcagttagccaaattcaaaatgactcttggaaaagtgtgttgatagcattcacttggaagaggaaaagaaaaactttccccgaacaacaattaaggatcaattaatctgctgaccctgactcctctgatccacaaacatgttgcaccgtctcatcactgaagggtgagccgctcctcagtctgtgagtctgcagtggacagcacgcatgagaggcagactctgaacctgcacaaaagccagagccttgggtgatgtggggacctcgcaagagttactgggaatggagatcctggccttgggacagagggagtggggctgcacaggagtccccatcatcctggtggtgggggagcctatgtaggaagtcaagaagtctcttcagcacaaaccagttaaggcgaggggctcttacctggcctgactgctgggggtgggggtgggggtcacccctgactgattggccaggcagccacggagctttgtgaggtcactaggcttgcaggccaggcagtgccaggagtatggttgagatgctaccaactgccattctgctggtcttggcagtgtccgtggttgctaaagataacgccacgtgtgagtaagtgtcggggcaccttggtgggggaaggatcttctgaggagcaggtaccacacatgtggaggcagcttgctga

SEQ ID NO: 2231 - DNA, 293 bp, Homo Sapiens
  misc_feature (99)..(99): n is a, c, g, or t
  misc_feature (145)..(145): n is a, c, g, or t
ctttgcagataaatatggcacactagccccacgttttctgagacattcctcaattgcttagacatattctgagcctacagcagaggaacctccagtctnagcaccatgaatcaaactgccattctgatttgctgccttatctttntgactctaagtggcattcaaggagtacctctctctagaactgtacgctgtacctgcatcagcattagtaatcaacctgttaatccaaggtctttagaaaaacttgaaattattcctgcaagccaatttttgtccacgtggttgagatc

SEQ ID NO: 2232 - DNA, 701 bp, Homo Sapiens
tgtgaatcggccgaggcaggagcgtgtcagccaaagcatggagaatcaagagaaggcgagtatcgcgggccacatgttcgacgtagtcgtgatcggaggtggcatttcaggactatctgctgccaaactcttgactgaatatggcgttagtgttttggttttagaagctcgggacagggttggaggaagaacatatactataaggaatgagcatgttgattacgtagatgttggtggagcttatgtgggaccaacccaaaacagaatcttacgcttgtctaaggagctgggcatagagacttacaaagtgaatgtcagtgagcgtctcgttcaatatgtcaaggggaaaacatatccatttcggggcgcctttccaccagtatggaatcccattgcatatttggattacaataatctgtggaggacaatagataacatggggaaggagattccaactgatgcaccctgggaggctcaacatgctgacaaatgggacaaaatgaccatgaaagagctcattgacaaaatctgctggacaaagactgctaggcggttgcttatcttttgtgaatatcaatgtgacctctgagcctcacgaagtgtctgccctgtggttcttgtggtatgtgaagcagtgcgggggcaccactcggatattctctgtcacaatggtggccaggacggaagttgaggtgggaacg

SEQ ID NO: 2233 - DNA, 121 bp, Homo Sapiens
gctccagtatataaatcaggcaaattccccatttgagcatgaacctctgaaaactgccggcatctgaggtttcctccaaggccctctgaagtgcagcccataatgaaggtcttggcggcag

SEQ ID NO: 2234 - DNA, 447 bp, Homo Sapiens
cactttgggaggctaagaatcacttgagactaggagttcaagatcagcctgggaaacatagtgagaccccgtctctacaaaaaatataaaaattagttaggtgtggtggcatgcacttgtagtcccagctactcaagaggctgaggcagaaggatcccttgagcccaggagtgcaaggctgcaatgagccaggatcccatgatcacacatctgtattccagcctgggcaatagagcaagtccccattactaatgaacccaaaaggccaaatgactggaaagttagagttcgaggaattaccaactgtagttttagccttggttcatgctctcttgcatatttatataatctctgacttgtaatggaccctgactggaatgtgatccctcaggaacttagtagcctgagtctttcagtagactacactgcccagaaccctggccattc

SEQ ID NO: 2235 - DNA, 411 bp, Homo Sapiens
  misc_feature (354)..(354): n is a, c, g, or t
  misc_feature (370)..(370): n is a, c, g, or t
  misc_feature (405)..(405): n is a, c, g, or t
atttttatgaaacaaaagagcatttcttcaggtttctattgtattttttttaacattcttgcagagaaagcaagatccaaattgattttgggatattaaaagttaacagaacactgaacaaggaaagaatggcatagatctatctttacagtctggagttaattcctgttaactcattttatccattccttacataatcttctttcctgttagtccagtttgatggtgtgaatggtgaatttcaggcccagttgctaaattttgtggcatcttcctctagtccttcccacctccagtcatcagccccactctgtcttgggagacaggcagggaggtggggggaagagctggaantctctttattttcccngggtaggagacatcttccaaggcatggaattagcnttaaag

SEQ ID NO: 2236 - DNA, 244 bp, Homo Sapiens
  misc_feature (105)..(105): n is a, c, g, or t
  misc_feature (177)..(177): n is a, c, g, or t
  misc_feature (222)..(222): n is a, c, g, or t
gggagctggacgagtccgagcgcgtcacctcctcacgctgcggctgtcgccgtgtcccgccggcccgttccgtgtcgccccgcagtgctgcgccgccgcggaccnatggctgtgtttgtcgtgctcctggcgttggtggcgggtgttttggggaacgagtttagtatattaaaatcncagggtctgttgttttccgaaatggaaattggcctataccagganagcggatcccaaacgtggttga

SEQ ID NO: 2237 - DNA, 2260 bp, Homo Sapiens
atggcaaagagggaggacagccctggcccagaggtccagccaatggacaagcagttcttggtatgcagcatctgcctggatcggtaccagtgccccaaggttcttccttgcctgcacaccttctgtgagagatgtctccaaaactatatccctgcccagagcctgacgctatcctgtccagtatgccggcagacgtccatcctcccagagcagggcgtctcggcactgcagaacaacttcttcatcagcagcctcatggaggcaatgcagcaggcacctgatggggcccacgacccggaagacccccaccccctcagtgtagtggctggccgccctttctcctgccccaaccatgaaggcaagacgatggagttttactgtgaggcctgtgagacggccatgtgtggtgagtgccgcgccggggagcatcgtgagcatggcacagtgctgctgagggatgtggtggagcagcacaaggcggccctgcagcgccagctcgaggctgtgcgtggccgattgccacagctgtccgcagcaattgccttagtcgggggcatcagccagcagctgcaggagcgcaaggcagaggccctggcccagatcagtgcagcgttcgaggacctggagcaagcactgcagcagcgcaagcaggctctggtcagcgacctggagaccatttgtggggccaaacagaaggtgttgcaaacccagctggacacactgcgccagggtcaggaacacatcggcagtagctgcagctttgcagagcaggcactgcgcctgggctcggccccggaggtgttgctggtgcgcaagcacatgcgagagcggctggctgcattggcggcacaggccttcccggagcggccacatgagaatgcacagctggaactggtccttgaggtggacggtctgcggcgatcggtgctcaatctgggtgcactgctcaccacgagcgccactgcacacgaaacggtggccacgggagagggcctgcgccaggcgctagtgggccagcctgcctcgctcactgtcactgccaaagacaaggacgggcggttggtgcgcacaggcagcgctgagctgcgtgcagagatcaccggcccggacggcacgcgccttccggtgccagtggtggaccacaagaatggcacatatgagctagtgtacacagcgcgcacggaaggcgagctgctcctctcggtgctgctctacggacagccagtgcgcggcagccccttccgcgtgcgtgccctgcgtccgggggacctgccaccttccccggacgatgtgaagcgccgtgtcaagtcccctggcggccccggcagccatgtgcgccagaaggcagtgcgtaggcccagctccatgtacagcacaggcggcaaacgaaaggacaacccaattgaggatgagctcgtcttccgtgttggcagtcgtggaagggagaaaggtgaattcaccaatttacaaggtgtgtccgcagccagcagcggccgcatcgtggtagcagacagcaacaaccagtgtattcaggttttctccaatgagggccagttcaagttccgttttggggtccgaggacgctcacctgggcagctgcagcgccccacaggtgtggcagtggacaccaatggagacataattgtggcagactatgacaaccgttgggtcagcatcttctcccctgagggcaagttcaagaccaagattggagctggccgcctcatgggccccaagggagtggccgtagaccggaatggacatatcattgtggtcgacaacaagtcttgctgcgtctttaccttccagcccaatggcaaactggttggccgttttgggggccgtggggccactgaccgccactttgcagggccccattttgtggctgtaagcaacaagaatgaagttgtagtaacggacttccataaccattcagagaaggtgtacagtgccgatggagagttcctcttcaagtttggctcccatggcgagggcaatgggcagttcaatgcccccacaggagtagctgtggactccaatggaaacatcattgtggctgactggggcaacagccgcatccaggtattcgacagctctggctccttcctgtcctatatcaacacatctgcagaaccactgtatggtccacagggcctggcactgacctcggatggccatgtggtggtggctgatgctggcaaccactgctttaaagcctatcgctacctccagtagctgtacagaggccctgcctggcttg

SEQ ID NO: 2238 - DNA, 514 bp, Homo Sapiens
tttaaatatttggaattggttttataatgccttgaatttgtggctctttaaagtttatttgagaattacatactcttaaaaatttgttgaaagctatagacccttgctggcctccgaaaaatttgtatctatacataagacaattttgcatgcagttttcaggagattcacaaaccctctgaaatccacatacctcagaattagaactagtcttacacattatattggtttttgctgcagagcattgttgaagcattctattatctctggctgaagatggtatataccttccttggtagttgaatgttaactcagatggacgtgttcctctttcttctacacttacttttcttacctatgtacatttttttattaaaaatgcccatgtttatagagaggtctatttctgtatgtcttgtgtctgttgcattagtgtgtccaacttaaatattaagctcccagatgcagtgccagcatcttattatatgtaatgttcagaacagtgcaatgtcta

SEQ ID NO: 2239 - DNA, 443 bp, Homo Sapiens
ttttttttttttttttttttttttttttttaaagagcttctaacagcttctgtccatttattggttggatgacaaatgaaaaaatttctttggccttgacaatctccatcaaagaaaccaaataagcatgttaaggaaacatacagtatatgaacagttaattcttgtattgcttggacatcaataaatctaataaaaacgaccaagaatagtcactcagttttacaatatagaaggcagagaaaactctgacactccaagttgtgaagacaatgaaacattccagtactccattagaggactttttgtatctacagctgcctgtgctttgaaggtaaaaacccagaatttaaattcaaacatattcagttaatgcacttatgcattttacaaatttttgttctggtatagcatatgaaagggagctatatctgcccccattt

SEQ ID NO: 2240 - DNA, 489 bp, Homo Sapiens
aattcggaacgaggttttagctgttcttaggtagctcaggctgaagcgcagtggctgtgagctcggcttactgcaagctccacctcccgggttcacgccattctcctacctcagcctcccgagtagctgggactataggcacccgccaccatgcccggctaatttttgtatctttagtagagacggggtttcactgtgttagctaggatggtcttgatctcctgaccttgtgatccgcccaccttggcctcccaaggtactgcgattacaggcatgagctaccatgcccggccacaagacatagattttctatatgcacatcaagggaggtgctggtttaggttgctataggacagagctatcctgtattccagttggtttttgtagagaaacaattagacttctctagatagagccctgatttttctctcacgctttcagttttttaaaagcactaatgatatttcctgttttctcataagaaaaagt

SEQ ID NO: 2241 - DNA, 309 bp, Homo Sapiens
ctctcaataggaaagagaagtaattcaagaaagaaatagaaacttcaggcagaacatccattcattcattcattggattgtatatcattgttgcacaatcagaattgataagcactgttcttccactccatttagcaattatgtcacccttttttattgcagttggtttttgaatgtctttcactccttttaaggataaactcctttatggtgtgactgtgtcttattcatctatacttgcagtgggtagatgtcaataaatgttacatacacaaataaataaaatgtttattccatggtaaatttatt

SEQ ID NO: 2242 - DNA, 502 bp, Homo Sapiens
gcctactactactactaaatttgcggccgcgtcgacaaggagtcctgcttatcacaatgaatgttctcctgggcagcgttgtgatctttgccaccttcgtgactttatgcaatgcatcatgctatttcatacctaatgagggagttccaggagattcaaccaggaaatgcatggatctcaaaggaaacaaacacccaataaactcggagtggcagactgacaactgtgagacatgcacttgctacgaaacagaaatttcatgttgcacccttgtttctacacctgtgggttatgacaaagacaactgccaaagaatcttcaagaaggaggactgcaagtatatcgtggtggagaagaaggacccaaaaaagacctgttctgtcagtgaatggataatctaatgtgcttctagtaggcacaggggctcccaggccaggctcagtctcctctggcctccaatagtccatggttgtggtaggccggccgatcagttaaaaaaatt

SEQ ID NO: 2243 - DNA, 3615 bp, Homo Sapiens
ggggcgagagggggcggagcgtggaggcggcagctggaaccgcgcagcgcacgggaacgcgtcccgctgcttgggtcaggttcgccggtcgcgggagccccgccgtgcagtcggaagggtgtcactgtgagtggtgcttcctcagcccctgtcaaaaagcagtttccaccatcctggagtgtggaacacgtggccatcagtaatcatgagcaacccattcgcacaccttgctgagcacattggatcctgtacaaccaggaaagaaattcttcaatttgaataaattggaggattcaagatatgggcgcttaccattttcgatcagagttcttctggaagcagccattcggaattgtgatgagtttttggtgaagaaacaggatattgaaaatattctacattggaatgtcactcagcacaagaacatagaagtgccatttaagcctgctcgtgtcatcctgcaggactttacgggtgtgcccgctgtggttgactttgctgcaatgcgtgatgctgtgaaaaagttaggaggagatccagagaaaataaaccctgtctgccctgctgatcttgtaatagatcattccatccaggttgatttcaacagaagggcagacagtttacagaagaatcaagacctggaatttgaaagaaatagagagcgatttgaatttttaaagtggggttcccaggcttttcacaacatgcggattattccccctggctcaggaatcatccaccaggtgaatttggaatatttggcaagagtggtatttgatcaggatggatattattacccagacagcctcgtgggcacagactcgcacactaccatgattgatggcttgggcattcttggttggggtgtcggtggtattgaagcagaagctgtcatgctgggtcagccaatcagtatggtgcttcctcaggtgattggctacaggctgatggggaagccccaccctctggtaacatccactgacatcgtgctcaccattaccaagcacctccgccaggttggggtagtgggcaaatttgtcgagttcttcgggcctggagtagcccagttgtccattgctgaccgagctacgattgctaacatgtgtccagagtacggagcaactgctgcctttttcccagttgatgaagttagtatcacgtacctggtgcaaacaggtcgtgatgaagaaaaattaaagtatattaaaaaatatcttcaggctgtaggaatgtttcgagatttcaatgacccttctcaagacccagacttcacccaggttgtggaattagatttgaaaacagtagtgccttgctgtagtggacccaaaaggcctcaggacaaagttgctgtgtccgacatgaaaaaggactttgagagctgccttggagccaagcaaggatttaaaggattccaagttgctcctgaacatcataatgaccataagacctttatctatgataacactgaattcacccttgctcatggttctgtggtcattgctgccattactagctgcacaaacaccagtaatccgtctgtgatgttaggggcaggattgttagcaaagaaagctgtggatgctggcctgaacgtgatgccttacatcaaaactagcctgtctcctgggagtggcgtggtcacctactacctacaagaaagcggagtcatgccttatctgtctcagcttgggtttgacgtggtgggctatggctgcatgacctgcattggcaacagtgggcctttacctgaacctgtggtagaagccatcacacagggagaccttgtagctgttggagtactatctggaaacaggaattttgaaggtcgagttcaccccaacacccgggccaactatttagcctctccccccttagtaatagcatatgcaattgctggaaccatcagaatcgactttgagaaagagccattgggagtaaatgcaaagggacagcaggtatttctgaaagatatctggccgactagagacgagatccaggcagtggagcgtcagtatgtcatcccggggatgtttaaggaagtctatcagaaaatagagactgtgaatgaaagctggaatgccttagcaaccccatcagataagctgtttttctggaattccaaatctacgtatatcaaatcaccaccattctttgaaaacctgactttggatcttcagccccctaaatctatagtggatgcctatgtgctgctaaatttgggagattcggtaacaactgaccacatctccccagctggaaatattgcaagaaacagtcctgctgctcgctacttaactaacagaggcctaactccacgagaattcaactcctatggctcccgccgaggtaatgacgccgtcatggcacggggaacatttgccaacattcgcttgttaaacagatttttgaacaagcaggcaccacagactatccatctgccttctggggaaatccttgatgtgtttgatgctgctgagcggtaccagcaggcaggccttcccctgatcgttctggctggcaaagagtacggtgcaggcagctcccgagactgggcagctaagggccctttcctgctgggaatcaaagccgtcctggccgagagctacgagcgcattcaccgcagtaacctggttgggatgggtgtgatcccacttgaatatctccctggtgagaatgcagatgccctggggctcacagggcaagaacgatacactatcattattccagaaaacctcaaaccacaaatgaaagtccaggtcaagctggatactggcaagaccttccaggctgtcatgaggtttgacactgatgtggagctcacttatttcctcaacgggggcatcctcaactacatgatccgcaagatggccaagtaggagacgtgcacttggtcgtgcgcccagggaggaagccgcaccaccagccagcgcaggccctggtggagaggcctccctggctgcctctgggaggggtgctgccttgtagatggagcaagtgagcactgagggtctggtgccaatcctgtaggcacaaaaccagaagtttctacattctctatttttgttaatcatcttctctttttccagaatttggaagctagaatggtgggaatgtcagtagtgccagaaagagagaaccaagcttgtctttaaagttactgatcacaggacgttgctttttcactgtttcctattaatcttcagctgaacacaagcaaaccttctcaggaggtgtctcctaccctcttattgttcctcttacgctctgctcaatgaaaccttcctcttgagggtcattttcctttctgtattaattataccagtgttaagtgacatagataagaactttgcacacttcaaatcagagcagtgattctctcttctctccccttttccttcagagtgaatcatccagactcctcatggataggtcgggtgttaaagttgttttgattatgtaccttttgatagatccacataaaaagaaatgtgaagttttcttttactatcttttcatttatcaagcagagacctttgttgggaggcggtttgggagaacacatttctaatttgaatgaaatgaaatctattttcagtgaaaaaaaaaaaaaaaaaa

SEQ ID NO: 2244 - DNA, 393 bp, Homo Sapiens
tttttttcccacttacagcaagtaaaagtggcctgaggttatccttgtttttcttcgcggtttgccatgtgtgaaagtagatttcctgctattgatatattctcattatagacagaatagtggagaacagtgttgccatggacaaaatccagttttggtccactctggggagcatttggacctgtggtgcttctaacaattaaaagtctagatggtccttgactgtcccccagccatactgcatactactttgtgcattctactttgtgtcattaatgaaagattggttctgtccctgtaacttaggcatttattattcttaactcctcattcctgttctgtagccacccagcagtccattttccctatgttcaggccaaaccacagggcttg

SEQ ID NO: 2245 - DNA, 267 bp, Homo Sapiens
tgccagtctgtgtggcctggggagtcaggcgccaccgttgagttgggcatgtttatggctggcccagggtggatcctgtctctgtcctctggcacctgggggcacagtgtccctgctccagagagcctgtatcagtggtttagtggtttttgagggtactgtggcccccttggctgaggttctgctctcagacgccccagaggatggccttttgctggaagagccccagaaggggactccagacataacgtgattagaggtatcaga

SEQ ID NO: 2246 - DNA, 393 bp, Homo Sapiens
  misc_feature (136)..(136): n is a, c, g, or t
  misc_feature (328)..(328): n is a, c, g, or t
  misc_feature (339)..(339): n is a, c, g, or t
  misc_feature (346)..(346): n is a, c, g, or t
  misc_feature (352)..(352): n is a, c, g, or t
  misc_feature (357)..(357): n is a, c, g, or t
  misc_feature (381)..(381): n is a, c, g, or t
tttttttttcgttagaatttttttattaagtacatcaaaatttcaccttacatttgaaattgcatagaaatttaaagtgctaaagcaatcattgttttttcaaaaaaatgaatttgaagccaaagagtggagagtntggggatccactgggtaggacatttgagatgtatgcaatgtaggaatcttatttgaatcctgacttgaattggaaaaaaaaaaaaaaaggcacaacttgaacactgctgggtagttattaacactaacaaactgttaacagttaagtctaacaacagatttgtgggttttatttaacagtccttatcttttnggacatacatnttggaantatttnccaantggaaatgatttgctatctggggntttgcttccaaa

SEQ ID NO: 2247 - DNA, 1104 bp, Homo Sapiens
cctgctctgtagagccggcggcaaccgggtagcttggccaggttgtgaggaaccgcagcgcccgcaggaccgggccgctgagcctgcagccgccccgcgccgtgacctgcgaccctagaccccgactaccctttggctcagcccgcgcgccccaggcccggcccgggcggcgcgacgggaggatgagcggcgggcggcggaaggaggagccgcctcagccgcagctggccaacggggccctcaaagtctccgtctggagtaaggtgctgcggagcgacgcggcctgggaggataaggatgaatttttagatgtgatctactggttccgacagatcattgctgtggtcctgggtgtcatttggggagttttgccattacgagggttcttgggaatagcaggattctgcctgatcaatgcaggagtcctgtacctctacttcagcaattacctacagattgatgaggaagaatatggtggcacgtgggagctcacgaaggaagggtttatgacctcttttgccttgttcatggtcatttggatcatcttttacactgccatccattatgactgatggtgtacagctcccaagtgctccctatccagtccaaaggaccctcttgattacagcacaggaacttgatcgttggggaaccccagccccttggaacttggaagacccgtgtttcctggaccgcgaatcagtgtgttgggcatcagtgttttctgcaagggttgtgacctgaaactttttaaaaaccacccacctttggggaagcatttctgaatttatccatcaccaaccatttcttcttggataccatcaagtaacagctattatttgccaagtggagctgtcatttaatttgatgcacctctggattcagatgaaacattaaattgtcttcctcgattctccatcgggtgtagagtttttaaactatcaatggcatttcaagtcttctgaaacagcatggctgtatgtgcgtggtccatagcacagtacatgcagcatctaataagagtttccattgtagaatgttttcacatacttgaataaatcaaatctttaattgagaaaaaaaaaaaaaaaaaaaaaaaaaaaa

SEQ ID NO: 2248 - DNA, 434 bp, Homo Sapiens
  misc_feature (7)..(7): n is a, c, g, or t
  misc_feature (21)..(21): n is a, c, g, or t
  misc_feature (88)..(88): n is a, c, g, or t
  misc_feature (337)..(337): n is a, c, g, or t
  misc_feature (403)..(403): n is a, c, g, or t
  misc_feature (414)..(414): n is a, c, g, or t
cgacagngacgcccaggcccnaaatgagccgtcagactgctacagcattacctaccggtacctcgaagtgtccaccatcccagaggtngcctgccctgactggcacaactgcatccaacaatgacttggcgagtctttttgagtgtccagtctgctttgactatgtgttaccgcccattcttcaatgtcagagtggccatcttgtttgtagcaactgtcgcccaaagctcacatgttgtccaacttgccggggccctttgggatccattcgcaacttggctatggagaaagtggctaattcagtacttttcccctgtaaatatgcgtcttctgggangtgaaataactctggccacacacagaaaaagcagaccatgaaggagcttctgtggagttttagggnctttattttcntgttcccgtggccctggggt

SEQ ID NO: 2249 - DNA, 355 bp, Homo Sapiens
tcaaaaacaacacaattaattatactcttttattgaaagaaaaaacaatacaatggactttaaaaagctacatttgttatggttcataaggacagaggtttacacaggttttatatatgtacacactcacaatactatatcacaacatcagaggcaccatttttgccacagaattaggtaatgaataaaacttctccaaattaatctgtttaaaaaatatctaaaatggtacagtatatttgaggattatataaatatgtgagacatatttagatattttttaaaaatagtgtttatatatatgcatcacaatcttctctaattctcaaaatattatggcaccaaaatttctgtt

SEQ ID NO: 2250 - DNA, 1667 bp, Homo Sapiens
aagcacaggccaccactctgccctggtccacacaagctccggtagcccatggagccctggcctctcctcctgctctttagcctttgctcagctggcctcgtcctgggctccgaacatgagacccgtctggtggcaaagctatttaaagactacagcagcgtggtgcggccagtggaagaccaccgccaggtcgtggaggtcaccgtgggcctgcagctgatacagctcatcaatgtggatgaagtaaatcagatcgtgacaaccaatgtgcgtctgaaacagcaatgggtggattacaacctaaaatggaatccagatgactatggcggtgtgaaaaaaattcacattccttcagaaaagatctggcgcccagaccttgttctctataacaatgcagatggtgactttgctattgtcaagttcaccaaagtgctcctgcagtacactggccacatcacgtggacacctccagccatctttaaaagctactgtgagatcatcgtcacccactttccctttgatgaacagaactgcagcatgaagctgggcacctggacctacgacggctctgtcgtggccatcaacccggaaagcgaccagccagacctgagcaacttcatggagagcggggagtgggtgatcaaggagtcccggggctggaagcactccgtgacctattcctgctgccccgacaccccctacctggacatcacctaccacttcgtcatgcagcgcctgcccctctacttcatcgtcaacgtcatcatcccctgcctgctcttctccttcttaactggcctggtattctacctgcccacagactcaggggagaagatgactctgagcatctctgtcttactgtctttgactgtgttccttctggtcatcgtggagctgatcccctccacgtccagtgctgtgcccttgattggaaaatacatgctgttcaccatggtgttcgtcattgcctccatcatcatcactgtcatcgtcatcaacacacaccaccgctcacccagcacccatgtcatgcccaactgggtgcggaaggtttttatcgacactatcccaaatatcatgtttttctccacaatgaaaagaccatccagagaaaagcaagacaaaaagatttttacagaagacattgatatctctgacatttctggaaagccagggcctccacccatgggcttccactctcccctgatcaaacaccccgaggtgaaaagtgccatcgagggcatcaagtacatcgcagagaccatgaagtcagaccaggagtctaacaatgcggcggcagagtggaagtacgttgcaatggtgatggaccacatactcctcggagtcttcatgcttgtttgcatcatcggaaccctagccgtgtttgcaggtcgactcattgaattaaatcagcaaggatgagcagaaaatgagctgagcttagctctgccctggaacctaccagagcagagaagggcaggagaggaagatttgtctacttgctccactcgcacttatcaaacgtgttatattccatacttattattgatgataagatttacctttatgtaagtttatggccttgaagtgttttcatattgcttctccctttagttctgctgtctccctgaagagtgaaccctctttagtaaatgaaactaatcact

SEQ ID NO: 2251 - DNA, 379 bp, Homo Sapiens
tttttttttttttttttaccatttgaccatgttatattttaatttgcagagacaaaaatgacaagcaatttatttacataaaactgtacaaaagcaaattaaattatgcaaagtatttcataaatagttggacgagtgtttaatacatttcgccatgttaagcatagttgcgtgcatagtgactcataataaacgatgataaattgttctctgcttcactatcaacatccaagtagcagaacaatagtcaatgattaacattacaaacagatcgtaccacactgaacgcaagtgctttaaactgtaggaaaagtctgaaagtaaaccctaggtagctgaacaaatgatgcttcctccagatgttatcattacaccttca

SEQ ID NO: 2252 - DNA, 475 bp, Homo Sapiens
tttttttcggtcaaataaatttttttttttttaaaaagaaaagaaacgaaaacaacctctatcttctggactgtaatagggtgtcacttcatctttggtataaaataggccatccataggctgaatttgatcacaactaggaaagactacagaaattgtcaacaatttctctatctattgctttttttttgtttttttttttgcactttttgaccataagctcctatctacttaagtttttttttttaatgctcttaagctaggttttgcaatgtgacaagcaaagctgactaaaaactttgtaaagctcataaaaaagactgcagataaaaagcactaatgcttttgctagcgatcacgctttgtaaattaaaaaaatctgcattctgccccccaaacacgcattatttctaatgcagttgtttttaaaccaaccttaataactttactgtaaaatgttttagccttttagaaa

SEQ ID NO: 2253 - DNA, 2899 bp, Homo Sapiens
aaaaaaaaaagtacgcggacaagatggcggcggcagcagtcgacagcgcgatggaggtggtgccggcgctggcggaggaggccgcgccggaggtagcgggcctcagctgcctcgtcaacctgccgggtgaggtgctggagtacatcctgtgctgcggctcgctgacggccgccgacatcggccgtgtctccagcacctgccggcggctgcgcgagctgtgccagagcagcgggaaggtgtggaaggagcagttccgggtgaggtggccttcccttatgaaacactacagccccaccgactacgtcaattggttggaagagtataaagttcggcaaaaagctgggttagaagcgcggaagattgtagcctcgttctcaaagaggttcttttcagagcacgttccttgtaatggcttcagtgacattgagaaccttgaaggaccagagattttttttgaggatgaactggtgtgtatcctaaatatggaaggaagaaaagctttgacctggaaatactacgcaaaaaaaattctttactacctgcggcaacagaagatcttaaataatcttaaggcctttcttcagcagccagatgactatgagtcgtatcttgaaggtgctgtatatattgaccagtactgcaatcctctctccgacatcagcctcaaagacatccaggcccaaattgacagcatcgtggagcttgtttgcaaaacccttcggggcataaacagtcgccaccccagcttggccttcaaggcaggtgaatcatccatgataatggaaatagaactccagagccaggtgctggatgccatgaactatgtcctttacgaccaactgaagttcaaggggaatcgaatggattactataatgccctcaacttatatatgcatcaggttttgattcgcagaacaggaatcccaatcagcatgtctctgctctatttgacaattgctcggcagttgggagtcccactggagcctgtcaacttcccaagtcacttcttattaaggtggtgccaaggcgcagaaggggcgaccctggacatctttgactacatctacatagatgcttttgggaaaggcaagcagctgacagtgaaagaatgcgagtacttgatcggccagcacgtgactgcagcactgtatggggtggtcaatgtcaagaaggtgttacagagaatggtgggaaacctgttaagcctggggaagcgggaaggcatcgaccagtcataccagctcctgagagactcgctggatctctatctggcaatgtacccggaccaggtgcagcttctcctcctccaagccaggctttacttccacctgggaatctggccagagaaggtgcttgacatcctccagcacatccaaaccctagacccggggcagcacggggcggtgggctacctggtgcagcacactctagagcacattgagcgcaaaaaggaggaggtgggcgtagaggtgaagctgcgctccgatgagaagcacagagatgtctgctactccatcgggctcattatgaagcataagaggtatggctataactgtgtgatctacggctgggaccccacctgcatgatgggacacgagtggatccggaacatgaacgtccacagcctgccgcacggccaccaccagcctttctataacgtgctggtggaggacggctcctgtcgatacgcagcccaagaaaacttggaatataacgtggagcctcaagaaatctcacaccctgacgtgggacgctatttctcagagtttactggcactcactacatcccaaacgcagagctggagatccggtatccagaagatctggagtttgtctatgaaacggtgcagaatatttacagtgcaaagaaagagaacatagatgagtaaagtctagagaggacattgcacctttgctgctgctgctatcttccaagagaacgagactccggaagaagacgtctccacggagccctcgggacctgctgcaccaggaaagccactccaccagtagtgctggttgcctcctactaagtttaaataccgtgtgctcttccccagctgcaaagacaatgttgctctccgcctacactagtgaattaatctgaaaggcactgtgtcagtggcatggcttgtatgcttgtcctgtggtgacagtttgtgacattctgtcttcatgaggtctcacagtcgacgctcctgtaatcattctttgtattcactccattcccctgtctgtctgcatttgtctcagaacatttccttggctggacagatggggttatgcatttgcaataatttccttctgatttctctgtggaacgtgttcggtcccgagtgaggactgtgtgtctttttaccctgaagttagttgcatattcagaggtaaagttgtgtgctatcttggcagcatcttagagatggagacattaacaagctaatggtaattagaatcatttgaatttatttttttctaatatgtgaaacacagatttcaagtgttttatctttttttttttaaatttaaatgggaatataacacagttttcccttccatattcctctcttgagtttatgcacatctctataaatcattagttttctattttattacataaaattcttttagaaaatgcaaatagtgaactttgtgaatggatttttccatactcatctacaattcctccattttaaatgactacttttattttttaatttaaaaaatctacttcagtatcatgagtaggtcttacatcagtgatgggttctttttgtagtgagacatacaaatctgatgttaatgtttgctcttagaagtcatactccatggtcttcaaagaccaaaaaaatgaggttttgcttttgtaatcaggaaaaaaaaaaattaatgaaccttaaag

SEQ ID NO: 2254 - DNA, 268 bp, Homo Sapiens
gacgccgcgcggggcggggattggtctgtggtcctctctcggctcctcgcggctcgcggcggccgacggttcctgggacacctgcttgcttggcccgtccggcggctcagggcttctctgctgcgctcccggttcgctggacgggaagaagggctgggccgtcccgtcccgtccccatcggaaccccaagtcgcgccgctgacccgtcgcagggcgagatgagcgcggacgcagcggccggggcgcccctgccccggctctgctgcct

SEQ ID NO: 2255 - DNA, 596 bp, Homo Sapiens
  misc_feature (21)..(21): n is a, c, g, or t
  misc_feature (390)..(390): n is a, c, g, or t
  misc_feature (424)..(424): n is a, c, g, or t
  misc_feature (462)..(462): n is a, c, g, or t
  misc_feature (467)..(467): n is a, c, g, or t
  misc_feature (485)..(485): n is a, c, g, or t
  misc_feature (508)..(509): n is a, c, g, or t
  misc_feature (595)..(595): n is a, c, g, or t
cccactactttctgcgagaanacgacagaatggggggtgttggaggctttaaggtagctttaaattcgtgttgtcctgggagctcgcccttttcggctggagtcgggctttacggcgccggatggctctggacgtgaagtctcgggcaaagcgttatgagaagctggacttccttggggagggacagtttgccaccgtttacaaggccagagataagaataccaaccaaattgtcgccattaagaaaatcaaacttggacatagatcagaagctaaagatggtataaatagaaccgccttaagagagataaaattattacaggagctaagtcatccaaatataattggtctccttgatgcttttggacataaatctaatattagccttgnctttgattttatggaaactgatctagaggttatnataaaggataatagtcttgtgcctgacacccatcacancattnaaagccctacatgttgantgactctttcaaggattagaaanntttccatcaacattggatcctacataggggatctgaaaccaacaacttgttgctagatggaaaatgggagtttctaaaaactggcnc

SEQ ID NO: 2256 - DNA, 576 bp, Homo Sapiens
ttaatatagacaaggccatgccaggtggcccaactgatcgtgctggaagtgtttccctccagtgaagccctccgccctttgtacaccctgggcatcgaagccagctcggaagctcagttttacaccaaaggtgaccaacttatactcaacttgaataaacatcagctctgatcggatccagctgatgaactctgggataggctggttccaacctgatgttctgaaaaacatcatcactgagatcatccactccatcctgctgccgaaccagaatggcaaattaagatctggggtcccagtgtcattggtgaagggcttgggattcgtggcagctgagtcctcactgaccaaggattgcccttgtgctttactccagcctccttgtggaaacccagctctcctgtctcccagtgaagacttggatgggcagccatcagggaaggctgggtcccagctgggagttatgggtgtgagcctccaatagacaattccctctcggcaatcagcttagcttgatggccaggttaacatgatacagtgatgttacatcagaatctgatcagttactaaagatat

SEQ ID NO: 2257 - DNA, 1334 bp, Homo Sapiens
cgccgcgtgcgcctgcagacgctccgctcgctgccttctctcctggcaggcgctgccttttctccccgttaaagggcacttgggctgaaggatcgctttgagatctgaggaacccgcagcgctttgagggacctgaagctgtttttcttcgttttcctttgggttcagtttgaacgggaggtttttgatccctttttttcagaatggattatttgctcatgattttctctctgctgtttgtggcttgccaaggagctccagaaacagcagtcttaggcgctgagctcagcgcggtgggtgagaacggcggggagaaacccactcccagtccaccctggcggctccgccggtccaagcgctgctcctgctcgtccctgatggataaagagtgtgtctacttctgccacctggacatcatttgggtcaacactcccgagcacgttgttccgtatggacttggaagccctaggtccaagagagccttggagaatttacttcccacaaaggcaacagaccgtgagaatagatgccaatgtgctagccaaaaagacaagaagtgctggaatttttgccaagcaggaaaagaactcagggctgaagacattatggagaaagactggaataatcataagaaaggaaaagactgttccaagcttgggaaaaagtgtatttatcagcagttagtgagaggaagaaaaatcagaagaagttcagaggaacacctaagacaaaccaggtcggagaccatgagaaacagcgtcaaatcatcttttcatgatcccaagctgaaaggcaatccctccagagagcgttatgtgacccacaaccgagcacattggtgacagaccttcggggcctgtctgaagccatagcctccacggagagccctgtggccgactctgcactctccaccctggctgggatcagagcaggagcatcctctgctggttcctgactggcaaaggaccagcgtcctcgttcaaaacattccaagaaaggttaaggagttcccccaaccatcttcactggcttccatcagtggtaactgctttggtctcttctttcatctggggatgacaatggacctctcagcagaaacacacagtcacattcgaattcgggtggcatcctccggagagagagagaggaaggagattccacacaggggtggagtttctgacgaaggtcctaagggagtgtttgtgtctgactcaggcgcctggcacatttcagggagaaactccaaagtccacacaaagattttctaaggaatgcacaaattgaaaacacactcaaaagacaaacatgcaagtaaagaaaaaaaaaaaaaaaaa

SEQ ID NO: 2258 - DNA, 484 bp, Homo Sapiens
  misc_feature (145)..(145): n is a, c, g, or t
  misc_feature (432)..(432): n is a, c, g, or t
  misc_feature (457)..(457): n is a, c, g, or t
ttttttttttttacagaaacgagggaaaacactccctgatttttaatctgacttcgggtaacagctcaatgggcgtcacacacacttccaaaccctgtggtgggaaaccctgggagcgggtggaaggagaaggacagagactcanaatgggggtggagggacctgaaatccaaaacctgggttgaggtggaggcggaagggggcctgtcaggggatacattccaatggctcccacaggggagcagccaaaggcctgggctccgcccccccaccccaggtgcctcaaagttggtgatggggcatgtgaaatgctgccatccttcatccgctccctctggtgaaccagggggcaggggtgcaggagactaaaggggcaggccctctttgttaccctcccagccactctaaggtgtggggaaggggagccacctnctctgtgtcaaagggaggctcacanagggcaggtcacttgcccaaagtcctg

SEQ ID NO: 2259 - DNA, 2470 bp, Homo Sapiens
ttggcgggcggaagcggccacaacccggcgatcgaaaagattcttaggaacgccgtaccagccgcgtctctcaggacagcaggcccctgtccttctgtcgggcgccgctcagccgtgccctccgcccctcaggttctttttctaattccaaataaacttgcaagaggactatgaaagattatgatgaacttctcaaatattatgaattacatgaaactattgggacaggtggctttgcaaaggtcaaacttgcctgccatatccttactggagagatggtagctataaaaatcatggataaaaacacactagggagtgatttgccccggatcaaaacggagattgaggccttgaagaacctgagacatcagcatatatgtcaactctaccatgtgctagagacagccaacaaaatattcatggttcttgagtactgccctggaggagagctgtttgactatataatttcccaggatcgcctgtcagaagaggagacccgggttgtcttccgtcagatagtatctgctgttgcttatgtgcacagccagggctatgctcacagggacctcaagccagaaaatttgctgtttgatgaatatcataaattaaagctgattgactttggtctctgtgcaaaacccaagggtaacaaggattaccatctacagacatgctgtgggagtctggcttatgcagcacctgagttaatacaaggcaaatcatatcttggatcagaggcagatgtttggagcatgggcatactgttatatgttcttatgtgtggatttctaccatttgatgatgataatgtaatggctttatacaagaagattatgagaggaaaatatgatgttcccaagtggctctctcccagtagcattctgcttcttcaacaaatgctgcaggtggacccaaagaaacggatttctatgaaaaatctattgaaccatccctggatcatgcaagattacaactatcctgttgagtggcaaagcaagaatccttttattcacctcgatgatgattgcgtaacagaactttctgtacatcacagaaacaacaggcaaacaatggaggatttaatttcactgtggcagtatgatcacctcacggctacctatcttctgcttctagccaagaaggctcggggaaaaccagttcgtttaaggctttcttctttctcctgtggacaagccagtgctaccccattcacagacatcaagtcaaataattggagtctggaagatgtgaccgcaagtgataaaaattatgtggcgggattaatagactatgattggtgtgaagatgatttatcaacaggtgctgctactccccgaacatcacagtttaccaagtactggacagaatcaaatggggtggaatctaaatcattaactccagccttatgcagaacacctgcaaataaattaaagaacaaagaaaatgtatatactcctaagtctgctgtaaagaatgaagagtactttatgtttcctgagccaaagactccagttaataagaaccagcataagagagaaatactcactacgccaaatcgttacactacaccctcaaaagctagaaaccagtgcctgaaagaaactccaattaaaataccagtaaattcaacaggaacagacaagttaatgacaggtgtcattagccctgagaggcggtgccgctcagtggaattggatctcaaccaagcacatatggaggagactccaaaaagaaagggagccaaagtgtttgggagccttgaaagggggttggataaggttatcactgtgctcaccaggagcaaaaggaagggttctgccagagacgggcccagaagactaaagcttcactataatgtgactacaactagattagtgaatccagatcaactgttgaatgaaataatgtctattcttccaaagaagcatgttgactttgtacaaaagggttatacactgaagtgtcaaacacagtcagattttgggaaagtgacaatgcaatttgaattagaagtgtgccagcttcaaaaacccgatgtggtgggtatcaggaggcagcggcttaagggcgatgcctgggtttacaaaagattagtggaagacatcctatctagctgcaaggtataattgatggattcttccatcctgccggatgagtgtgggtgtgatacagcctacataaagactgttatgatcgctttgattttaaagttcattggaactaccaacttgtttctaaagagctatcttaagaccaatatctctttgtttttaaacaaaagatattattttgtgtatgaatctaaatcaagcccatctgtcattatgttactgtcttttttaatcatgtggttttgtatattaataattgttgactttcttagattcacttccatatgtgaatgtaagctcttaactatgtctctttgtaatgtgtaatttctttctgaaataaaaccatttgtgaatat

SEQ ID NO: 2260 - DNA, 600 bp, Homo Sapiens
tttaatttaggtgacactatagaagagctatgacgtcgcatgcacgcgtacgtaagcttggatcctctagagcggccgcctactactactaaattcgcggccgcgtcgactttttttttttttttttttttggagtaaataaatttttaataaccagtttcttggttacaacttcatctatataaatccccttattctaggatctacacagttaaacctaatatttcacagcacatttccaaaacagtacagtttttacactaagaaaaaaaaataaaaataaaagcctggttaccaccaaggtgtattgtccatgaattgaaaggctttcctatttaagtagcaggtacatgtgtaaatagggcaggcagcaacagaacagcaatattggagaactctttctttgtagtaaatgcccttgagtatgagatgtgacactgaagcaataaggccaattctttaaagcaaaaatggatactgatctcattgttttatagccatatcttgtggtatgtttataacgtatttctttcacatgttaaaacagtatctactaaagatgggcttaattttggtaaagtcaactgaaaaaagtttatg

SEQ ID NO: 2261 - DNA, 1475 bp, Homo Sapiens
gctttccagtggacctgggctgttgttgcggttgttttccttctctccgtgcaacgctggcaagtctcaaagtcgccacagaaacatgcccctgattcagtgcctctgcttagctgtaacatgttaatcagaactacctggcatcttcctgaacaagactttcaataggggccagtatgcttcgcttcatccagaagttttctcaagcatcttcaaagatactgaagtactctttcccagtgggactaagaaccagcagaacagatatactttctctcaagatgtctctccagcaaaacttttccccatgtccaaggccttggctttcctctcatttccagcgtatatgagcaagacacagtgctatcatacatccccctgcagctttaaaaagcagcagaagcaagcacttctagccagaccctcaagcaccatcacttacctaactgacagcccaaagccagcattatgtgtaactctggcaggactaatccccttcgttgctccaccactggtcatgctgatgacaaaaacttatattcccatattagcttttactcagatggcttatggagccagtttcctatctttcttgggtgggatcagatggggttttgctctaccagaaggtagtccagccaaaccagactaccttaatttagctagcagtgcagctcctcttttcttttcatggtttgccttccttatttctgaaagacttagtgaagccatagtcacagtaataatgggtatgggagtagcattccaccttgaactttttctcttaccacattatcccaactggtttaaagccctgaggatagtagtcactttattggccactttttcatttataatcactttagtagttaaaagtagttttccagaaaaaggacataagagacctggtcaagtataaaaaatataaaagtctgggaagtgaggagcacctctgcccagctgctgccccgtctgggaagtgaggagcgcctctgcctggccgcctgaccatctgggaagtgtgacaagcgcctctgcccggccgctgtgcaaccttccacgtgtgaagtgacagccttgtgtgtgatcttttctgtcttccccaagtttgcattttcgacattaaagtttactttttagttaaaagtttaaaaatatatatataaatacactgtagataacatttgtatgccagctacacctttttctacttctgtttggctttttttccccacaccaatggtaatttatcttcacagattgttcttcatttctagaaattgttacttcatggtaattacttgagcaaaagcttgaaaatccctgacaagtacttttcatctcatagtatattagttttcactcagtcattttatgaataatatagttatccacttaaacatttcaatattttaaccatcttgaaaattaaagattaaaaatccaaaaaaaaaaaaaaaaaaaaaaaaaaaaaa

SEQ ID NO: 2262 - DNA, 1450 bp, Homo Sapiens
ccaggcagcagttagcccgccgcccgcctgtgtgtccccagagccatggagagagccagtctgatccagaaggccaagctggcagagcaggccgaacgctatgaggacatggcagccttcccaggcagcagttagcccgccgcccgcctgtgtgtccccagagccatggagagagccagtctgatccagaaggccaagctggcagagcaggccgaacgctatgaggacatggcagccttcatgaaaggcgccgtggagaagggcgaggagctctcctgcgaagagcgaaacctgctctcagtagcctataagaacgtggtgggcggccagagggctgcctggagggtgctgtccagtattgagcagaaaagcaacgaggagggctcggaggagaaggggcccgaggtgcgtgagtaccgggagaaggtggagactgagctccagggcgtgtgcgacaccgtgctgggcctgctggacagccacctcatcaaggaggccggggacgccgagagccgggtcttctacctgaagatgaagggtgactactaccgctacctggccgaggtggccaccggtgacgacaagaagcgcatcattgactcagcccggtcagcctaccaggaggccatggacatcagcaagaaggagatgccgcccaccaaccccatccgcctgggcctggccctgaacttttccgtcttccactacgagatcgccaacagccccgaggaggccatctctctggccaagaccactttcgacgaggccatggctgatctgcacaccctcagcgaggactcctacaaagacagcaccctcatcatgcagctgctgcgagacaacctgacactgtggacggccgacaacgccggggaagaggggggcgaggctccccaggagccccagagctgagtgttgcccgccaccgccccgccctgccccctccagtccccgccctgccgagaggactagtatggggtgggaggccccacccttctcccctaggcgctgttcttgctccaaagggctccgtggagagggactggcagagctgaggccacctggggctggggatcccactcttcttgcagctgttgagcgcacctaaccactggtcatgcccccacccctgctctccgcacccgcttcctcccgaccccaggaccaggctacttctcccctcctcttgcctccctcctgcccctgctgcctcttgattcgtaggaattgaggagtgtctccgccttgtggctgagaactggacagtggcaggggctggagatgggtgtgtgtgtgtgtgtgtgtgtgtgtgtgtgcgcgcgcgccagtgcaagaccgagactgagggaaagcatgtctgctgggtgtgaccatgtttcctctcaataaagttcccctgtgacactcaaaaaaaaaaaaaaaaaaaaaaaaaaaaaaaaaaaaaaaaaaa

SEQ ID NO: 2263 - DNA, 5181 bp, Homo Sapiens
ggggtgtgtcaagaattaatttcggaattggttggtgacaagtgatgctgacttactcaatagcacgtatgtgcatgttgataacccaccgagaagccgaggaggcaaggctcgcgagagttcagggaggccgccctgagattccggcgaggccgcgggtcccacctcccgggggcggggcgagggcggagcggggagaagggagctgacgggcgcccggccggctgcggtccgtgcggaggctgagccggccgcgggcgcgaccggaggcagtttccgttactatggcaatgacggcagggactacaacaacctttcctatgagcaaccatacccgggaaagagtgactgtagccaagctcacattggagaatttttatagcaacctaattttacagcatgaagagagagaaaccaggcagaagaaattagaagtggccatggaagaagaaggattagcagatgaagagaaaaagttacgtcgatcacaacacgctcgcaaagaaacagagttcttacggctcaaaaggaccagacttggcttggatgactttgagtctctgaaagttataggaagaggagcttttggagaggtgcggttggtccagaagaaagatacaggccatatctatgcaatgaagatattgagaaagtctgatatgcttgaaaaagagcaggtggcccatatccgagcagaaagagatattttggtagaagcagatggtgcctgggtggtgaagatgttttacagttttcaggataagaggaatctttatctaatcatggaatttctccctggaggtgacatgatgacattgctaatgaagaaagacaccttgacagaagaggaaacacagttctacatttcagagactgttctggcaatagatgcgatccaccagttgggtttcatccatcgggatattaagccagacaaccttttattggatgccaagggtcatgtaaaattatctgattttggtttatgtacgggattaaagaaagctcacaggactgaattttatagaaatctcacacacaacccaccaagtgacttctcatttcagaacatgaactcaaagaggaaagcagaaacttggaagaagaacaggagacaactggcatattccacagttgggacaccagattacattgctccagaagtattcatgcagactggttacaacaaattgtgtgactggtggtctttgggagtgattatgtatgaaatgctaataggatatccacctttctgctctgaaacacctcaagaaacatacagaaaagtgatgaactggaaagaaactctggtatttcctccagaggtacctatatctgagaaagccaaggacttaattctcagattttgtattgattctgaaaacagaattggaaatagtggagtagaagaaataaaaggtcatcccttttttgaaggtgtcgactgggagcacataagggaaaggccagcagcaatccctatagaaatcaaaagcattgatgatacttcaaattttgatgacttccctgaatctgatattttacaaccagtgccaaataccacagaaccggactacaaatccaaagactgggtttttctcaattatacctataaaaggtttgaagggttgactcaacgtggctctatccccacctacatgaaagctgggaagttatgaatgaagataacattcacccataaccaagagaactcaggtagctgcatcaccaggcttgcttggcgtagataacaatacactgaaatactcctgaagatggtggtgcttattgactacaagaggaaattctacaggattaggatttctaagactactataggaattggttggcagtgccagctggctcttttttttaatattttattatttttgttaactttattatatgaaggtactggaataaaaggaacagacatccctttctaactgcactgcctacatgcgtattaaggtccattctgcctgtgtgtgctgtggctttgaactgtaacacctctaatcaattcaggagaaacacatatcatttaaagcaacataggctaacctgtaggtaacactgcagtattgatgttttactgcaaatcttatgggtctagataatcagtaaaagccatcttccatagttggtgttagaacattgccctattggtttggacatctgtagaatatatatgaagacaatttctgtaatggttttaagagatttaaaaagaaattcactggttctttacaaaatagaatttatcatcaagttattacacaaacttcacagtaaggagtgacaagtttataataaggaagacaaagtttaacaccttcactcaagcactccactaatatatttacgttgcattcagaaatactgatgaccttcatatacgtagtctgtatactcatagggagatgtactgtattatataacatgtaaagttgattttcttgtgacaagagaacttctttttttaacaagaggacatggcattattttaatttgattatggtgagttgaatttaagacatgaccatgaaggctgcttgtagaattagtgtatttttattaaactatttttttaaatgtcaaacttctatcatgtaaatggacttatagagaacaaaaagctatttactttggttttctagaaagttgttacatatcatggctggttaacttttatttcttttgatgaaaatttttcctttgatagtacttgtattattgtgccattattttcttatgctccaaatgtaccaaagatcttgaacagagtggatgttcacaactgagtagaattttcctttcctgtgggcatgctgtattcagacctgacagatctttgatagaggtcagcttattaaagggcaatattgttcttgtttagctacatcactgtggtgaatatagatggaattaaggaagtaaatgcaggccagggggttgtgatgagaggataggggagataatatcagcatcaaattctttgggtatctctctaagaattaaataatcttttctagcttaatattttaattctaattcaaacaactctgaggttttggtttcattagtaatagttgaggaataatatactagcaaagaatggcctaatgtttgtcataactgttaatggatgaaattttttaaagatacaaccatgataaccattataaatgatctatgatcaaaatctaaagtgatgaattatttgtaggaatgtcttcctaatggggaagaattgcataggagcattatgcaaatctacacaagcttttataaatgttgctgctgggtagctccacagtgtttcataaggccatcctgtttcccccaactcccccatttttggtttgtttctttttaaatatttgttgagtacttacgtgtttatctaacagttcacttccatttttctagtctggattttttgagtatttaggaaagagagctattaaaaactctggggatttctcaatgtgactaactctaatttttctaattataactgcctttaattaacataatattaacttttgctgaggtttatgagattttctcaccccacatcgctcccctttttttaaaaaggactgttttgctagtgtgataatgaataggtaagatatgagataattgcaacattgtctagttctagtatggtaactattcttgaaatggtattgaaaaataccgttaattcaaattgacagagattgataaaaagaaactgatttacctaagtttactttttaattgcataatagagcattttttgttttgagttccctcattcttattaccagaaagagcttgcaaatagttttactttcttggcactggaagggtagttctggaaagctactttgttgagagtctcattcttccctggagttaatagagtgattcacaatctttggggttttctcctcatcaaaagcatttcttaagtgcctatctaaaagcaattaaagactgtgtctgccctttagaagctaagaatttgattcatgatgcaaattaactagataatttgcaaagtacccttgagattgaattttctctattatatatttcccatatttcaggtgaataatttaatttaaatgacaaaaccctatctagtcaactgggcataatgacattttctttaaattagactctattttgaattaaaagagttttattataaaccgtgtgtttttggtttttctaagtatatagaaagcttgtataattcagatttatcaatttcctgatttaatgtagactttgacttttttattaaaaacctttgtattaaagcaagttatgttatttttcttttatgcatttattactaacatagctttaaatctttaaatgtattgaagcattgtgctgtctgaaaataaggaattgcttataaaccagccacttctgaatacaatatgtagctgatttaataagctagttagtgaatggaaaataagtgtggagtattaaaaatgttctttggttggtaaggcctaagatagggtttcatttatttctatactttttctgttttttaaacacctgcatatttttatgtaaatctctaaatttaaaatattttaagtacatttatttttggtgttttattgtataaaaccttagacaatcaatcagtcagtctttactgacaggagcagcagctatctgtcttttgctgatctacaaataaatgaattgagaatttagtccatagaggtccctggctaccaaacacattctcctttgaattgttaaaattcagaacattcaaaataactgttttgctacaacccatgattattttcctgttgtgtttatttaaatttactttctctttagaagtgcacttatttctgaaaaatcttaatgaaacaaacgcttagaacaaatataaatatgagacacttgggactactagagatattttagatttttatgaaaaaaatgtgaggggatattgctgctttaaaaaggaataaagtaataaaaatatatctcagctatttttttaaagcaatataattcagcaattgtctagaaaagtaatcatgaggctactgagtttggtgttcagttactgagtttcaaaaatgttttggtggcatgaggacaaaatttcattgaaggtaagataagaataaaaactatgtttac

SEQ ID NO: 2264 - DNA, 1050 bp, Homo Sapiens
ggggggggggggcacttggcttcaaagctggctcttggaaattgagcggagacgagcggcttgttgtagctgccgtgcggccgccgcggaataataagccgggatctaccataccattgactaactatggaagattataccaaaatagagaaaattggagaaggtacctatggagttgtgtataagggtagacacaaaactacaggtcaagtggtagccatgaaaaaaatcagactagaaagtgaagaggaaggggttcctagtactgcaattcgggaaatttctctattaaaggaacttcgtcatccaaatatagtcagtcttcaggatgtgcttatgcaggattccaggttatatctcatctttgagtttctttccatggatctgaagaaatacttggattctatccctcctggtcagtacatggattcttcacttgttaagagttatttataccaaatcctacaggggattgtgttttgtcactctagaagagttcttcacagagacttaaaacctcaaaatctcttgattgatgacaaaggaacaattaaactggctgattttggccttgccagagcttttggaatacctatcagagtatatacacatgaggtagtaacactctggtacagatctccagaagtattgctggggtcagctcgttactcaactccagttgacatttggagtataggcaccatatttgctgaactagcaactaagaaaccacttttccatggggattcagaaattgatcaactcttcaggattttcagagctttgggcactcccaataatgaagtgtggccagaagtggaatctttacaggactataagaatacatttcccaaatggaaaccaggaagcctagcatcccatgtcaaaaacttggatgaaaatggcttggatttgctctcgaaaatgttaatctatgatccagccaaacgaatttctggcaaaatggcactgaatcatccatattttaatgatttggacaatcagattaagaagatgtagctttctgacaaaaagtttccatatgttatg

SEQ ID NO: 2265 - DNA, 4670 bp, Homo Sapiens
gcggcgcgcacactgctcgctgggccgcggctcccgggtgtcccaggcccggccggtgcgcagagcatggcgggtgcgggcccgaagcggcgcgcgctagcggcgccggcggccgaggagaaggaagaggcgcgggagaagatgctggccgccaagagcgcggacggctcggcgccggcaggcgagggcgagggcgtgaccctgcagcggaacatcacgctgctcaacggcgtggccatcatcgtggggaccattatcggctcgggcatcttcgtgacgcccacgggcgtgctcaaggaggcaggctcgccggggctggcgctggtggtgtgggccgcgtgcggcgtcttctccatcgtgggcgcgctctgctacgcggagctcggcaccaccatctccaaatcgggcggcgactacgcctacatgctggaggtctacggctcgctgcccgccttcctcaagctctggatcgagctgctcatcatccggccttcatcgcagtacatcgtggccctggtcttcgccacctacctgctcaagccgctcttccccacctgcccggtgcccgaggaggcagccaagctcgtggcctgcctctgcgtgctgctgctcacggccgtgaactgctacagcgtgaaggccgccacccgggtccaggatgcctttgccgccgccaagctcctggccctggccctgatcatcctgctgggcttcgtccagatcgggaagggtgatgtgtccaatctagatcccaacttctcatttgaaggcaccaaactggatgtggggaacattgtgctggcattatacagcggcctctttgcctatggaggatggaattacttgaatttcgtcacagaggaaatgatcaacccctacagaaacctgcccctggccatcatcatctccctgcccatcgtgacgctggtgtacgtgctgaccaacctggcctacttcaccaccctgtccaccgagcagatgctgtcgtccgaggccgtggccgtggacttcgggaactatcacctgggcgtcatgtcctggatcatccccgtcttcgtgggcctgtcctgcttcggctccgtcaatgggtccctgttcacatcctccaggctcttcttcgtggggtcccgggaaggccacctgccctccatcctctccatgatccacccacagctcctcacccccgtgccgtccctcgtgttcacgtgtgtgatgacgctgctctacgccttctccaaggacatcttctccgtcatcaacttcttcagcttcttcaactggctctgcgtggccctggccatcatcggcatgatctggctgcgccacagaaagcctgagcttgagcggcccatcaaggtgaacctggccctgcctgtgttcttcatcctggcctgcctcttcctgatcgccgtctccttctggaagacacccgtggagtgtggcatcggcttcaccatcatcctcagcgggctgcccgtctacttcttcggggtctggtggaaaaacaagcccaagtggctcctccagggcatcttctccacgaccgtcctgtgtcagaagctcatgcaggtggtcccccaggagacatagccaggaggccgagtggctgccggaggagcatgcgcagaggccagttaaagtagatcacctcctcgaacccactccggttccccgcaacccacagctcagctgcccatcccagtccctcgccgtccctcccaggtcgggcagtggaggctgctgtgaaaactctggtacgaatctcatccctcaactgagggccagggacccaggtgtgcctgtgctcctgcccaggagcagcttttggtctccttgggccctttttcccttccctcctttgtttacttatatatatattttttttaaacttaaattttgggtcaacttgacaccactaagatgattttttaaggagctgggggaaggcaggagccttcctttctcctgccccaagggcccagaccctgggcaaacagagctactgagacttggaacctcattgctacgacagacttgcactgaagccggacagctgcccagacacatgggcttgtgacattcgtgaaaaccaaccctgtgggcttatgtctctgccttagggtttgcagagtggaaactcagccgtagggtggcactgggagggggtgggggatctgggcaaggtgggtgattcctctcaggaggtgcttgaggccccgatggactcctgaccataatcctagccctgagacaccatcctgagccagggaacagccccagggttggggggtgccggcatctcccctagctcaccaggcctggcctctgggcagtgtggcctcttggctatttctgtgtccagttttggaggctgagttctggttcatgcagacaaagccctgtccttcagtcttctagaaacagagacaagaaaggcagacacaccgcggccaggcacccatgtgggcgcccaccctgggctccacacagcagtgtcccctgccccagaggtcgcagctaccctcagcctccaatgcattggcctctgtaccgcccggcagccccttctggccggtgctgggttcccactcccggcctaggcacctccccgctctccctgtcacgctcatgtcctgtcctggtcctgatgcccgttgtctaggagacagagccaagcactgctcacgtctctgccgcctgcgtttggaggcccctgggctctcacccagtccccacccgcctgcagagagggaactagggcaccccttgtttctgttgttcccgtgaatttttttcgctatgggaggcagccgaggcctggccaatgcggcccactttcctgagctgtcgctgcctccatggcagcagccaaggacccccagaacaagaagacccccccgcaggatccctcctgagctcggggggctctgccttctcaggccccgggcttcccttctccccagccagaggtggagccaagtggtccagcgtcactccagtgctcagctgtggctggaggagctggcctgtggcacagccctgagtgtcccaagccgggagccaacgaagccggacacggcttcactgaccagcggctgctcaagccgcaagctctcagcaagtgcccagcggagcctgccgcccccacctgggcaccgggaccccctcaccatccagtgggcccggagaaacctgatgaacagtttggggactcaggaccagatgtccgtctctcttgcttgaggaatgaagacctttattcacccctgccccgttgcttcccgctgcacatggacagacttcacagcgtctgctcataggacctgcatccttcctggggacgaattccactcgtccaagggacagcccacggtctggaggccgaggaccaccagcaggcaggtggactgactgtgttgggcaagacctcttccctctgggcctgttctcttggctgcaaataaggacagcagctggtgccccacctgcctggtgcattgctgtgtgaatccaggaggcagtggacatcgtaggcagccacggccccgggtccaggagaagtgctccctggaggcacgcaccactgcttcccactggggccggcggggcccacgcacgacgtcagcctcttaccttcccgcctcggctaggggtcctcgggatgccgttctgttccaacctcctgctctgggacgtggacatgcctcaaggatacagggagccggcggcctctcgacggcacgcacttgcctgttggctgctgcggctgtgggcgagcatgggggctgccagcgtctgttgtggaaagtagctgctagtgaaatggctggggccgctggggtccgtcttcacactgcgcaggtctcttctgggcgtctgagctggggtgggagctcctccgcagaaggttggtggggggtccagtctgtgatccttggtgctgtgtgccccactccagcctggggaccccacttcagaaggtaggggccgtgtcccgcggtgctgactgaggcctgcttccccctccccctcctgctgtgctggaattccacagggaccagggccaccgcaggggactgtctcagaagacttgatttttccgtccctttttctccacactccactgacaaacgtccccagcggtttccacttgtgggcttcaggtgttttcaagcacaacccaccacaacaagcaagtgcattttcagtcgttgtgcttttttgttttgtgctaacgtcttactaatttaaagatgctgtcggcaccatgtttatttatttccagtggtcatgctcagccttgctgctctgcgtggcgcaggtgccatgcctgctccctgtctgtgtcccagccacgcagggccatccactgtgacgtcggccgaccaggctggacaccctctgccgagtaatgacgtgtgtggctgggaccttctttattctgtgttaatggctaacctgttacactgggctgggttgggtagggtgttctggcttttttgtggggtttttatttttaaagaaacactcaatcatcctaaaaaaaaaaaaaaaaaaaaaaaaaaaaaaaaaaaaaaaaaaaaaaaaaaaaaaaaaaaaaaaaaaaaaaaaaaaaaaaaaaaaaaaaaaaaaaaaaaaaaaaaaaaaaaaaaaaaaaaaaaaaaaaaaaa

SEQ ID NO: 2266 - DNA, 420 bp, Homo Sapiens
agggggcgcggtgggaggagtaggagaagacaaaagccgaaagcgaagagggcccgggctgcacacaccggctgggaggcagccgtctgtgcagcgagcagccggcgcggggaggccgcagtgcacggggcgtcacagtcggcaggcagcatggggaagggagggaaccagggcgagggggccgccgagcgcgaggtgtcggtgcccaccttcagctgggaggagattcagaagcataacctgcgcaccgacaggtggctggtcattgaccgcaaggtttacaacatcaccaaatggtccatccagcacccggggggccagcgggtcatcgggcactacgctggagaagatgcaacggatgccttccgcgccttccaccctgacctggaattcgtgggcaagttcttgaaacccctgctg

SEQ ID NO: 2267 - DNA, 529 bp, Homo Sapiens
tcatcttttcggtagaagcagatttgccccaaaccaatggcacttgtgcagtctctgtgaatgctgggaacagcacagcatgacagcactttttagttagggagaggaagcccagttgcatttctatataagctgtttgtataaactgaaaatcccaaagctcagaagaaagggactgctcgccaaggctaaggtaattagttgtgtttattttcattataaataaatgtttgtgtccatgcctcattgtgtatgctcttatagaagtccaccaaatgacataatcaagccccctccccaaatctacatatatcagaccctgctgtagagtttagacaatatttatatgcggttccttctttctaacatttaagaaagtttacaaagaagcagaattctgttttcattataggaggagggttggttctgaactaccagtatttccagttttagaaagagcaagtgaatcaaaatgggaaaaaaaatttcacctctagctttgtctgccactgtaaagtaaaaaccctcc

SEQ ID NO: 2268 - DNA, 345 bp, Homo Sapiens
tttgtcttaagcaactagttatatgatggcgcaggaacctggataaagattaaagtagaaatggggacattaaagagttaggctttaggtgttttagaccagaggtgcctggaagatatccagatatagatgttcattgacagatacacatacagatccagagctcagagacccctgagctagagtagagagacagaaattacagggtacatttagagagcaaagaaggcatagtggttgaaatacagtattcaccaagagacaagaatggaaaataaacccagaataccttcctagaactagatcacagtgacaggctctgacactggggttttattttctgca

SEQ ID NO: 2269 - DNA, 402 bp, Homo Sapiens
  misc_feature (257)..(257): n is a, c, g, or t
cggccgcgtcccctctcgcccgcgaggaggactggagaaggggctggggtggaggttttctctgtgtgtgtctagggttgggggcaggagaggttagttctattaagagttcatcaatcacccggtgtgcacttttcgctcgacagcggttcctcctacttcagagcaagtctgggccagctgggatccgaccagaaaccgcaagcggaggagacgcaggagcgcaggctgagcgctaactgaaggcgcgacctgancccggcgcctgctggggagctgcgcagccaggacagcggtcggcagcacagggcctgggcgcaggggccgccgtcaccacctcacgtcggaagccagcactgctgcccgccagccctgccgcctgccctcggacttcccagggcg

SEQ ID NO: 2270 - DNA, 402 bp, Homo Sapiens
tttttttttttttttttttttttatcagtcaactgctgttttattcacaccagatgctgcatggaaaaatcacgtccaaatttattttaaacaagagcaagtggtcttttttccaagactctttgagagagaacctcatcacagggacagcgcttcctcgtcagcgagcccgatggggcaggcgcggaagggaaaggccttctctgcatttggacttggcccactaaggcagaccacagagagacgccggagctggcaggaggccatttatgttctggttttctccgtgagttgtttcaaaaagggattgatcttaaaatctagtgtgattaaaaaggtgggtggggttaagagcaaaatatgctgctatatgtgtcccgcaggccccagtgtggactgttt

SEQ ID NO: 2271 - DNA, 5564 bp, Homo Sapiens
ggcttctggttcggcccacctctgaaggttccagaatcgatagtgaattcgtgattcctgccgctgccgccgccgccgccgaggtcccgcaccagccatggcgcagatcctccctgttcgctttcaggagcacttccagctccaaaaccttggaattaatccagctaacattggattcagcacactgaccatggaatctgacaagttcatatgtatccgagagaaagttggtgagcaggcacaggtcacgatcattgacatgagtgacccaatggctccgatccgacggcctatctctgcagagagtgccatcatgaatccagcctctaaggtgatagctctgaaagctgggaagacacttcagatctttaatattgagatgaagagtaaaatgaaggctcatactatggcagaagaagtgattttctggaaatgggtttctgtgaacactgttgccttggtgaccgagaccgcggtctaccactggagcatggaaggtgactcccagcccatgaagatgtttgatagacataccagtctggtgggctgccaggtgattcactaccggactgatgagtaccagaagtggctgctgctcgtaggcatctcggctcagcaaaaccgtgtggttggagcaatgcagctctactctgtggataggaaggtttcacaacacatagaaggccatgctgcggcttttgcagagttcaagatggaggggaatgccaagcctgccacccatttctgctttgctgtacgtaatcccacaggaggcaagttgcacatcattgaagttggacagcctgcagcgggaaaccaaccttttgtaaagaaagcagtagatgtgttttttcctccagaggcacagaatgattttccagtggctatgcagattggagctaaacatggtgttatttacttgatcacaaagtatggctatcttcatctgtacgacctagagtctggcgtgtgcatctgcatgaaccgtattagtgctgacacaatatttgtcactgctccacacaaaccaacctctggaattattggtgtcaacaaaaagggacaggtactgtcagtttgtgttgaggaagataacattgtgaattatgcaaccaacgtgcttcagaatccagaccttggtctgcgtttggccgttcgtagtaacctggctggcgcagagaagttgtttgtgagaaaattcaataccctctttgcacagggcagctatgctgaagccgccaaagttgcagcgtctgcaccaaagggaatcctgcgtaccagagagacggtccagaaattccagagtatacccgctcagtctggccaggcttctccattgctgcagtacttcggaatcctgctcgaccagggtcagctcaataaacttgaatccttagaactttgccatctggttcttcagcaggggcgtaagcaactcctagagaagtggctgaaagaagataagctggagtgctcagaggagctcggagacttggtcaaaaccactgaccccatgctcgctctgagtgtgtaccttcgggcaaatgtgccaagcaaagtgatccagtgttttgcagaaacaggccaattccagaaaattgtgctctatgccaaaaaggttgggtacaccccagactggatctttctgctgaggggtgtaatgaagatcagtccggaacagggccagcagttttctcgaatgctagtgcaggacgaggagccgctggccaacattagccagattgtggacattttcatggaaaacagtttaattcagcagtgtacttccttcttattggatgccttgaagaataatcgcccagctgagggactcctgcagacatggctgttggagatgaaccttgttcatgcaccccaggttgcagatgccatccttggaaataaaatgtttactcattacgaccgggcccacattgcccagctctgtgagaaggcaggcctcctgcagcaagcactggagcactacaccgacctctatgacatcaagagggctgtggtccacactcacctcctcaatcccgagtggcttgtcaatttctttggctccttatcggtggaggattctgtggagtgtctgcatgccatgctgtctgctaacatcagacagaaccttcagctgtgtgtgcaggtggcctctaagtaccacgagcagctgggcacgcaggccctggtggagctctttgaatccttcaagagttacaaaggcctcttctacttcctgggctcaatcgtgaacttcagccaagacccagatgtgcatctgaaatacattcaggctgcctgtaagacagggcagatcaaggaggtggagaggatatgccgagagagcagctgctacaacccagagcgtgtgaagaacttcctgaaggaggccaagctcacagaccagcttcccctcatcatcgtgtgtgatcgttttggctttgtccatgaccttgtcctatatttataccgcaacaacctgcagaggtacattgagatctacgtgcagaaggtcaaccctagccggaccccagctgtgattggagggctgcttgatgtggattgttctgaggaagtgattaaacacttaatcatggcagtgagaggacagttctctactgatgagttggtggctgaagtagaaaaaagaaataggctcaagctgctgcttccctggctggagtcccagattcaggaaggctgtgaggagcctgccactcacaatgcactggctaaaatctacatcgacagcaacaacagccccgagtgcttcctgagagagaatgcctactatgacagcagcgtggtgggccgctactgtgagaagcgagacccccatctggcctgtgttgcctatgagcgggggcagtgtgaccttgagctcatcaaggtgtgcaatgagaattctctgttcaaaagcgaggcccgctacctggtatgcagaaaggatccggagctctgggctcacgtccttgaggagaccaacccatccaggagacagctaattgaccaggtggtacagacagcattgtcagaaacacgggatcctgaagagatttcggtcactgtcaaagcctttatgacagccgacctgcctaatgaactgattgaactgctggagaagatagttctggataactctgtcttcagcgagcacaggaatctacagaatctgttgatcctgactgccatcaaggcagaccgcacacgggtcatggagtacatcagccgcctggacaactatgacgcactggacatcgcgagcatcgctgtcagcagcgcgctgtatgaggaggccttcaccgttttccacaagtttgatatgaatgcctcagcaatccaggtcctgatcgagcacattggaaacctggaccgggcatatgagtttgcggagagatgcaatgagcctgctgtgtggagtcagctggcccaagcccagctccagaaagatttggtgaaggaagctatcaactcctatatcagaggggacgacccttcctcttacctggaagttgttcagtcagccagcaggagcaacaactgggaggatctagttaaatttctgcagatggccaggaaaaagggccgtgagtcctatatagagactgaacttatttttgccttggctaaaaccagccgtgtttctgagctagaagattttattaatggacccaacaatgcccacatccagcaggttggagaccgctgttacgaggagggaatgtacgaggctgccaagctgctctatagcaatgtttctaactttgcccgcctggcttccaccttggttcacctcggtgagtatcaggcagcagtggacaacagccgcaaggccagcagcacccggacgtggaaggaggtgtgctttgcctgcatggatggacaagagttccgcttcgcacagctgtgtggtcttcacatcgtcattcatgcagatgagctggaggagctgatgtgctattaccaggatcgtggctactttgaggagctgatcttgctgttggaagcggccctgggcctggagcgggcccacatgggcatgttcactgagctggccatcctctactccaaattcaagccacagaagatgctggagcatctggagcttttctggtcccgtgtcaacatcccaaaggtgctgagggctgcagagcaggcacacctgtgggctgagctggtgttcctctatgacaagtacgaggagtatgacaatgctgtgctcaccatgatgagccaccccactgaggcctggaaggagggtcagttcaaggacatcattaccaaggttgccaacgtcgagctctgttacagagccctgcagttctatttggattacaaaccactgctcatcaatgacctgctgctggtgctttcaccccggctggaccacacctggacagtcagtttcttttcaaaggcaggtcagctgcccctggtgaagccttacctgcggtcagtccagagccacaacaacaagagtgtgaatgaggcactcaaccacctgctgacagaggaggaggactatcagggcttaagggcatctatcgatgcctatgacaactttgacaacatcagcctggctcagcagctggagaagcatcagctgatggagttcaggtgcattgcggcctatctgtacaagggcaataactggtgggcccagagcgtggagctctgcaagaaggatcatctctacaaggatgccatgcagcatgctgcagagtcgcgggatgctgagctggcccagaagttgctgcagtggttcctggaggaaggcaagagggagtgcttcgcagcttgtctcttcacctgctatgacctgcttcgcccagacatggtgcttgagctggcctggaggcacaacctcgtggacttggccatgccctacttcatccaggtgatgagggagtacctgagcaaggtggacaaactggatgccttggagagtctgcgcaagcaagaggagcatgtgacagagcctgcccctctcgtgtttgattttgatgggcatgaatgagacccagctgattgcactaagccctgccgtgggcccagcccctgccagcttcccctatggatatgcctctgctcccaacttcgccagcctccagtgtacaacttccgcgtgtagtgggcgttgtcaccacccaccctacctgcagagttactaacttctccaaggagcatgtcactccagcagcacaggggacgcaatgggaggcagggacacctggacaatatttatttttgctgaaacccaatgacggcaacctctgagccatcccagagcctggggaggccagggtagaggctgacggcgcaagaccagctttagccgacaacagagactggactgtgggccctcctgctggagccaggccttcctcctgggcgcctccgactggctggagctgccccctccaggccagtttgaagactacatgaacacgtcttgtttggaggtaccggacctcataaaaggactctcagcctcttggcaatcataaatattaaagtcggtttatccaggcaaaaaaaaaaaaaaaaaaaaaaaaaaaaaa

SEQ ID NO: 2272 - DNA, 536 bp, Homo Sapiens
gcaggaggtgatatttgacaggctgcgcgcgggcgagctgccgcggagcacccggcaggggctgacagcatggcctcgcccgacccgcccgccaccagctacgccccgtccgacgtgccctcgggggtcgcgctgttcctcaccatccctttcgccttcttcctgcccgagctgatatttgggttcttggtctggaccatggtagccgccacccacatagtataccccttgctgcaaggatgggtgatgtatgtctcgctcacctcgtttctcatctccttgatgttcctgttgtcttacttgtttggattttacaaaagatttgaatcctggagagttctggacagcctgtaccacgggaccactggcatcctgtacatgagcgctgccgtcctacaagtacatgccacgattgtttctgagaaactgctggacccaagaatttactacattaattcggcagcctcgttcttcgccttcatcgccacgctgctctacattctccatgccttcagcatctattaccactgatgcac

SEQ ID NO: 2273 - DNA, 378 bp, Homo Sapiens
aggaaacacttctatttaatgcttccagggattttttttttttttttttaaccctcctgggcccaagtgatccttccacctcagtctcccagctaattgagaccacaggcttgttaccaccatgctcggcttttgcattaatctaagaaaaggggagagaagttaatccacatctttactcaggcaaggggcatttcacagtgcccaagagtggggttttcttgaacatacttggtttcctatttccccttatctttctaaaactgcctttctggtggcttttttttaaaattattactaatgatgcttttatagctgcttggattctctgagaaatgatggggagtgagtgatcactggtattaactttatacactt

SEQ ID NO: 2274 - DNA, 6467 bp, Homo Sapiens
aaaactcaaggttttctcacgatgagtcggaggaggatatcgtgtaaagatctgggccatgctgactgccaagggtggctgtataagaaaaaggaaaagggaagtttcctaagcaacaaatggaaaaagttctgggtgatactgaaggggtcgtcactgtactggtatagcaatcaaatggcagagaaagctgatggatttgtcaacctgcctgatttcactgtggaaagagcatctgaatgcaagaaaaagcatgcttttaagatcagccatccacagatcaagaccttttattttgcagctgagaatgtgcaggaaatgaacgtgtggttaaataaacttggatcggctgtaatccatcaggaatccactacaaaggatgaagaatgttacagtgaaagtgaacaggaagatccagaaatagctgcggagacaccaccccctcctcacgcttcccagactcagtctttgactgcacagcaggcatcttcatcctcacccagcctgagtggaacgtcgtattctttctcttccctggaaaatacagtgaagacacccagcagttttccttcctccttatctaaagagagacaatccttgcctgacacagttaacagtttgtctgctgctgaagatgagggacaaccaataacgtttgctgtgcaagttcattcacctgtaccctcagaggcaggcatccacaaggccctggaaaacagttttgtcacatcagaaagtggatttttgaactctttatctagtgatgatacttcttcattgagtagcaatcatgaccatcttactgtcccagataagcctgctggatcaaagatcatggacaaagaagagacaaaagtgtctgaagatgatgaaatggagaagctgtacaaatcattagagcaagctagtctatctcctcttggggaccgacgaccttcgactaaaaaggagttgagaaaatcctttgttaagcggtgtaaaaatccatctataaacgagaaactccacaaaatccgaacattgaatagcacattaaagtgtaaagaacatgatctggccatgattaaccagttgctggatgacccgaagctgacagccaggaaatacagagagtggaaagtcatgaacaccctgctgatccaggacatctatcagcagcagcgggcttcgcctgcccctgatgacactgatgacaccccccaggaactcaagaaatcaccttcttctccctctgttgaaaattccatttgagacaaagtcagggttttctcctcttatattttatcacaagcaactcttcaagatgttgcaaaagcttacatttttccttaaaaggaaaactgaaacccagtccttcaagcatcagcttcccatctaaagatgcacgttagatgaagataatcaccgaatacaccagggctcctcatttcagtcgtaacgcatccattgagattggaatgattgagttcagttgaaaggcgttttttgtgttcctactgggagctcacggtgatgtggggctctaggggggatgtgagaaatgtctcttctgttcattgctctccagagaatgctatggacaagaatcaaattttaccaggagtaattgcccatggaaacattctgtttttcaaaagaagaatgtacatattccacttgactgggaagctgtgtggcccaaatcactgtttgagtggaggaatgttttctagagcagtgactggaaggacaaacgtggtgttgcagaacaaaaattccttgcctttggtatggaatggtggtgccttttccatgtgatgagaaatgcttcatagacagtggcatgtgggagagctgaaggaggaggcgtgttccatattccactcattcaaaggacagcttggtgttttcacactttatgcaggttaggggatctgattaatgtttcctttccttacaacagctagagaaaacatctcatcacaattggagacctctacttcctttgagctttcctactcaatggtaggagataggaatatgttccgcaaagaatgtctactgctcttgtccttggctgtgatccctatacatagtgtgaatttatatccaggtttcccaggatcaatattgacaagacgactttggcatctgaattgttttaatatctttactcaaaaaaacaaaaaaacaaaaacccatggaagcaacaaaagagttaaacatgagggatttatttttgtatgtttatatgtcacttgtgtgctatgtgaatagctatgtttgttatttaaatatatttatagaagttcaaattactagtgtttaaaagatgatatactattatatattgtgcttagtatatatttgatgagtctatactttttgcttgagaaaaatagaaatactattgattcactggtgttatgatgttgcactgtgtctgaggaatgctcaggaaatcttgtgggaaaaaaatggggcatgcattcataatttttcattttcttccccaccccaacccccatgagctcttaaatttagatttctatctcttgtaagtcactcttttaaccagcaaaggactttcatcttagattatcctttctattaaataaactttaagctttgtgccatttatgcctgcaaaccttagaccaaaggcaacacaactaatgtcatcttttcattaaagactaatagaaatttagaaatcattgtgttaaagagagctatagagaaacaatatgaaagtcttcccttactaatcaccatgaatatttctcaccataggaataaccacaacccaccaagtacccatgttggccctgcctacccgtaacaaattgttcacacaacctattttgttttatagcttcaaagtgtggcttgacattcaatggaaggaaccacctgaattatatctgcaaacaaaatggaaatagttgttgaatagttccccaagctttactaagaagccttaatactctgtaaacaaacaaacaaacaaaaaacaaccttagcattaagaaataaaaacaaaaaacaagaagcaagttgtactgctagaaacttctctaagataagaggccaggccagtcagtttggcccagcaaacatgtgggtacttctccacctagggaagccactgaagatgagtttgacctgtggtgacctgacagagagaacattcagatcctcagattgcaccctgatgccctggtttaggaaagcagtgctttaaccttttgcccctggaaattactgattctttctgtgattagcagataccagaagggaaattatttaggattggcaatgtaaagagtattgaaggaacaacaaataacaatagcagaaataacagtgtgacataaagtgcccttccacctatttttctttggtttgcaacaccagcctgtagacttccagtttttcttaaattgaagagctccagacacttttgagcagggtttgtgaatagctttgaatgctttcctttggcttttcgtgaagacatatttccccagcctttcaactgtaaactcctttagtaccattgaaacttaaggcaaaaaagatccctgggattacttagccaaggcttaaatttatttttcaaagtcaagaacattagcctagaagtttttgctttgctagttaaagcttactttgcagagcttcccaaagtgaaagggaaactgaacttcacaattttgcacctggctttctggagccccattgcctgctcattcgtgtttttccccctgtaaattattttgcttttgaccaggttgtgctagaaagtagggctgcttctgtgagttctcagcctaggctgtggccactaagacgtgggtggggggatagacaggagtgagagggagagtgggtgacactttccgtgacacttaatgtaggaagacatgggcttctctctcttggcctcaagccacttttctggtccaaagaatattgggaaaactggattactttcagtatatttcttgagaccgggtcatctctgaaatgcatttggggtagtttcctggggtccaagggccaattcctatacccagtcctgcagtgtctgtgagctgtggaatgagagagaaaaccatggctgctcaggaaggaagtggagaatctctcagcacacgtagatccaaatctgtggcacctgctaaagattaggatttggagaggactcctctttggggttgtgaagaggaccttttccctctgttgttagcctgtagatccagaacggagcctgatgtgatgccttcactggttgatatattgcaaatagacactctgagccctgcattgcaagggcgtcttttgctttaaagaattcttagttttgccacaacagctcaaatctcagaataggatcaaaggcctagaaagactcctaaagtataggattacaaagactccaggaagcgtaagaaagagattgtgtttggagtcagatttcaatgtgaaacccatgccttacatttacacagcactttgtagtttgcaaattggtgtgttttcagccccctcccgctgccccatgctctgagatgattgtggattattacagtgaagtgcctggcccggagcccccagtgatgaagcaggaacttgagtctcaggactcccagcggctctctgcccatttcctcctctccgccccccacctcgcttcacctgttaccttgtgaagttgctgttggcacatagcccactaggaaaccaagaagtttgactgggagcgtgtgtttcattgcactgggcttagcatacggctggccctggtggctgtttggctaaattctccatttgaaacctaaagggccctctctgtgcttgagcacagtctcctcctagtggtcctgcctcaacctgctggcgggctgtctatggattggggtttcacctaatcatgctgtgtttcctttcttttctttctgtacattagactacttgggaggtgctgtgtgatccttggatgaaaaacatatatttaaagaaatggagagtgtttattttgtttgctttttgaggcatgtgctgtcaaatgttagagaccaaacttagtgattagaggttggtcctttgaccttcttctcttaattgcttttcatgtaatcatgataatttactcaggtagcactccagtcacaaacaatgtcacagagatgaaacagattcaaagaaaaaatatttttaagtcttttgaaaagaagtgctattcaaatttaagacatgtttaaattcataggtacattatctcttagtaagaaatacttttttttttctttttttagacagagtcttgctctgttgcccaggctggagtgcagtggcacgattttagctcactgcaacctctgcctccctggttgaagtgattctcctgcctcagcctcccgagtagctgggactacgcccggctaatttttatatttttagtagagaccggggtttaccatgttgcccaggctggtttcaaactcctgacctcaggtgatctgcctgcctctgcctcccagagtgctgggattacaggtgtgagccaccacacctggccgaaagacagtattttgatatagccacatacatgatttaatgagtaatgttaagtacagaaaagctgccatatccacatagttttagggggcatttcttcttcagtctaacaagaatatgatatccaattgtggttttccaatttatttctcttccaatttcttttgtatacctcacaggagaaattgaatcctagaactgggagatgactgccctgcccagggttttgtaatacataattgaaaataaaagtccctgaaactaaatgtttgcagcctgtatgaaatggactgtggaagggggataatttctctcctcacagaaagccactcgtctccttgaatgaggcattgagcagacacacgtttctctgtgtcgtggggcaggaagcaattcccttgcctcttcagcacatctcagttctttcccacatgaccccagaaccacatagaaaacattgaaaataatggattcttcattgtatttgaattttttttttttaacctttagcccaaaagggaagtgtgcctcgtggaaagagcaaatgccgtaaaatagaaaccaggagttttaatcgccatatattttaatgtgcttgcatgatgggaatgtgacttttagcactgcatggtgtttgggggcaagatattaatgtggaaatcttagcttaagttttactgtgctctcatcctgtgtcagctacccctctaaactgaaaaagaggcatggctcatttctctcctgctttatgtttttgaggttgacttgtaagataaaaataaaaataagaaaaaaatatatctaggcaaatgacatgaaaaaaaagttgaaatatactactggtgttcatttttgtcctgcagtgttgctttctcaaagaaataaacatgtggctggaagtgttt

SEQ ID NO: 2275 - DNA, 668 bp, Homo Sapiens
gggctaaggtacgagggctgggtgttacgcgctacttgcccctttcggcggggagcagggagacctttggcctacggcgacgggagggtcgggacaaagtttagggcgtcgataagcgtcagagcgccgaggttgggggagggtttctcttccgctctttcgcggggcctctggctcccccagcgcagctggagtgggggacgggtaggctcgtcccaaaggcgcggcgctgaggtttgtgaacgcgtggaggggcgcttggggtctgggggaggcgtcgcccgggtaagcctgtctgctgcggctctgcttcccttagactggagagctgtggacttcgtctaggcgcccgctaagttcgcatgtcctagcacctctgggtctatgtggggccacaccgtggggaggaaacagcacgcgacgtttgtagaatgcttggctgtgatacaaagcggtttcgaataattaacttatttgttcccatcacatgtcacttttaaaaaattataagaactacccgttattgacatctttctgtgtgccaaggactttatgtgctttgcgtcatttaattttgaaaacagttatcttccgccatagataactactatggttatcttctgcctctcacagatgaagaaactaaggcaccgagattttaagaaact

SEQ ID NO: 2276 - DNA, 5741 bp, Homo Sapiens
gcggctgccgggcctccaatctcggcggcggcggcggcaacaggggagcctgggtctcgcggcctgcgagtccgtcgcgtgctgagggagacgcaggaggtggagccggccgggtgctcgagggaaggagactggaagctggttccggcgtgaggagagtctgaaaaaggggagcgcggagaggaggctggaagaggaagatgcctagcacagaccttctgatgttgaaggcctttgagccctacttagagattttggaagtatactccacaaaagccaagaattatgtaaatggacattgcaccaagtatgagccctggcagctaattgcatggagtgtcgtgtggaccctgctgatagtctggggatatgagtttgtcttccagccagagagtttatggtcaaggtttaaaaagaaatgttttaagctcaccaggaagatgcccattattggtcgtaagattcaagacaagttgaacaagaccaaggatgatattagcaagaacatgtcattcctgaaagtggacaaagagtatgtgaaagctttaccctcccagggtctgagctcatctgctgttttggagaaacttaaggagtacagctctatggacgccttctggcaagaggggagagcctctggaacagtgtacagtggggaggagaagctcactgagctccttgtgaaggcttatggagattttgcatggagtaaccccctgcatccagatatcttcccaggactacgcaagatagaggcagaaattgtgaggatagcttgttccctgttcaatgggggaccagattcgtgtggatgtgtgacttctgggggaacagaaagcatactgatggcctgcaaagcatatcgggatctggcctttgagaaggggatcaaaactccagaaattgtggctccccaaagtgcccatgctgcatttaacaaagcagccagttactttgggatgaagattgtgcgggtcccattgacgaagatgatggaggtggatgtgcgggcaatgagaagagctatctccaggaacactgccatgctcgtctgttctaccccacagtttcctcatggtgtaatagatcctgtccctgaagtggccaagctggctgtcaaatacaaaataccccttcatgtcgacgcttgtctgggaggcttcctcatcgtctttatggagaaagcaggatacccactggagcacccatttgatttccgggtgaaaggtgtaaccagcatttcagctgacacccataagtatggctatgccccaaaaggctcatcattggtgttgtatagtgacaagaagtacaggaactatcagttcttcgtcgatacagattggcagggtggcatctatgcttccccaaccatcgcaggctcacggcctggtggcattagcgcagcctgttgggctgccttgatgcacttcggtgagaacggctatgttgaagctaccaaacagatcatcaaaactgctcgcttcctcaagtcagaactggaaaatatcaaaggcatctttgtttttgggaatccccaattgtcagtcattgctctgggatcccgtgattttgacatctaccgactatcaaacctgatgactgctaaggggtggaacttgaaccagttgcagttcccacccagtattcatttctgcatcacattactacacgcccggaaacgagtagctatacaattcctaaaggacattcgagaatctgtcactcaaatcatgaagaatcctaaagcgaagaccacaggaatgggtgccatctatggcatggcccagacaactgttgacaggaatatggttgcagaattgtcctcagtcttcttggacagcttgtacagcaccgacactgtcacccagggcagccagatgaatggttctccaaaaccccactgaacttggaccctttctagtctcaaggggattccagccttcagaaggttcttgggatatggaacaggccgtgcacaactttgacatctggtcttgctccatagagcacaactcaagatagaccatgagacagcttgagcctcaggattcttgttcttcctcttatcttccttttgtggtttttaatttgaagaccccagagaattccattacataatgattttgcccttgttataaatgttaccctaggaattgttttaaccatttccttttctaaactctctagctttcaactttacttaaacattgtgtggtagctctgacctgtcctgattctttagagaagctggggtacagtttatgagatagctagagcttctttgttatctcaggcaggaggcgtttacataacagatgtttcctcagctgggtgtgaggtatactctaagcaggaggctttttcagccttctctctcttttttttttttttttttttttgagatggaattttgctcttttgcccagtctggagtgcagtggcatgatctcagctcactgcaacctccacccactgggttcaagcgattcttctgcctcagcctcccgagtagctgggattaccggcacccaccaccacgcctggctaatttttcaattttctttttcagtagagacgggttcaccgtgttggccaggctggtcttgaactcctgacctcaggtgatacccgcccccccgcctcagcctcccaaagtgctgggattacaggcgtgagccaccgtgcctggccctgtctctcttaagagtaggttcattgtctgtcttagagtcacttctattgcaactcattttctttttccagggcacagatcgaccaagctgccgttccctattctgcaggacaggactattctagcatacctgcttcgtccacccaggcagggtttggggtggtctcttctgtgcctgcagtccccatttgacacttggttgccaccatctttggagattattgtttggaatgatgcttccattggctttttcttgttaccatggactaggaagaaaacatggtttccaaataatctgggagcttttggccatggtgccgccttcctgaattggcagtggtcagagcacacctgaaccctatcctgggctggtgatgagcagaaatcagacctttttctatgcttttttgaatatcagagtaggatgaacacccagattcaaatatgtcaccaaagttggtggtggtccttccctgcacccttgcgttaagccattatgtaatgaaaatgtgtttgcttgaaggaacagctcaaagcaccttcacaagttgccttgacttaccctaggtgggtgtgaaagagcacccgtagcaaggaaaattttctctattagtgtgttcttctgcctcttcccccttgattcagctttcagaggtactatggcagttttgcctcaggtgctgaacatttctcagccctggctaaaagggagcagcacagggagagaaacaggataggaaagcagaatggcgagcagcctatggcccagggcctgtaatcccttcccaagactagctgctcagggtggtgcagggacaggaccagaccctgcgcctatttcctgccttctttcccctatagggaactctgtaggctgagccactgtcctgctcttatgacattatatcttgtgcctttctcctcagcagtgagcagtgagctactcctggcccaggccctaggggaaatggatcagtctttgaggtttctatttggggaggggagtacttaagatgagtcaaaagacactttcctctgttccattccccatctcagggactcctgaatattcagcctctccaggctggtgtcttctagtttcccccactgggaatgctggctgggagagccatgactaccagacttttcctcaggctccttggcatgttagtctgaattgttcttgagcactgtactactgacccaacaactgtgactagctggccacgccattcagggctggtgtggcatttatgtgtgtgtgtgtgtgtgtgtgtttttcctgtttgcccagcagtgcattgtgggttccaagagtgggtagtgtgtgtatgtgtgtgtgtcagagggagacctggcaggcacctctttgagagtagctgtggtcagagctgtttggtcagtgcattatgttgaatgaggtccaggaacccagagccacccagcagacaccactgtggcttgccagctgccaagatggagaagcatgtgcccctgtagagcgtctccccagaaccagaccccgagccactcgcttcctctgtgctgtgacaacattggtgccaggggagatggtgtttttcaaagggacctactgtagccactttaatttacaattaagagccttagtttgacttaacacttttgtaggcttttcattgtgtatttttgtgtatgtgtgcatatagcagctactctgtagcagaggtgggtagagacacttaatagtatcatgtcgcatgcagatgtcacatcggcctctgcaaaaactgtactgtcttgtttctgcattagacttaagtagtcatgtgaatatactgctatgtcacttttaatattacgagttttatacttggaaaatggtacttgcttcttttaaatctctgtcttctctaacctcccccttcccatttcaatgctcccttcctaatttcagcaataatctcaaaaagcaattaaatagttaaatgaccctaattgtaattactgtggatggttgcattcatttgattacttgggcacacacgagatgacaaatggggcagtggccatgcttgaatgggctcctggtgagagattgccccctggtggtgaaacaatcgtgtgtgcccactgataccaagaccaatgaaagagacacagttaagcagcaatccatctcatttccaggcacttcaataggtcgctgattggtccttgcaccagcagtggtagtcgtacctatttcagagaggtctgaaattcaggttcttagtttgccagggacaggccctatcttatatttttttccatcttcatcatccacttctgcttacagtttgctgcttacaataacttaatgatggattgagttatctgggtggtctctagccatctgggcagtgtggttctgtctaaccaaagggcattggcctcaaaccctgcatttggtttaggggctaacagagctcctcagataatcttcacacacatgtaactgctggagatcttattctattatgaataagaaacgagaagtttttccaaagtgttagtcaggatctgaaggctgtcattcagataacccagcttttccttttggcttttagcccattcagactttgccagagtcaagccaaggattgcttttttgctacagttttctgccaaatggcctagttcctgagtacctggaaaccagagagaaagaggatccaggatgtacttggatgaggaggcctggcttatctaggaagtcgtgtctggggtgcttattgctgctccatacagctgtacgtcagccccttggccttctctgtaggttcttggcagcaatgagcagctttcactcagtgacacaagtaattactgagtcctaatttgatagccaccaactgtacctgggtaggcaaagtcagatttttgagaacctttttcctgatttgaagttttaattaccttattttcttttatgctttcctctgtcttgtaatcttttctcttcttaatatccttccctataatttcaattatttggattaattttagaataaacctatttatttct

SEQ ID NO: 2277 - DNA, 1600 bp, Homo Sapiens
gcttcccgtccgctgtcctctgctgccagtcccctgccccgggcaaagcccatctggtccgccgagcaggccggagctattgggagtggcggatcctcccaccccagccggatctgggccatggccgagcctggagagggactgccagaggaggtgctggcactcatcttccgccacctgtccctgagagaccgtgctgccgccgccagggtctgcagggcctgggccgccgctgctacctgcagcgccgtgtggcacgacacaaaaatcagttgcgaatgtgagctggaaggcatgctgccaccttatctgtccgcctgcctcgaccacattcacaacctacggctggaatttgagccatcgaggaagccgagccgccgggcggccatcgagctgctgatggttctggcgggccgtgccccggggctgcgaggcctgcgcctggagtgccgcggagaaaaaccgctcttcgacgcgggccgcgacgtcctggaggctgtgcacgctgtatgcggggcggccaaccagctacgccacctcgacctgcggcgcttgtccttcacactggacgacgcgctggtgctgcaggcggcgcgcagctgtcccgaactccacagcctttttctggacaacagtaccctagtgggcagcgtgggtcccggctcagtgctcgagctactggaggcctgcccgcgcctgcgcgctctcggcctgcacctagccagtttgtcgcacgccatcctcgaagcactggcggcgccagaccgagcgcctttcgcgctcttggctctgcggtgcgcgtgccccgaagatgcacgcgcgtccccgctgcccaacgaagcctgggtcgcgttgcgccgccgccaccctgggctggcagtggagctggagctggagcccgcgctgcccgctgagagcgtgacgcgcgtcctgcagccagccgtccccgtggctgcgctgcgcctcaacctctcaggcgacaccgtaggcccagtgcgcttcgcagcacaccactacgccgcaaccctgtgcgcgctcgaggtgcgcgcagccgcttcggccgagctgaacgccgcgctggaggagctggcggcgcgctgcgcggccctgcgcgaggtgcattgtttctgcgtggtgagccactcggtgctggacgccttccgcgcgcactgcccgcgcctgcgcacctataccctcaagctcacgcgcgagccgcatccctggaggcctacgctcgtggcgtgattgggcgacttctctcccccgtccccgtggacgtaagcgctctgagagggaacgggggggggtgtccaggcgcgccccgagtgctagtgccttcttttgggattgttgccccccgggtctttaccgagttgggaactgtgatggcatcgggaccagtcctgggcgccctgagaccactcgctgctctcaccctctgcagacgccccacccgctcggtcctggacacactgcccccctctcttgcctccacccctctgcggactctgcagctccgcggccccggcgcagggagagggagggcacgggcgcgggccgggcctcaagggtgagtgtgaaataaacaaatcctgcagtg

SEQ ID NO: 2278 - DNA, 486 bp, Homo Sapiens
aaacggaaaggttcggaatttgcctctgcgccatctatttttgcctgttacctgtgacgtccttggaagcagaatctgaaactttctgaggagagcatttgagcttcagatttctaacagcctctttgcaacaaaatagaccagtagctgaaggcaactgcaatccttcatgatgtttcccttggccagaaatgcactaagcagtctcaagattcaaagcattctgcaaagcatggcaagacatagccatgtaaaacactcaccagattttcatgataaatatggtaatgctgtgctagccagtggaactgctttctgtgttgctacatgggtgtttacagccactcagattggaatagaatggaacctatcccctgttggcagagttaccccaaaagagtggaaacatcagtaaccatcacagttgctgtaatgacagaattgtttaaaaaaccaacttgtcatgtaagcactctactgcttatt

SEQ ID NO: 2279 - DNA, 767 bp, Homo Sapiens
  misc_feature (296)..(296): n is a, c, g, or t
gtcgtggccatcctgggtatggggtggggggcgggcactggactggaaatgccctctgcagcctcaagaggtgcgagccttctgaatatgcagtcactggggctgtggacctgggactgcctgcagggtcactgggctcctttaattcacctaaactcaggccctccaagcggggccatggagaggagccccacgtggggtgaggctgctgaactctggggttcccacattctccttcccttcaggatccgccacaaacagacactttttgcttccttaaagtaggatccaaatcnagatcctctagcctgggcagtagaggaagaaatgctagcctggaagctcggcatttggtttcactaagggccatgtggttcccctgcagcctcatgcctggccccttgacacatccaaagcaaagggagtcctgccccctccccccacttcctttctaccctgcctgtgcacagtgggtgggttggtgtgtctggacactgaggacttcctccccctttgcctgtccttccctcggccctgtgtgcctcagggcagatatagcaagctctttcgaccatagttgatggtagacattttagactttgtttctcagctctgtacaaacacaaatacacacccccacaaaactaaaatcaaagtttcactacataacactgggccttactgcatgtggttcattctagcatttctgttctgtgctgtgctaagctatactactgtatgttctttcagtaaaaaagcggccgcga

SEQ ID NO: 2280 - DNA, 2727 bp, Homo Sapiens
ctaggcgcgtttcctgaaggtcgatggccaggtggtcttcataaactatactgccttgtgatgcctccctagaaatgagaggtctcaataccagctcagaccatgtggaccgcggatgagattgctcagctatgctatgaacactatgggatcaggctgcccaagaaggggaagcctgagccaaaccatgagtggacattattggcagcggtggtgaagatacaatctccagctgacaaggcctgcgacacccctgataagccggtgcaagtgacaaaggaaattgtgtcaatgggaacaggaacaaaatgcataggacagtccaaaatgaggaagaacggagacatcctcaatgatagccatgctgaggtcatagccagaaggagtttccaaaggtaccttctccaccaactccagttggcagccaccctgaaagaggatagcatctttgtcccaggaactcaaaaaggagtgtggaaacttagacgagacctcatttttgtgtttttctccagccatacaccctgtggggatgcctccatcattccgatgcttgagtttgaagatcagccttgctgtcctgtcttcagaaattgggccaacaactcatcagtagaagccagtagtaacctggaagctcctggaaatgaaagaaaatgtgaagaccctgacagtcctgtaaccaaaaagatgaggcttgagcctgggactgcagccagggaggtcaccaacggagcagctcaccatcagagttttggcaagcagaaaagtggcccaatctcaccaggcatccacagctgtgatctcactgtagagggactggctactgtcaccagaatagcccctggtagtgccaaagtgacagacgtttatagaactggagccaagtgtgtacctggagaagctggagactccggaaagccgggtgctgcgtttcaccaggtggggctgctccgagtgaagccaggccgtggagacagaacacgctccatgtcctgtagtgacaagatggcccgatggaacgtcctcggatgccaaggggcactgttgatgcacttgctggaagagcccatctacctgtcagctgtggtcattgggaagtgcccatacagccaggaagccatgcagagagcactgattggaaggtgtcagaatgtgtctgctttaccaaaaggcttcggagttcaagaattaaaaatactgcagtcagatttactatttgaacagagccgcagtgcggtgcaggcaaaaagggctgatagcccaggtcgacttgttccttgtggggcagccatcagctggagtgcagttcctgagcagcctttggatgttactgccaatggctttccacagggaacaacaaagaaaacaattggaagccttcaggcaagatcccaaatcagcaaagtggaactcttcagatcattccagaagctgctaagcagaattgcaagggacaagtggccacactccctcagggtgcagaagctggatacctaccaggagtacaaggaggctgcgtcctcttaccaggaagcctggagcacactccggaagcaggtgtttggatcctggatcagaaacccaccggattatcaccagttcaagtgagaaggaaatgtttgctctggtagcaggacccttcatcctgaactgccttcctccacgcaggacaagtcttagcttttttggtagttaaatcagggaacattctttctgagctttgcatctctgttgtgtaatacagatggaatctggaacttagagcaagctatacttgattgaagtagctctctgctaaaatggcatctcactaatgacctcactatctgacttccattgtgttttattgcttctctaaaatatgaaatcagagtttggaacatgatgctttgaaagtactctgcagcagctctgttttatgggttcctacattgattcagcaaatatttattgagctgaaatgatgtttgacgctctgcaagttttacagctttgcctagcatagcgaatatatattttgtattcccagcctttctttcttcagggagccattcttttcccattcttcagtggtcctgctctgtgcctcagacttggctgaagctaaccttactccctggctctaggaatagcctgtgagccagccctggactgccctggacttgttctcagaggtatcaggaaaggctttctgttttgatctggagctgtaagggtcacataatcatgggactgccggtggccatcttttcctactacctagagaaagccagcaaagaatgaaggcaacaaaggaaacagccaagagaatcaaagatctagtaacactgtttagatgtctcaattatgtgagacagattcctgttgttattttgattaagcctgtttgtgttggttttctgacttacaattgaaagagttctgtccaaaaagccaaaaggtggccaggcttggtggctcaggcctgtaatcccagcactttgggaagcccaggcaggcagatcacttgaggtcaggagttcaagaccagcctggccaacctggtgaaaccctgtctctactaaaaatgcaaaaactagccgggcatggtggcgcacacctgtaatcctagctactcgggaggctgaggcaggagaattgcttgaacccaggaggcggaggtagtggtgagcaaagatcgtaccgctgcactccagcctgggtgatagagcaagaccctatctc

SEQ ID NO: 2281 - DNA, 617 bp, Homo Sapiens
ttttttttttttttttttacaaaataaatacatgccaaaggctttatttaactcattaattaatgagggaattggtagatattacaatgaattcaaaagcaaattgggagtgtcacacatttttagtcaaatatggaatgctgaaatgaatttacaaaaggatacaaaggtggtcactatctgctggaaaaaaaatcagtttcattccattagatccaatttgcatttccatggataataattatttgtattcctatcagttttctataacttcatttctatcgtatggggttgtaaaataacctagtcaaagatacggagagagctgggcacagtgatgtcctcctgtagccccagctactcaggaggctaaagcaggaaaactgcttgagcccaggagttcaagaccagcccaggcaaaagagcaagactgccatcttaaaagacaaaacacaagtcaaagagaggcagagataacctaggtagctgaatgaatcaggacagccgtcaagtgtcaacatttttcacaaatatcccttacagaccctttattgtaaaaatccaagatctagccaaaacagctttctgaattctggcttcattacttggctgggctc

SEQ ID NO: 2282 - DNA, 419 bp, Homo Sapiens
acttcagagaaagcgacctcaagatacaactggcaactgaggaaaaggcctcaattcaacaagagctaacaagcttgggagtttatttcggaatctttaaaagactcttctgcttacccacaatctgggatccactgcaggaaaacaaaaaaggaaaacttcatttaaaagaagcaagaagtaaaatgggacaaattgggaatgtttaagtctctgaaactctgcactgaaaagaaaataagattgataacttaagcttaacattctgaggcataaagaaacattaactttggagtattcatcttgactactgaaatacaagtttagaagacaagtggtttcattctggtcacagatcacagcttttctttaaatttataatcctatgggttggactcgttgactgtattttttaaagg

SEQ ID NO: 2283 - DNA, 305 bp, Homo Sapiens
ggcacgagtttttttttttttttttttggtgaacaagtacaaatttagcaattttaatcaatattcttgcagacaagtgtggatatgtatatgcatatatacatatatatatcaaaattgagaatttacaaataagatttgatacatttattctagcagtgggtaagtccatagagtaaatttcaagtaggatatatttattttctttggtggtgtttttaataattcctttctactgcatacaaagggacctgaagcttaaattcagttagttttggagaaatccaaaatgagaaaaacagaaa

SEQ ID NO: 2284 - DNA, 5428 bp, Homo Sapiens
gcggggagccggcggttatctgggcggcggagcgctcacaatgtggcaggagacagaaaagataagatgctcccaagtcccttgcagctctcttcagaagaaaaatcactagtgctctgctcttgccataataccaaacctttttgactcatgctttggtgctgcaacactggaagaattgcacacagtttccaggaatatctttttttcatttgagtgattctttgtggatgagaaaagatttgagtcttaataattaccttgttttaaagctatttctttatagtctgaactgtttaataaattgggccacttaccaatgagccacacagccagttcttgtcaggagctggttgaaaactgtgctgtgcatgtagcaggaatggcacaagaagatagccgtcgtggtcaagtgccatcttccttttatcatggtgccaaccaagaacttgacctgtccaccaaagtgtacaaaagggaatcaggaagtccttattctgtgttagtggacaccaagatgagcaaaccgcatctccatgaaacagaagaacagccatatttcagggagacaagagcagtgtctgacgtgcatgctgttaaggaagaccgggagaattctgatgacacagaggaggaagaggaagaagtctcttacaaaagggagcagatcatagtggaggtaaaccttaataatcaaacattaaatgtatctaaaggggaaaagggtgtctcttctcagtccaaagagactcctgttcttaagacaagcagtgaggaggaagaggaagagagtgaggaagaggccacagatgacagcaatgactatggagagaatgaaaagcagaagaaaaaggagaagatagtagagaaagtcagcgttacacaaaggagaaccaggagagctgcctctgttgccgcagctaccacttcccctactcccagaactacaagaggtcgtaggaagagtgtagagccacctaagcgtaagaagcgggccacaaaggagcccaaagcaccagtccagaaagctaagtgtgaagagaaagagactctgacctgtgagaagtgccccagggtatttaacactcgctggtacctggagaagcacatgaacgttactcataggcgcatgcagatttgtgataaatgtggcaagaagtttgtcctggaaagtgagctgtcccttcaccagcaaacagactgtgaaaaaaacattcagtgtgtttcctgtaacaaatcgttcaagaaactctggtcccttcatgaacatatcaagatcgtccatggatatgcagaaaagaaattttcctgtgaaatttgtgagaagaaattctataccatggctcatgtgcggaaacacatggttgcacacacaaaagacatgccatttacatgcgaaacctgtggaaaatcattcaaacgcagtatgtcactcaaggtgcactccttgcagcattctggagagaagccctttagatgcgagaactgtgacgaaaggtttcagtacaagtaccagctacgctcccacatgagcattcatattgggcacaaacagttcatgtgccagtggtgtggcaaggatttcaacatgaagcagtacttcgacgaacacatgaaaacacacactggagagaaaccctttatctgtgaaatctgtggcaaaagcttcaccagccgccccaacatgaagagacaccgcagaactcacacaggcgagaagccctatccatgtgatgtgtgtggccagcggttccgcttctcgaacatgcttaaggcccacaaggagaagtgctttcgggtgaccagccccgtgaatgtgccacctgctgtccagatcccacttacaacttccccagccaccccagttccttctgtggtgaacacagccacaaccccaacccctccaatcaatatgaatcctgtaagcactcttccccctcggcccatcccccaccccttctcacacctgcacatccacccacaccctcaccacccacaccaccttcccatccctccagtccctcacctcccgccacctccagctctctttaagagtgagcctttaaatcatagaggccagagtgaggacaactttctgcggcacctggcagagaagaacagttcagcacagcatcattaacatccgtctccttagtgtgttctccaggagacacgtccccatgtgtgagcgtgcacagagggagtcggtgagcatttccttagttctcagactctcctccgcctctaccaagagcttcgccagtgtcactgaatcaacagatccaagggaatgaacaagaagactaccttgagctcacagagggactgtcatctaaaccaggggaaccactgaactaaagcccaatttgcttgcattttctgatgacttttataagtttcaaatactcagacttgtggaattttataatttcatatcagctgatgaggtatgcttgcttttatatcccagacttctcctcaaagaggggataggcctggtttcctttgtactaatcgggaaggctgtgagattaatccagagcattaattgtatcactgtgtatggtaaggaattcttttcagcttttggtgccagctacagagttgagctggccatgtttcacagtatatcaagcattatagagaaagacagaaattttcttctttgtgtagctctcctaacgcactctttattttactacagaaattattttagagtttttgtatagacttctttggtagtctgtttctaaaatgaaatgtatttcaataagcagtgtaattttttcagtgtagctgaacctatgttgtaaaatagaaaaaaatttttataatcatcaaaatgtgattcttaaagatgcatataacttctataattcaaagctattcttacatccgtacaactcaaaaggtgcttcagagactagatgtatctgagagggtctccagaccaggttactgcaaaaatgaggttttgctttcaggatttggcgtaaatacttggtagttttgacatctctgcttaacactcaagagaggctccctaatgtgctcctgtcctccatgttctgcttggcttcgttagtgcattacatgaaatgatttgcaggggatggggccttttccagggaagtcacctaaagcttgcatgttttgaaaatttgaataaggctgtttgctgacaggaggaggaagtagtggagatcatttcatctcagtcacgtctgtttctcacttcccttaggaattgtgttgatgtttaacttttatgggatgacaaattgaaatcgctcattttgaggttgctttatttttctagaattgttataagaagctaaaatagtaaacttaaaatcacaaacatgacattgctgatagtggctgagaaattcagatgagaagacaaattggttatgaattttgaaatatctattatatgtaaaatgtggatatgttcacaaccttgagctattttaacacagtttaaatatagtgagggaaaactcctaagttttactgccctgtcctctgcaaattatgtaataccagcattcttaggcgataaagagagcagcacctctagtacctttaggcagattactttttcaagtttggggaacttcaaaagaccataatcaaccaggagcttattataggaaaggctgaacagaagggctagtgtattgattacacttaacagatcatatttatccagactcagtatagcttaaaattttgtatttctttatctgagagaactgagttcccaggctaaatcacttacctcccaccccctctccaattttttttttaagagacaaggtcttgctatgttgcccaggctagagtgcagtggctattcacaggtgcagttatagcacactacagcctccaactcttgggttcaagcaaccctgcctcagctaaccaagtagctgggactacaggtgcatgctaccatgcccagtccattttttaatcttgaaatttcttcatttttctttcttcggtttcttaaaatctttgcctgaatcagaacgctggcttttatttatttttttatttttaatattaaatgtgcagatatgcttcgagcacttttctaactaatgagctctgtggtaagaaaaaatgaactctttcaattgagattaagtccatatttttcaaacatcacgttctctattggctttttggtttagtgtttctaaattttctccttctgattttgcctgtcttatataatgagcataggaaaattttggaatgaggcagaaaagtatatcaagacatacttcctggttttggatgtaagttttaaagaatggtatttttaatatttgtacacattctttgagcacccaggtacccaagccaataaggaaagttaattccttgcatatgactgttatatctttagtggttgtctccctctccctccacagtctccttggcattccatgacaagtttgtcaacctacacttttatatagacatgtcattatttcatggtcaagcctgtagtattaaaatgatttttttaaaagatgtaaactgtgcttagttaattggttatattttgttctgtttttttttttttttttttttttttttgaggcagagtcttgttctgttgcctgggctggagtgcagtggcgtgatcttggctcactgcaacccccgccccccgggttcaagtgattctcctgcctcagcctcccgagtagctggaattacaggcatgcgccagcacgcccggctaagttttgtatttttggcagagatggggtttcaccatattggccaggctggtctcaaactcctgaccttgtgatccgcccacctcagcctccgaaagtgctgggattacaggcgtgagccaccacgtccaactgccttattttgttctgaataaatttacagtattgggcagcaattctggattctagacttgagaccacagaatcaaccatttcatgaggttgtactgtaattatacactggaatattcaggtagtcatctttgatttttcattcaagtaaatatagccataagaaaatatctgctatacaggaaaaccagtattaagcaaataccaccatccttaacagaaacaaaaatatatatatatattatttttaaaaattagcattgtcatacagtacaattcttagtgaagtgtattgtggaacaatttagaaacttcctttttttcccctagattaaggatactttccttgacttgagacttgtggtcttcaggaaaactactcagaatataatgactcctcatcagtatcatattgtatataaataatgaaatgcattaagaatattcacaacattgaacccaggaggcggagcttgcagtgagccgagattgcgccactgcgctccagcctgggcaacagagcgagactccatctc

SEQ ID NO: 2285 - DNA, 373 bp, Homo Sapiens
tgacttggttatctgtgggttcctgggtggccagggtctcctttaattgtaaacactgcatgccaagtcagacttcgtaagagaaaggaaataagagaagatcgagatagggcgcggctggactccatggtgctgctgattatgaaactggaccagcttgatcaggacatagaaaatgccctcagcaccagctcctctccatcaggcacaccaacaaacctgcggcggcacgttcctgatctggaatcaggatctgaaagtggagcagataccatttcagtaaatcagacacgagtaaatttgtcttctgacactgagtccacggacctcccatcttccactccagtaggccaattctgggaacccaaaccca

SEQ ID NO: 2286 - DNA, 1189 bp, Homo Sapiens
cctgctggggccgtccagtcccccagacctcacaggctcagtcgcggatctgcagtgtcatgcctgggagccctcggcccgcgccaagctgggtgctgttgctgcggctgctggcgttgctgcggcccccggggctgggtgaggcatgcagctgcgccccggcgcaccctcagcagcacatctgccactcggcacttgtgattcgggccaaaatctccagtgagaaggtagttccggccagtgcagaccctgctgacactgaaaaaatgctccggtatgaaatcaaacagataaagatgttcaaagggtttgagaaagtcaaggatgttcagtatatctatacgccttttgactcttccctctgtggtgtgaaactagaagccaacagccagaagcagtatctcttgactggtcaggtcctcagtgatggaaaagtcttcatccatctgtgcaactacatcgagccctgggaggacctgtccttggtgcagagggaaagtctgaatcatcactaccatctgaactgtggctgccaaatcaccacctgctacacagtaccctgtaccatctcggcccctaacgagtgcctctggacagactggctgttggaacgaaagctctatggttaccaggctcagcattatgtctgtatgaagcatgttgacggcacctgcagctggtaccggggccacctgcctctcaggaaggagtttgttgacatcgttcagccctagtagggaccagtgaccatcacatcccttcaagagtcctgaagatcaagccagttctccttccctgcagagctttggccattaccacctgacctcttgctgccagctaataagaagtgccaagtggacagtctggccactgtcaaggcagggaaggggccatgacttttctgccctgccctcagcctgttgccctgcctcccaaaccccattagtctagccttgtagctgttactgcaagtgtttcttctggcttagtctgttttctaaagccaggactattccctttcctccccaggaatatgtgttttcctttgtcttaatcgatctggtaggggagaaatggcgaatgtcatacacatgagatggtatatccttgcgatgtacagaatcagaaggtggtttgacagcatcataaacaggctgactggcaggaatgaaaaaaaaaaaaaaaaaaa

SEQ ID NO: 2287 - DNA, 461 bp, Homo Sapiens
tttatgaccagaaagttttaatcaaacagagcaaaatggctgcaatgcagaataggtagtgcttggcgaagagaaagaagaccatctccttggtgacatagatgatgtgaatgaagatgaagcagtacaggaacatggcaaactggttctggggcagcaggaagttctggaggcctcctgaaaacaggcggggcgccgctcattgctgcagctgctccatcaccacctcgtgctgccgctcccgctgcagctgctccatcaccacctcgtgctgccgctgccgctggttcttctcatgcaggtacttgagccgcgtgagctcgaactccatgcgcaccttctccagctccatctcgggattgcgctcagtcccaggggtcgggggcagctctgcgagtttgggtccgtcgccagcctggcctttggtagcacggcaggacttgggggacagcgatttaagc

SEQ ID NO: 2288 - DNA, 1647 bp, Homo Sapiens
gctgagcttaaactgaagcaagttcggtggacgccggcggcgccctgatctaaagaaacgactcagggactgcggcgcttgcacgtcaacgggaggtgtgagcccaaagaaatgggacgtcggtcatcagatactgaagaagaaagcagaagcaagagaaaaaagaaacaccgtagacggtcctcctcgagcagttcttcagatagtagaacatacagccgaaagaaaggaggaaggaaatcaagatcaaagtcaagatcttggtccagagatcttcagcctcgttcacattcttatgatagaagacgcaggcatcgatcaagcagtagctcttcttatggctccagaaggaaacgaagtcgaagtcgttcaaggggtcgagggaaatcctatagagttcagaggtctaggtcaaaaagcagaacaagaaggtccaggtcaagacctcgtctccgttctcatagtcgtagcagtgaaaggtccagtcacagaagaacgcgtagtcggtctcgggatagagaacgacgtaagggcagagataaagagaaaagagaaaaggagaaggataaagggaaggacaaggaattacataacatcaaacgtggggaatctggaaacatcaaagctggattagaacatctgccaccagctgaacaggccaaagccagactacagctggttcttgaagctgctgcaaaagctgatgaagcattgaaagccaaagaaagaaatgaggaagaagcaaagagaagaaaggaggaagaccaagccaccctggtagaacaagtaaaaagagtaaaagaaattgaagctattgaaagtgattcttttgttcagcagacattcagatcaagtaaagaagtcaaaaagtcagtggaacctagtgaagtgaaacaagcaacttcaacatcaggaccagcatcagcagttgctgatccacccagtactgaaaaagaaatagatcctaccagcatccctactgctatcaagtaccaagatgacaattccctggcccatccaaatttatttatcgagaaagctgatgctgaggaaaaatggttcaagagattaattgctctccgacaagaaagactaatgggcagtcctgtggcctaagtaatatacatatagttggattggattgtcagcagtaacattggaaatttaggtttttaaatcccaatattaactttttactcttaaaaagaattttgctgattatatataaaggtagtctcatttcatttgtctctcatgtaggcttgaatatttgttaatttgaattaaatcaaacattgtaaaaattaaaacaaaatttaagattgcatgaaaatgttatactgttaataaagctaaacataaataagtctgttaaaatgaatggtagacactagtgtttcttagtgcaattcaaaaaatgtcaagatgtcatttaaagacacaattttgattaattatgcatacatgagaattgaattacatgctataaatatgagatttcatcttccgtatggtattcaaccatttttaaatattttatttcaccatattgcaaatttttaggcacaataaaaagcaccctaaacaatgtaagcagaatgtgcatgttaaagaacatatttatggaaaaaaaaaaaaaaaaaaaaa

SEQ ID NO: 2289 - DNA, 422 bp, Homo Sapiens
tttttttttaaaatgttaacacaagtataaaagtaattttatgtaaggttaaaacctatttttaaaatgcttccaaatatgtaaaactatacacaagtccattacacattcagcttaagtttaccattaaaaagtgtacacacaatactgtaactgtaaatacatgccaccgtttataatgtagcatttaccaccacagcacccaaagatattaacagaaaccaactccccactaaaatctagggaaaggttttagagctagtgaaataatttattgcagaccgtatttattataaagaaactattggctcattctactgtatccacactccctcacaatcttaagggagatacaataagtccactctcttctcctaaaatgatatttagcacatttgacaagaaggagtggttgctttatt

SEQ ID NO: 2290 - DNA, 489 bp, Homo Sapiens
  misc_feature (437)..(437): n is a, c, g, or t
tttcgtatttctgaaatcattcttttattttgcacacacatagctgctatttactgaacactggaaattcatgaatgcgttacatatttaaactttcatagaaggctcagatcaacaaagcaaaacttctacagataataagtagttgtgtatgcttgtcactcttgggcccatcagcacctgttccctatcatattgctgaactctgcaaactccagaaaggaaggtttcttttccaaacttcagagaagctgcagatcaagaatttgggccgttgcatctgattagaaactctcttcttccagtgtgagaacgttggattgaaagcggcataatataaaaagagatggttgtctgtcagggagaggtcagatctgtaggggtctttcacctgtcaccctcggaagaagctgatgagaaaggcgcacagggcctgnaagggtttccaacaatgttcccaggccttcttctttgcttcctcattccctc

SEQ ID NO: 2291 - DNA, 199 bp, Homo Sapiens
tacttgtctttccgtatgggtagcttggcacttccctctgtggctctgctcagaactggcggtttttcccagctccttgcccagaccaatacttccatgctgtcttcaagccctgcttcctgcacatctcccagcccagatggggagaacccatgtaagaaggtccactgggcttctgggaggagaaggacatcatcca

SEQ ID NO: 2292 - DNA, 443 bp, Homo Sapiens
attaccagaggaacaaaaggaatattgaggatgcgctcaaccaactcttccgaaacagcagcatcaagagttatttttctgactgtcaagtttcaacattcaggtctgtccccaacaggcaccacaccggggtggactccctgtgtaacttctcgccactggctcggagagtagacagagttgccatctatgaggaatttctgcggatgaccggaatggtaccagctgcagaactttacccctgggacaaggagcaagtgtcctttgtggatgggtaattctcccaccagaattgagcccttaactggggaatcctgaccttccctcctgggctgtcatcctcatcggcttggcaggactcctgggactcatcacatgcctgatctgcggtgtcctggtgaccacccgccggcggaagaaggaaggagaatacaacgtccagc

SEQ ID NO: 2293 - DNA, 446 bp, Homo Sapiens
tttttttttttttttttaaaaaaagtgttttcccctttattacagaactgatacatatacattattgaacattaaaaaatacaaagaagacattttaagaatgcaattaccaaacattttcccatccaaagataatcacttagttttttggtgtatccttctccccgccacccaactcttagtttgcaaaatttcaaacccacagcaaagccacattgatagtacaatgaacatctgtcgaccagtcacctagagtcaccaagtgttgtcattttactacatttgacttgtctctttctttctttatattcatatgttttatatttttccacttagtcactggaaattcagtggcagacactgtggtaattaatatctaaaaacttcagtatgtttgctaagaacaagaatgttctcctacatagccacagtacaaatgtctcact

SEQ ID NO: 2294 - DNA, 1702 bp, Homo Sapiens
gagggagagctggggcctgctcccggagagatacggctatgtcgatcgaaatcgaatcttcggatgtgatccgccttattatgcagtacttgaaggagaacagtttacatcgggcgttagccaccttgcaggaggagactactgtgtctctgaatactgtggacagcattgagagttttgtggctgacattaacagtggccattgggatactgtgttgcaggctatacagtctctgaaattgccagacaaaaccctcattgacctctatgaacaggttgttctggaattgatagagctccgtgaattgggtgctgccaggtcacttttgagacagactgatcccatgatcatgttaaaacaaacacagccagagcgatatattcatctggagaaccttttggccaggtcttactttgatcctcgtgaggcatacccagatggaagtagcaaagaaaagagaagagcagcaattgcccaggccttagctggcgaagtcagtgtggtgcctccatctcgtctcatggcattgctgggacaggcactgaagtggcagcagcatcagggattgcttcctcctggtatgaccatagatttgtttcgaggcaaggcagctgtcaaagatgtggaagaagaaaagtttcctacacaactgagcaggcatattaagtttggtcagaaatcacatgtggagtgtgctcgattttctccagatggtcagtatttggtcactgggtctgttgatggattcattgaagtatggaactttactactggaaaaatcagaaaggatcttaagtaccaggcccaagataactttatgatgatggatgatgctgtcctctgcatgtgtttcagcagagatacagaaatgttagcaactggggcccaagatggaaaaatcaaggtgtggaagattcagagtggacaatgtttaaggagatttgagagggcacacagtaagggtgtcacctgtctaagcttttctaaggatagcagtcagatccttagtgcttcttttgaccagacaattagaattcatggtttaaaatctgggaaaaccctgaaggaatttcgtggccattcctcctttgttaacgaagcaacatttacacaagatggacattacattattagtgcatcctctgatggcactgtaaagatctggaatatgaagaccacagaatgttcaaatacctttaaatccctgggcagcaccgcagggacagatattaccgtcaacagtgtgattctacttcctaaaaaccctgagcactttgtggtgtgcaacagatcaaacacggtggtcatcatgaacatgcaggggcagattgtcagaagcttcagttctggtaaaagagaaggtggggactttgtttgctgtgccctctctccccgtggtgaatggatctactgtgtaggggaggactttgtgctctactgtttcagtacagtcactggcaaactggagagaactttgacagtgcacgagaaggatgtgattggtattgcacatcaccctcatcagaacccgattgctacctacagtgaagatggactcctaaagctctggaaaccataattcaacttttctttttaaatcagctcgaaagcatgtacttaaatgaagcatattcatgtaatgtgcttttttttttttttgccagcttttctaagcaaatagattgtctgaattagtcacag

SEQ ID NO: 2295 - DNA, 5551 bp, Homo Sapiens
gacctttatttgttacttttgagctacagtgacaagaaagatcacctaactgtggaagaactggctcagtttttgaaggtggagcaaaagatgaataatgtgacaacggactattgtcttgacatcataaagaagtttgaagtttcagaagaaaataaggtgaaaaatgttcttggcatagaaggcttcacgaacttcatgcgtagtcctgcctgtgacatatttaacccattgcaccatgaagtgtaccaagacatggatcagcccctctgcaactactacattgcttcctctcacaatacatacctgactggagaccagctcctttctcagtccaaagtggatatgtatgcacgggtgctgcaagagggctgtcgctgtgtggaagttgactgttgggatggcccagatggagagccagtagtacatcatggttacactctcacttcaaaaattctcttcagagatgttgtggagaccatcaacaagcatgcctttgtgaagaatgagtttcctgttatattgtctatcgagaatcactgcagtatccagcagcaaaggaagattgctcagtacctgaaaggaatattcggagacaaactggacctgtcatctgttgatacaggggagtgcaagcagcttccaagccctcaaagtttgaaaggcaaaattctagtgaagggtaagaagttgccttatcaccttggggatgatgcagaggaaggggaagtttccgatgaggacagtgcagatgaaattgaagacgagtgcaaattcaagctccattatagtaatgggaccactgagcatcaggtggaatctttcataaggaaaaaactggagtcactgttaaaagaatctcaaattcgagataaagaagatcctgatagtttcacagtgcgggcactactgaaggccacgcatgaaggcttaaatgcacacctgaagcagagtccagatgtaaaggaaagtggaaagaaatcacatggacgatccctcatgaccaactttggaaaacataagaaaactacaaaatcacggtctaaatcttacagtactgatgatgaggaagacacacagcagagtactggcaaggagggtggccagctgtacagattgggtcgccgaaggaaaaccatgaagctctgccgagaactctctgatttggttgtgtacacaaactccgtggccgctcaggacattgtggatgacggaaccacaggaaatgtgttatcattcagtgaaacaagagcacatcaggttgttcagcaaaaatcagagcagttcatgatttataatcaaaagcaactcacgaggatttacccctctgcctaccgcattgattccagtaacttcaaccctctcccctactggaacgcaggctgccagctagtggcactgaattatcaatctgaaggacgaatgatgcagttaaaccgagccaaattcaaggcaaatggcaattgtggctatgtcctcaaaccccagcaaatgtgcaaaggtactttcaaccctttctctggtgaccctcttcctgccaaccccaaaaagcagctcatcctgaaagttatcagtggacagcaactccccaaacctccagactccatgtttggagatcgaggcgagatcattgacccttttgttgaagttgaaattattggattgccagtagattgttgtaaagatcaaacccgtgtggtagatgacaatggatttaaccctgtgtgggaagaaacactgacatttacagtacacatgccagaaatagctttggttcggttccttgtgtgggatcacgatcccattggacgagactttgttggacaaagaactgtgaccttcagcagcttagtgcctggctaccggcatgtctatttggaaggactgacagaagcatccatatttgtacacataaccatcaatgaaatctatggaaagtggagccctttaatactcaaccccagttatactatattgcactttctaggagctacaaagaacagacaactccagggtctgaagggactgttcaataagaatcctaggcacagttcttcagaaaacaattcccattatgtacggaagcgatccattggagatagaattctgcgacgcacagctagcgccccagccaaaggcaggaaaaagagcaaaatgggcttccaagaaatggtggagataaaggattctgtgtccgaggccacaagagatcaagatggcgtgctgaggaggaccacacgcagtttgcaagcacgccctgtctctatgcctgttgacagaaaccttctgggagctttgtcgctgcctgtatctgaaacagcaaaagacattgaaggaaaagaaaactctctagtacaaatctgaataggaaacaacttaagcagaagataaagatggcagaagaaaagggaaagcaagtataaaagatccacattttctaaatttcaacaaaaagttatcatcctcctccagtgctctgctccacaaagataccagccaaggggacaccattgtatctactgcccacatgtcagtcacaggagaacagctgggcatgtcaagtcctaggggtgggagaaccacatcaaatgccacaagcaattgccaggaaaacccctgtcccagcaagtctctctccccaaagcagcatttggctcccgatcctgtagttaaccccacacaagatctgcatggtgtgaaaatcaaggaaaagggtaatcctgaggactttgtggaagggaaaagcatcttgtcaggaagcgtcctttctcatagcaacctagaaattaagaacctggaaggtaataggggtaagggccgagctgcaacatccttttctttgtcagacgtctccatgctctgttctgacatacctgacctacattcaactgcaattctgcaggagagtgtaatttcccatcttattgacaatgtcactttaacaaatgagaatgagccgggcagttccatctcagccctgattggccagtttgatgagaccaacaatcaggctctcacagttgtttctcatcttcataataccagtgtgatgtcaggccattgtcccttgcctagcctgggcctaaaaatgcccatcaagcatggtttttgcaagggaaaatccaagtcttccttcctgtgctcatctccggagctgatagcactctcgagttctgagaccaccaaacatgcaacgaacacagtttatgaaactacctgcactcccatctctaaaaccaaaccagatgatgacctttctagtaaggccaagacagcggccttagaaagcaacctgcctggatcccctaatacttctcgtggctggttaccaaaaagtcctaccaagggagaagactgggaaacactgaagagctgcagccctgcctcttcccctgatttgaccctggaggatgtaatagctgatcccactctctgtttcaattctggggagagcagccttgtggaaattgatggagaatcagaaaatctttctctaacaacctgtgaatataggagagagggcacaagtcaacttgcttctcctttaaaactcaagtacaatcagggtgtggtagaacactttcaaagaggtttgagaaacggctactgtaaagagaccctccgcccttctgtccctgaaatattcaacaatattcaagatgtcaaaactcaaagtatttcttatctagcctatcagggtgctggctttgtgcataatcatttctcagattcagatgcaaaaatgttccagacctgtgtgccccagcaatctagtgctcaagatatgcatgtccctgtacccaagcagttggcacatcttcctttgcctgctctgaaactgcctagtccttgcaaatccaaaagtctgggggacttaacatcagaggacattgcctgcaattttgagagcaagtaccagtgtattagtaagagttttgttacaactggcattagagacaagaagggcgtgactgtgaagacaaagtcgttagagcctatagatgccctgaccgagcagcttcggaagcttgtgtcctttgaccaggaagacaactgccaagtgctatattcaaagcaggatgccaatcagctcccccgggcactggtcaggaagttgtcatccagaagtcagagcagagtgcgcaatattgctagtcgtgccaaggagaaacaggaagccaacaagcagaaagttccaaaccccagcaatggggcaggagtggttcttagaaacaaaccctcagcacccacccctgcagtgaatcgccactccaccggctcctacatcgcaggctacctgaagaacacgaaagggggtggccttgaaggccggggcatcccagagggggcatgcacggctcttcactatggccacgttgaccagttttgttcagataattctgttttgcagactgagccaagcagtgatgataaaccagaaatttattttcttttgagactgtgaattatttaaaactgcattcttaaggttttcaaggtattctgtagaatgtcagagttttcagtaaataagttccttggctttggaatgattttcaaatgtatttttaaacttgtatttgggtctccctttgacttcatgtgttctccctgttaatgcgtttgtatatagatttggtgacatttcccatgtacctattatgatctttctcccttgagttgttgtaaactgtatcagtatgaaatatgtgcatgccctagatgtgaaactcctcagcagctcgggttataatgtgtgtgtgtttcaccaagatgtcctttactgtgtcctcagattgcagtcacaaatgtagtcatttttactctctaactgttgagttgattaagagactttgcaaacgacaaagggatgaattccttactttaatctgttatcatttttcctatgtttccctctttgttcagaagcccagatgcatttttataactcagttttaaaaactttaaaatagttaccttgccttttaggatgttcttatcccacccataatgagagttgaaaggggatggatagctgctccccatgcccttcccactttttggaataggccgtgagggtgtgaggaagaaggctgtcttttgtacataaggacaaaattgtttgttttacataaattttgttacatatttttgctaatggctttgtatgtaacaagaagcgagttgccaaactacctgttgtacttttgaattttctgattgaattacagactgcgaacaacggctttcagaatgagggacttccatcagactctaatgataatagtagcacaaattgaaaacttccccaaagctttcacagaatattttctcataataaaatccaagtgaacagataattagaagaaacccttttccttcagggaaccaagcaactctattttagtactgacatgcattattttcactgtgaattcacttttttattgcatgttcagatgtccctctttgttttttttttttgtaacattaactgcaatgatgttcttcctggaattcatgaaaatataattaaaacacatttttaaac

SEQ ID NO: 2296 - DNA, 502 bp, Homo Sapiens
tttttttttttcatatctaaaattatttacgttcatgatcttttacacagagtggtagaaaaaaagtatatttagagtttatagaatctattttttatcataagcaacactgttcacaatgataaatgacctggaaatacccttgtgcatgcaggggcacaaagaaacatttgtggcctgaaaatgtgtaacacaggcacattcatgttcatgtacacacagcattatattagcctcattattttcttttttttttgtttttcccatttcttctcatctgcttttgactgctggtttctttttatatccttattatcttcttaaggggctttaaactcttctagaacaagatggtgtatagtcaataaatattgcttaatacatattcattacaagtcagcctttacaaagaatgattgcaatgagacttggaactttttaaaccaaaactgttttgctactttctttatacaaatatttacaaatgtggataaactgtatc

SEQ ID NO: 2297 - DNA, 1194 bp, Homo Sapiens
agcctttaagatttccggggatggaatccgaaatggaaacgcagagcgccagggcagaggagggctttacccaggtcacccgcaagggtggccgacgggcgaagaaacgacaggctgaacagctgtccgcagcaggagagggcggggatgcgggccgcatggacacagaggaggccaggccggcgaagaggcccgtcttcccacccctctgtggggacgggctcctgagtgggaaagaagaaacaaggaaaattccagtcccagctaacagatacacaccattgaaagaaaactggatgaagatatttactcctattgtggaacatttgggacttcagatacgctttaacttgaaatcaaggaatgtagaaatcaggacttgtaaagaaaccaaggatgttagtgctctgacaaaagcagctgattttgtgaaagcttttattctcggctttcaggtggaggatgcacttgccctcatcaggttggatgacctcttcctagagtcttttgaaattacagatgttaaacccctaaagggagaccatctatccagggcaataggaagaatcgctggcaaaggaggaaaaaccaaattcaccatagagaatgtgacacggacaaggatagttttggctgatgtgaaagttcacatccttggctccttccaaaatatcaagatggcaagaactgccatttgcaacctaatcttgggaaatcctccttccaaggtttatggcaatattcgagctgtggctagcagatcagcagatcgattctgatttcaagtcagagactttttatcttgcctttggactctggtgaaaaatactttacagtggtcggtcacaagaaaccatctgaacaatttcagtcatttgaagcctccgtcccttcttccattctcagccagaagcataaacagaaaagaaagatttaagaggattcacactcaacaggttttaggataatttaaatatcaaaaattgattgttatacttacacattaggtataatttatcatttatctgaaatcacatgtagcagattgcatagtctgtaatcctctcagagggaaacttcttgtttaaacagctctatatggatttatacttttatatttataaatttataacttcatacaaatttataaacatttctttataaattgtaatttaatagattatctcagaaaaa

SEQ ID NO: 2298 - DNA, 3319 bp, Homo Sapiens
ggcggtcccctgttctccccgctcaggtgcggcgctgtggcaggaagccaccccctcggtcggccggtgcgcggggctgttgcgccatccgctccggctttcgtaaccgcaccctgggacggcccagagacgctccagcgcgagttcctcaaatgttttcctgcgttgccaggaccgtccgccgctctgagtcatgtgcgagtgggaagtcgcactgacactgagccgggccagagggagaggagccgagcgcggcgcggggccgagggactcgcagtgtgtgtagagagccgggctcctgcggatgggggctgcccccggggcctgagcccgcctgcccgcccaccgccccgccccgcccctgccacccctgccgcccggttcccattagcctgtccgcctctgcgggaccatggagtggtagccgaggaggaagcatgctggccgtcggctgcgcgctgctggctgccctgctggccgcgccgggagcggcgctggccccaaggcgctgccctgcgcaggaggtggcaagaggcgtgctgaccagtctgccaggagacagcgtgactctgacctgcccgggggtagagccggaagacaatgccactgttcactgggtgctcaggaagccggctgcaggctcccaccccagcagatgggctggcatgggaaggaggctgctgctgaggtcggtgcagctccacgactctggaaactattcatgctaccgggccggccgcccagctgggactgtgcacttgctggtggatgttccccccgaggagccccagctctcctgcttccggaagagccccctcagcaatgttgtttgtgagtggggtcctcggagcaccccatccctgacgacaaaggctgtgctcttggtgaggaagtttcagaacagtccggccgaagacttccaggagccgtgccagtattcccaggagtcccagaagttctcctgccagttagcagtcccggagggagacagctctttctacatagtgtccatgtgcgtcgccagtagtgtcgggagcaagttcagcaaaactcaaacctttcagggttgtggaatcttgcagcctgatccgcctgccaacatcacagtcactgccgtggccagaaacccccgctggctcagtgtcacctggcaagacccccactcctggaactcatctttctacagactacggtttgagctcagatatcgggctgaacggtcaaagacattcacaacatggatggtcaaggacctccagcatcactgtgtcatccacgacgcctggagcggcctgaggcacgtggtgcagcttcgtgcccaggaggagttcgggcaaggcgagtggagcgagtggagcccggaggccatgggcacgccttggacagaatccaggagtcctccagctgagaacgaggtgtccacccccatgcaggcacttactactaataaagacgatgataatattctcttcagagattctgcaaatgcgacaagcctcccagtgcaagattcttcttcagtaccactgcccacattcctggttgctggagggagcctggccttcggaacgctcctctgcattgccattgttctgaggttcaagaagacgtggaagctgcgggctctgaaggaaggcaagacaagcatgcatccgccgtactctttggggcagctggtcccggagaggcctcgacccaccccagtgcttgttcctctcatctccccaccggtgtcccccagcagcctggggtctgacaatacctcgagccacaaccgaccagatgccagggacccacggagcccttatgacatcagcaatacagactacttcttccccagatagctggctgggtggcaccagcagcctggaccctgtggatgacaaaacacaaacgggctcagcaaaagatgcttctcactgccatgccagcttatctcaggggtgtgcggcctttggcttcacggaagagccttgcggaaggttctacgccaggggaaaatcagcctgctccagctgttcagctggttgaggtttcaaacctccctttccaaatgcccagcttaaaggggttagagtgaacttgggccactgtgaagagaaccatatcaagactctttggacactcacacggacactcaaaagctgggcaggttggtgggggcctcggtgtggagaagcggctggcagcccacccctcaacacctctgcacaagctgcaccctcaggcaggtgggatggatttccagccaaagcctcctccagccgccatgctcctggcccactgcatcgtttcatcttccaactcaaactcttaaaacccaagtgcccttagcaaattctgtttttctaggcctggggacggcttttacttaaacgccaaggcctgggggaagaagctctctcctccctttcttccctacagttcaaaaacagctgagggtgagtgggtgaataatacagtatgtcagggcctggtcgttttcaacagaattataattagttcctcattagcagttttgcctaaatgtgaatgatgatcctaggcatttgctgaatacagaggcaactgcattggctttgggttgcaggacctcaggtgagaagcagaggaaggagaggagaggggcacagggtctctaccatcccctgtagagtgggagctgagtgggggatcacagcctctgaaaaccaatgttctctcttctccacctcccacaaaggagagctagcagcagggagggcttctgccatttctgagatcaaaacggttttactgcagctttgtttgttgtcagctgaacctgggtaactagggaagataatattaaggaagacaatgtgaaaagaaaaatgagcctggcaagaatgcgtttaaacttggtttttaaaaaactgctgactgttttctcttgagagggtggaatatccaatattcgctgtgtcagcatagaagtaacttacttaggtgtgggggaagcaccataactttgtttagcccaaaaccaagtcaagtgaaaaaggaggaagagaaaaaatattttcctgccaggcatggaggcccacgcacttcgggaggtcgaggcaggaggatcacttgagtccagaagtttgagatcagcctgggcaatgtgataaaaccccatctctacaaaaagcataaaaattagccaagtgtggtagagtgtgcctgaagtcccagatacttggggggctgaggtgggaggatctcttgagcctgggaggtcaaggctgcagtgagccgagattgcaccactgcactccagcctggggtgacagagcaagtgagaccctgtctc

SEQ ID NO: 2299 - DNA, 2810 bp, Homo Sapiens
ttttttttttttttttgctttcccgtttcttaaacattggcgttcccaagtttctccttggtcctcctgtcatttttatctactctcgtagcttcaaataccatctagtttatagtttatttagcatgttgtccaagccaccgtcttgggcccagggctctacctgtagcttttcatccacacttctcaggttgcttcttacacagcgccatagtagttaaaatacggtctggggatagtcgtctcttcatcagtctcccccgacgacctgcgcaggcgtggcttgaggaaacgcccgctgtgggcggagccacccgaaaggctccggtcgggggcgggaacaggatcggcccgcgggctggcgtcgataggctgccgcagagacagggcgggctctgctaagggacgcgcctcgccgtggggcggtgcctgcgcctgagcctctacgagagggaaggaacgctgctccgagctccgcgtcgcgtcgcgtagattcgcgtcgccgtcgacctcagaggcggggccggaagcgctacggtttgacccccgagtccctctgttcccgaaggggcggccgtctttctgccgacccgctccgcctcctctccttcttccccattacccggaggccgaagcccccagccagggcggggcggcgcagcccgagctcccggacccggaagaagcgccatctcccgcctccaccatggagcccaccgcaccgtccctcaccgaggaggacctcactgaagtgaagaaggacgccttagaaaatttacgtgtatacctgtgtgagaaaatcatagctgagagacattttgatcatctacgtgcaaaaaaaatactcagtagagaagacactgaagaaatttcttgtcgaacatcaagtagaaaaagggctggaaaattgttagactacttacaggaaaacccaaaaggtctggacacccttgttgaatctattcggcgagaaaaaacacagaacttcctgatacagaagattacagatgaagtgctgaaacttagaaatataaaactagaacatctgaaaggactaaaatgtagcagttgtgaaccttttccagatggagccacgaacaacctctccagatcaaattcagatgagagtaatttctctgaaaaactgagggcatccactgtcatgtaccatccagaaggagaatccagcacgacgccctttttttctactaattcttctctgaatttgcctgttctagaagtaggcagaactgaaaataccatcttctcttcaactacacttcccagacctggggacccaggggctcctcctttgccaccagatctacagttagaagaagaaggaacttgtgcaaactctagtgagatgtttcttcccttaagatcacgtactgtttcacgacaatgacactttattgccttttaatttttaatgatgacaaaaaatgttttaaagaatatgactttttataaaatggctgtaatcatttgtttacatttgatgcatgtcttttaaaatgcaatgtaagcatactttgtaaataggatttttagaattaaaaaagcatacttctaggatagctaactgtaaatcatgttgatcatgtactttttagtaatttctttttttcctttttaaggtctttcagtacttttttaaatattttctattttaagactgattttaatagggaatatatctctatttgagaatagacccttactaggaagaacgttttttcctcagtgcatttgtgctagaaattttcaagagtctaatagtctttgccagtcattcagcagcaaattttcagcattaagctgttcctgttcagtaataaaaccggtcactgatgggaaaactgccaatatagaaaaataaaaatctcttttccactccattgtcgtataggcatgtaaacagcctctttttgatactggaggaacacttgatggagtgtgagccacctaagatctcggtttgccaaaattcatttctaattaaccttactaattatactactttgttaggattttcacattcttggcttaatcattttcattcctaaagaaaaatatcttggcctaaacctcagttattacatgtaatttgatgaggtattttttccttttttcttttttttttttttgagacagtcttgctctatcgcccaggctggagtgcagtggcgcattctaggctcactgcaacttctgcctcccatgcttacgtgatcctctcacctcagcctctcaagtaatatagctgagactacaagtgtgtgccaccatgcctcactaatttttgtattatttttgtagagacggtgttttgccatgttggccaggctggtcttgaactcctggactcaagcaacctacccagcgtggcctcccaaagtgctgggattacagacacgagccacctcacctagcctgatgagatttttaaaaaatattttctctgtacttttcattctcttttaatgaggaccaatgtacagttgaaataactggaacaaattatttttggtgtgtgtgacaattctgtttttaatgctatttgaacaagtgggccattagccagatttgtctttttgttgtaaaacaaaatttgactaattttacatgtttataaatcttatgctctcactgtttgtttttatttaaattacaattttatctgtttcctgacattgtctcctatatatttctattattaattgcaaaaacatagaaatggaaattttgctatcaacaataaaatttttttaaaataaaaaaaaaaaaaaaaaaaaaaaaaaaaaaaa

SEQ ID NO: 2300 - DNA, 774 bp, Homo Sapiens
gaatgagattctggaggcaagtaaaagataggacatgtctgagagcttggagaaaatcaagattcagttagacaaaggaaataacgaattggtgaccaagctgaagcagcacaggatgccaccttgactacaactactttccaaaatgaagatgaaagggaataaagaagtatatatgactccactcaggggtgtaaaagcaaaccaagcatcaaagtctactcagctaaagacataaacagaggacagagaaaagtgacagaaacagctaggacgaacaggagggtcagactgctgaagccgaactcttagaaagtgatcatgaagtccagaaacagaatcagaaaatgaagataggagactaccaagacgagccaaaaccgcagcacctagacaaaaacgtacaacttaacctatgcacaatattctcactgaagatctaagtttaggaaagacgatggaggtggaatcctttaagattatgtaccagttatatgctttcaataaagaagaagttacccttgtcacaaacaaacagacaacacacggggccggaaccgcccaaagaggaactcccctcgtagggggcccccaaggcatacacgcagtaccccagagcaaatcaggaacccacacgtgggcgccacataatgacgagatcgtgataaagaaagacaagccacaaggaacgcacgtcataaaaaaggacgaagcacgggcaacacaagcggcaagcgtgggaccaccaggtggaagacggacaccctagaatgc

SEQ ID NO: 2301 - DNA, 3092 bp, Homo Sapiens
acttgcttgctggttttgcttgcatctgatgagtagaaattcagcctattctttgttttggaaatacaaaagatataataatgatatatgaagaagatgctgaggaatgggctctgtacttgacagaagtatttttacatgttgtgaaaagggaagccatcctgttatatcgcttggagaatttctcttttcggcatttggagttgctgaacttaacgtcttacaaatgtaaacttttgatattatcaaatagcctgcttagagacctaactccaaagaaatgtcagtttctggaaaagatacttcattcaccaaaaagtgtagttactttgctttgtggagtgaagagttcagatcagctctatgaattactaaatatctctcaaagcagatgggagatctcaactgaacaggaacttgaagactacatctctgtaatccagagtatcatattcaaagattctgaagactactttgaggtcaacattccaacagacctacgagcaaaacattctggggaaataagtgagagaaaggaaattgaagaactatcagaagcttcaagaaacaccataccactagcagtggtgcttcccactgaaattccatgtgagaatcctggtgaaatattcataattttgagagatgaagtaattggtgatactgtagaggttgaatttacatcaagtaataagcgcattagaacacggccagccctttggaataagaaagtctggtgcatgaaagctttagagtttcctgctggttcagtccatgtcaatgtctactgtgatggaatcgttaaagctacaaccaaaattaagtactacccaacagcaaaggcaaaggaatgcctattcagaatggcagattcaggagagagtttgtgccagaatagcattgaagaacttgatggtgtccttacatccatattcaaacatgagataccatattatgagttccagtctcttcaaactgaaatttgttctcaaaacaaatatactcatttcaaagaacttccaactcttctccactgtgcagcaaaatttggcttaaagaacctggctattcatttgcttcaatgttcaggagcaacctgggcatctaagatgaaaaatatggagggttcagaccccgcacatattgctgaaaggcatggtcacaaagaactcaagaaaatcttcgaagacttttcaatccaagaaattgacataaataatgagcaagaaaatgattatgaagaggatattgcctcattttccacatatattccttccacacagaacccagcatttcatcatgaaagcaggaagacatacgggcagagtgcagatggagctgaggcaaatgaaatggaaggggaaggaaaacagaatggatcaggcatggagaccaaacacagcccactagaggttggcagtgagagttctgaagaccagtatgatgacttgtatgtgttcattcctggtgctgatccagaaaataattcacaagagccactcatgagcagcagacctcctctccccccgccgcgacctgtagctaatgccttccaactggaaagacctcacttcaccttaccagggacaatggtggaaggccaaatggaaagaagtcaaaactggggtcatcctggtgttagacaagaaacaggagatgacccaaaaggagaaaaagagaagaaagaagaggaaaaagagccaggaggaggaagaagacccatatacttttgctgagattgatgacagtgaatatgacatgatattggccaatctgagtataaagaaaaaaactgggagtcggtctttcattataaatagacctcctgcccccacaccccgacccacaagtatacctccaaaagaggaaactacaccttacatagctcaagtgtttcaacaaaagacagccagaagacaatctgatgatgacaagttccgtggtcttcctaagaaacaagacagagctcggatagagagtccagccttttctactctcaggggctgtctaactgatggtcaggaagaacttcatcctcctgcaggagaaagtaaagaatgggaaaatgtctatggatgaagctctggagaaatttaaacactggcagatgggaaaaagtggcctggaaatgattcagcaggagaaattacgacaactacgagactgcattattgggaaaaggccagaagaagaaaatgtctataataaactcaccattgtgcaccatccaggtggtaaggaaactgcccacaatgaaaataagttttataatgtacacttcagcaataagcttcctgctcgaccccaagttgaaaaggaatttggtttctgttgcaagaaagatcattaaagaaggttattataatgaaactcacgaatctacggacattttgctttcagggtgaagcaagcctgaatttggattgcctgctctctttaaagcgaattcatactatgacagcagaaacaaaacttcagatttcagaatttgttattggcaaaatttattctcattatacctgcttcatatgggtatattactattaaaacagaataccatagagtaattgcattatttgaaaattctctcattttacaatgcacttcaccaatgaaacagctaatttccattttgaaaattaaaagaaaacagcacagagaagttaaatgcggtgtagcaaagttatggggtctgcttgagggcactaacctcaacagattattcctcctctccttagaataaccatgaaaatacaaatttacttagcacatttttgctttttaagtagctggttcattttctgaatttctcacattcagagttccagtcattattgttacatcatgtttgcagaaaccttgtcttatttagtgtctatttgcatataaccctgaaaacattattatttgaaaacttttctatatctcaaattaatatacattttcataacctacctttgtattaagacttgcaattttatcaatctattatttcttagaaacaatttactagcttagaatagaaagcaatgttatcgtcatataattttcatgtacaaatgccacaaataaattgaatgtttaaagctaaa

SEQ ID NO: 2302 - DNA, 488 bp, Homo Sapiens
  misc_feature (476)..(476): n is a, c, g, or t
  misc_feature (487)..(487): n is a, c, g, or t
tgaaacaagctaggccaacttggacattggaggatggattagaacatactagctgctccatcatagactatccttactaagcagaagaccttaatagtgcctaaaagtttagttttgaaattggttttttcctaacttttctttgttaaatttatttttattatcttttttaatcttagaagtaatcagagtttgacagctctttagtaactgttaataaaagaatctttcatcacacggataagcaatagattgtgtgggaaataataacacaagagtaaagatgctgaaggactcttctcggaactcaaagtgacagttttgaaggttctggcacagtaggaaaggatcacaacccatataaatggctaatgttgaatttctctggaacactgtcacatatggggcatcaatttggaaaactctcaattgaggccccttccctaagattacaacattgataacctgtccttttnccctctcctcng

SEQ ID NO: 2303 - DNA, 280 bp, Homo Sapiens
  misc_feature (111)..(111): n is a, c, g, or t
gttcggcacagcagaatggtagataattcctgttccactttctttgatgaaacaagtaaagaagaaacaacacaatcatattaatagaagagtcttcgttccagacgcagnctaggaatcatgctggagaagttctgcaactctactttttggaattcctcattcctggacagtccggagcagacctgcactttgttttgagcaaactgttctggtgtggattcccttggcttcctatggctcctggccccctggcagcttctccacgtgtataaatcca

SEQ ID NO: 2304 - DNA, 409 bp, Homo Sapiens
  misc_feature (382)..(382): n is a, c, g, or t
  misc_feature (391)..(391): n is a, c, g, or t
  misc_feature (403)..(403): n is a, c, g, or t
  misc_feature (409)..(409): n is a, c, g, or t
actaagcatagctacaaaaggaaaagccacatggaagcagagacaaaggcaatcccgacacacagaggcatgtttgttgcggctcagggtttctgtttttcaagtgttcagagacgaattccagcaagacttctggtttgagtcaagcctttcaaccgaggtgcttggcatacttaacggaaaaagcgagtacattcagatttagttttgctagatattaaactagaaaactggatgacagtaaaaccaatacagaaacaaaaagtcatgtttccagtaaagaaccggtacacacaagcaggttttgcttattaatgtagcagggagagcatgggaaatcggagtttcagactctttagaaaagaccaaagggcaggggganggggagagnagaaagggaggnatgcan

SEQ ID NO: 2305 - DNA, 502 bp, Homo Sapiens
cacgtggctcattgaaggacagccaaatagaataatgagacttcgtttcaatcattttgctacagagtgtagttgggaccatttatatgtttatgatggggactcaatttatgcaccgctagttgctgcatttagtggcctcattgttcctgagagagatggcaatgagactgtccctgaggttgttgccacatcaggttatgccttgctgcatttttttagtgatgctgcttataatttgactggatttaatattacttacagttttgatatgtgtccaaataactgctcaggccgaggagagtgtaagatcagtaatagcagcgatactgttgaatgtgaatgttctgaaaactggaaaggtgaagcatgtgacattcctcactgtacagacaactgtggtttttctcatcgaggcatctgcaattcaagtgatgtcagaggatgctcctgcttctcagactggcaggggcccgaatgttcagttcctgtccagctaacc

SEQ ID NO: 2306 - DNA, 394 bp, Homo Sapiens
ctgtccagagaattgcttttgtaaatgctccacaacgtatgggcaaaagtttaaggactactgcctgatgtaccaggaatcctgagttctgtgaaaatctgttcattccaaatctgttaagcatttccaaacatccagagaatggtttcactgttgagggtgcatgtggcagaatctgtctctctctgcacctgtcttctgttaccatccctgggacagtgacagattttaagccagccaccagaattcttttcgagttaaccatttcttagtttctgtaaattcatgacttgtctttactgaactacagccgggtttgtaggacttccaacatctacactggctggctctttcaccattggggaatttcactgtggggtatttttatagggtt

SEQ ID NO: 2307 - DNA, 103574 bp, Homo Sapiens
gatctcacatccagattgaatataagtataatgggcagatttatcactattaggaggctactgtacattaggcccaggctggcccctgagggccacatggtaactaaggcagacaagaccataactcagatagaataatagtctccaatcccatccaggttgctgtgaatgccattaattcattccttttcatggctgagtagtattccaccatatatatatgtaaaatcagtttctttatccactcattcattgatgggcatctgggttggctccacatttttgcaattgcaaattgtgctgctataaacatgtgtgtacaagtatctttttcacataatgacttcttttcctttgagtagatacccagtagtgggattgctggatcaaatggtagttctacttttagttctttaaggaatctccacactgttttccatagttatactagtttacattcccaccagcaatcagggaaatgcaaatcaaaaccacaatgcgataccaccttattcctgcaagaatggccataatcaaaaactcaaaaaataatagatattggcatggatggagtgaacagggaacactttccttgagttttaactccagactggctcctttgctgtttttctggtggggctcttaccacatttcccacagccattggctgtgtgctcctgcatacttggatgctcctctcctgcctgggccccaccaggacccctgagatccaggagccgtggcttttgggggctggtagagaagaaacagggagctacgtgaaggccaatggcagaaaccaagagagtttcaagaaagcaagaaagagaaaccagctctgaaaatagcaaaaggaacaacgggaaaaaataaaatagtttcatgtaacctaaaaacagacattgagtcttcgaatcaaattgaaagcacttgctagcgtcagaggcatgtgaaccagagcaactccatcttgaatggggctgagtaaaatgaggctgacgtctactgggctgcattcccagacagctaaggcattctaagtcacacgatgagataggaggttggcacaaaatacagatcataaagactttgctgataaaacaggttacagtaaagaagccagctaaaacccaccaaaaacaaaaagtggcgatgagagtaacctgtggtcatccccactgctcattatacactaattagaatgcattagcatgctaagagacactcccaccagcgccatggcagcttacaaatgccatggcaacatcaggaagttaccctatatggtctaaaaagagaagacatgaggccaggcacggtggctcacgcctgtaatcccagcactttggaagaccaaggcaggcagatagggtcacctgaggtcaggaattccagaccagcctgggcaacatggtgaaaccctgtctctactaaaaacaggaaaaattaactgggcatggtggcacgcacctgtaatcccagctactcgggaggctgaggcaggagaatctcttaaacccgggaagcagaggttgcagtgagccaagattgtgccactgcactccagcctaggcaacagagcgagactccatctcgaaaatttaaaaataaataaataaataaaggggaatatcacaagcaacgtatggcaacaaattagacagcttagatgacagctaaaaattcttagatgaattaccaaaaccaactcaagaagaaatagaaaatctgaatagatgtataacaaataaaaagagatttgtaatttaaaatactcccgcaaagaaaagctcaggcctagatggtttcattggtgaatttcacaaaacattaaagcataaataatattaattctctacaatctgttccaaaatatggagaaagggagcactttcccagcttattatatgaggtcagtattaccctaatatcaaagccagacagtggcatctcaagacaactagagaccaatctctttcataaatatgatataaaagtcattggtaaaatatcagtaagcccaatacagcaatatataaaaagggttatacaccatgatcaagtgggatttaccccagaaatgcaagattggtttaacttctgaaaatcaattaatgtaacacaccatagtaaaagaataaattttattcatttattttaaagatggggtctcactctgtcacccaggtgagattgcagctcactgcagcctcaaactcctgggctcaagcaatcctcctgccttggcctcccagagtgttgggattacagatgtgagccgttgcacctgcccctgtaaaagaagacactttttttttttttgagatggagtctcactctgtcgcccaggctggagtgaaagactaatttccgggtgggcgcggtggctcacgcctgtaatcccagcactttgggaggccaaggcaggtggatcacgaggtcaggagatcgagaccatcctggctaacacggtgaaaccccgtctctactaaaaaatacaaaaaaatcagccaggcgtggtggcgggtgcctgtagtcccagctactcgggaggctgaggcaggagaatggcatgaacccaggaggtggagcttgcagtgagccgagatcatgccactgcactccagcctgggcgacagagcaagactctgtctcaaaaaaaataaataaataaaagaaaagaaagactaaattcttcctggctaagatagggaacaaaacaagaatgttcattctcaccacttttattcaacagtatagtggaggtcctagccagtacaattagtcaataaaaagaaataaaaggcatctgggttggaaaggaagaagaaaaaactgttttgacccacagttgacttaaatttgcttgtagaaaactctaatgaatccacaaataactactagaagaaatgagtccagcaatgctgcacaagatcaatatccaaaaatcaattgtatgtcaataagctaccaatgaacaatcaaaaaatgaaattaataaaatgaattcattcccaataggatcaaaaagaataataaattcaggctgggcgtggtgacttatgcctgtaatcccagcactttgttaggccgaggcgggcagatcatctgaagtcaggacttcaagacgagtttgggcaacatggtgaaaccctgtctctactaaaaaaaaatacaaaaatcagctgggcatggtggcgggtgcctgtaatcctagctacttgggaggctgaggcaggagaattgcttgaacctgggaagtgaaggttgcagtgagccacgatcgcaccactgcactccagcttgggtaacagagagaggctatctcaaaaaaaaaaaaagaagaaattcaattaaaaaaagtaataaatttaacaaaaatacaagagttgtacaataaaaactataaatcttggctggcggcgtgatggctcacgcctgtaatcctagcactttgggaggccgaggtgggcggatcatgaggtcaggagatcgagaccatcctggctaacacggtgaaaccccgtctctactaaaaatacaaaaaaattagccgggcgtagtggcaggcgcctgtagtcccagctactcgggaggctgaggcaggagaatggcatgaacctgggaggcggagcttgcagtgagccgagatcacgccgctgcactccagcctgggcaatagagtgagactctgcctcaaaaaaacaaacaaacaagcaaacaaacaaactataaatcattcctttaaaaatttaaagatctaaataaatggagtggcatcccatgttcatggtttggaaaactcaatgttagcaaaatggcagtactcccctaattgacctaaagagtcaatgcaatctttatcgaaacctcaactggcttgtttttttttttttgcagaatttgacaagttgatcctaaaagtcatgtggaaatgaaaaggatgcagaataacctagcaatgttgaaaaagtaaaataaagttggaggacttccagttaccaatttcaaaatttattcctgattacaaagctataggaataaagacagtgtggtactggcataaggatggacgtatagctcaatgaagcaaaattgaaagtccagaaataactttcatatttatggtcaagtgatttttgacaaaagtggcaaaaccattcaatgtgaaaaggagatccaacaaatggtgctagaacaattggatctctctctctctctctttttttttttttttctttttggagatggagcctcgctctgtcacccaggctggagtgcagtggcatgatctcagctcactgcaacctctgcctcccgggctcaagcaattctcctgcctcagcatcccaagtagcttggggctacaggtaaccaccaccaagcccagctaatttttgtatttttagtagagacaggtttcaccatgttggccaggccaatcttgaactcctggccattattttcaaatgattctcacatgctctgaaccccactcattcatcattattatctctttttttttcttgagacaaggtctccctcttgtccaggctggagtagaggggtgcgaccatggctcaccacagcctcaaattcctgagcaaaagcaaacctcccatcacaccctcccaagcagctgagaatacagaagcctgccctcagagcctgatatatatatatatctgtctaaaatatatacattttttttctagatacatggtcccactgtattgatcgggctaggtttcactatcctggtctcatgtgatcctctccccttagccattatcaccttatagagtgcacattttgttccatgcactgttcaataccacttacatacattaatttaatcctcacaatgaaacaagagagaaataattattattctcattttaaagatgagaaaactggtacacagagaggttgcacaaggtgatattgctagttagtggcatggtggggatccaaacctaggtagtctagttccaaggtgtgtttattcagcccatgtttactgagcacctactactatgtgttgggctctgctctaggtgttagagctatagacagtataaaagaactacctcgcccccattaagacatctctcctggctgggcatggtggctcattcctgtaatcctagcactttgggaggccaaggtgggtggatcacttgaggtcaggagttcaacaccagcctggccaacgtggtgaaaccccatatctactaaaaatacaaaaataagccaagcatggtggtgggcacctgtaatcccagctactcgggaggctcaggcaggaaaatcacttagaacccaggaggtggaggtttcagtgagccaaggttgcaccattgcactccgccctgggcaacaagagcaaaactccatctcaagaaaaaaaaaaaaaaaagacatctctcccatatctctctcttattgagacatggtctctctcacctttcccaccaaaaattttttttaaaaaaacaaaaccctttcatcactcagccccctcaagttatggatctggtttttggtttttaattccagagacaaaaaagggggcagaacatagacccatgctaccatcttgacagagtctccatttcagttccatacgctcaagtccctcctatctttaaaacaaacaagcaaaatcatcattctcacccttttgcatctaccctagtcctgcctttcctggctcttcataggcaaacttttttttttttgaaacggagtctcactctgtcacccaggctggagtgcagtgacacaatcttggttcactgcaaactccacctcccgggttcaagcaattttctgcctcagcttcccaagtagctgggattacaggcacccaccaccacatctggctaaattttgtatttttagtagagacagggtttcaccatcttggccaggcttgtcttgaactcctgacctcgtgatccacccaccttggcctcccaaagtgctgggattacaggcatgagccactgcacccagccataggcaaaattcttgaagcaaatgtatacactgtctccaattccacacctcacactcaatccatggctctctgaaaccaggtgttggcttacaacattccagaaactggaacccatgttcttctcagctgtggcactgctctccttactctttcgcctccaagctcttggaagaaatgtctacattgtctatactacccctttcttgctcactgcctggatccctgcaatatggccactgcttctgctgatcctctgatactgcccttaccaaaggagctaattcattcccgccttcagagctggagtacatgtctcagggcttgacacacttgtccatgtacttgtttctaagcctgtcttagtttgtttgttccactatccaagggacttgccagcaaccaatacacatgcttcatctcacccaaccttcacttctgtcttcccccacctcggcgccccatgttctgttgtcctggaacatccacttggtcctttgaaaggctctgaatcaatttcctccatgaagaatatcctgacttctggattgcatgtgttgtcactgttcttctaactacttctaggtccaggactggtcttaaatacccaggttgtgtcttggactagccatactaaggtctacatttgtggactgcacagtgtcacctcccacccacccccaacttcctgaaaagtggctcctcaaaccctctactcccctagaaccaccagctaaaggaagcatcagctaaaaccccacagtattagcattcattaaaagctcctacctgaatcagcaattactatggtatttgaaaatgttctctaatggtgcataacaaattccccacaggtattaactcacagttctgtaggtcagaatggctgcttctctgctcagaatctaccaaagctaaaattaaggtgtcagctgggctgggttctcatgtggagctcaggatcctcttccaaatgaatgtgattacagcaggattcacatccttgctgttgcagtactaaggaccccgtttccttgctggctgtcagctgggagccattctcagccagaggctgcctggattcctccctacgtggccctggtgacatcttcatgccagcaatggagacctttgcttgcctccaatcctctcacacctgaaacctcttttgccaggaagactcagtccttttcaagaactcacctcattaggtgaggcccccagaggatattcttcctaacttaaagttaactgatttcagaccctacctacgtctgcaagacgccttcccagcagcatacagactagtacttgactgagtgactggagaaggagtgtgtacaccagggagcaggaatcttcgggtcatctcagagttctgcctaccacattggggatttcctgttccatcgttccattaggttgtgttctactttaagaaagatcttcccccttttccccttctttctctattctttccttttttctttctgtcagcataaaccaaggaattcttttttttttttttttttgtcattttttcttgagatggagtctcactctgtcacccaggctggagtgtgcagtgtgatctcgaatcactgcaacctccgcctcccgggttcaaacgattctcctgcctcatcctccctagtagctgggattacgggcgcctgccaccacacccggttaatttttgtatttttagtagagacggggtttcaccacgttggtcaggctagtctcgaactcctgatcgcaggtaatccgcccgctttggcctcccaaagtgttgggattacaggcatgagccactgcgcccagccggaattcatttttaattcaagactttacaatccacttctgacactactcattttcctcccctcagtaaatctcttactcttactgggcgtgtctagtttctctcttccacaactcctgggagaccctcctgacatcgcccatccgcgcaggctgcagagagagatcagtgggaggaggaggagccgagagccaccacttaggcttccaaccaatccctaccagggtgggcggagcccacttcctgattggctgcactctctgtgtcttggggtgggcgagaacggcggggccacgccccctaactaggcagccaatcaggacgtggggtgctggtttctccattgcgaagcttcagcctttgatggtttgggtcctgggagtctggttagtacaaggggaagcctagtgggtctggcgctccgttttcaagacactcggagtccgtctttgaggggaaaggtcatggccctgaaaccaccttctgccacccagcctgctcccaacgcgccagctaccccagacgccccccctaccacaggtgatccaggtgcttcagctgccccaggttctcccactaccacaggtggtccaggtgccccagctgaggtgccccaggagccgcaagagcctacacagacaccagaggaactagcattttacgccccaaactacctatgtttgaccatctttgctatacttttattccctccatttggattggcagctttgtacttctcttatgaggtaaaataatgcccaagtcatagcccccgtccttttttttttttttttttctttttgagacccagtctcactctgtcccccaggctggagtgcagtggtgcaatctcggctcactgcaatctctgccttcccggttccagcaattctcctgcctcagcctcctgagtagctgggattacagacatgagccacagtgcccggctcatttttgtatttttagtagagacggggtttcaccatgctggccaggctggtctcgagcttctgaccttgtgatccacccgccttggcctcccaaagtgctggcattacaggcgtgagccactgcacccagcctaccctgtcctccatttggcccctgcatctgctcctatcctgggacctgcataggggctttccctcagtgactgcaggtctccaaccgttctccccagggttcctggacacagaaacccacatctatgcttccacccctacagactatgaaggccaaccagaacagtgaatgggaagaggcttacatcaactcaggccgaactggttggttcggtgcattcgtggtaatgattggcttaggcatcatttatggcttggtcctatattaatgaagtctaggcatagcaacccaggggtccgctccccaaccgagccactcaccaaacactaaccagccaagtcagccatcaggcaagaaattcaaccgctgagacatctagccaagaaatcctctaaccaaggaactcaacattcaagaaacccaccaacccaggaacacacagaccacctgcctgtgctacttcaactcactcagctccagagctgtcttcgttcaccctaggggtccacacttcatgccctagatccctttagctccttgacactgggctgttctttcagaggaattttaaaccaaaaaactggaatggaatgttctggtttcctgtggtgtgtgtgtatgtgtgtgtgtcaacatgcccatgattgttttctgggtcagtggtcagtatctgtgtttccctggagctgtttcctagactgtgaaaatcagaatgtcccaatggggaagcccacagacatagaattcaggcagatgtcagttaaaaacttacctctgacactgaaaaactgtatagccctgaacagatacttttcttgagcatagttcctttgtctctaaagcaggcataattgccaatgtggggatgatatttagaaatctgaactgatgtttattctctaggggtcttctcatttgagctgggattggagatgtctagtgtctcagagcagcaataagaaaacagaaacctcttccagcttctgacatccaaatgtcaagctcttaggagaagaatggaaagtcctcaagaaatgcaaatagctttggcagaatagctgatgaagaccacctctcccccctccagaaaggcattggttccccattcatggaaaagggaatgtagagagagattagacaatagtacatccataaggttcctggaatctgcatctgaggaagaggggcgtcagagaccccagctgttatctataatccctcctcacagataaggcctagagaggctccaagttctcaaagaagatatgctacatggtgtagacatttacaaagaaatgacctcagacagccaaggaggataccccatggcccagcctagtgagaagaaggtgggttccataggaatcccaagtgccaggtggagacagaactgtagaggaaaactagggataagcagggagccatcgtgcatgaatcaaaacagagatctagactgacaccatgggccacagacaccccggggctgcctctgatgcccaagcttcatggacaaccccaagttcagaaccagatgaatatttagcacaatatttagcagaactaagtttccaccaccatggagaatggggattctcagtagaaagtcaatggagctgctgggcaagagactgctcactgtcccccagagcccatcgcctctttgttctgggaacattgcctggccacgtctcagaggttcccctctgcagccatgaaatgtgctttggtcctgtggaatgtgagcagaactgacatgtaccacaaacaaacctggcttttcaatgtctcctgggacactcctctaaactcctcctcccccggccaacggggcaagggatacccatgtgatgatttagaaggccacatgttgtagacgtggcaaagcccccattagcctgggtccctgaaccattctaggaacagcctcccttcccccaactgcctcatgtggtcaagcagaaaatagactaccatgttgacaaatgacatgcttggcctgtttccacagcccaatccacccaaaccagtgcagatgcaggagaatagagttctatttcttgcacatctgggattacagcttcaagttcatacccaacagagacatccatcttgttgggtggtctataggaaataataatagaaggaaacaacaaaggccctagtccaccttaattgtaattgttgtgatgctgagtttgtctcctctgtgggcttgggtgtctgggcagatctcatgtgtttgtgggacaatgctctgggttatggggatgcctgcagataggatgatgcctaattgtctgtcatgttagcagatctagagggttagccatccctgtccctctccagatccagcccaggctgggcctgtcacattcagctgcaaagccatgtcaggttaggatggtccatgtcaacatcagcaggcagacccaagtgtcaccttctgctacaggccttggaaagccagccagcctcctccacttcagctcccagacttcatccaacctgaatttcactctcgggtatccaactggtatttagcaccaggtaaacacaaaacgaggccaggcacagtggctcgtgcctgtaatttcaatgctttgggaggctgagagaggaggatggcttgagcccaggactttgagaccagcctaggcagcaagtcgatagataactcttttctacaaaatttttcaaaattagccaggcgtggtggcacacgcctgtagtctcagttactcaggagggtgaggtgagaggatcactttagcccaggattttgaggctgcagtaagtcatagtgatactactgcacttcagcctgggggacacagctagactttgtctccaaaataaataaatgtaaaaaataaggccgggtgcagtggctcacacctgtaatcctagcactttgggagactgaggtgggaggatcacctgaggccaggagttcgagaccagcctggccaacatagtgaaaccctgtctctataaaaatacaaaaattagccactgtggtggtgcgtgcctgtaatcccagctactcgggaggctgaggcaggataatctcttgaacccgggggtggaggttgcagtgagcagagattgcaccacttcactccagcctgggcgaaggagtgagactcaacctcaaaaaaaaaaaaatcttatctgactttgattgcattacaatcaatttagttatcagttttgggagatttagcatctttatgataagccttcctattcataaatatgatatatcaaataggacttgtacatctttagctttattttatgtattataagcaatccttttttccattacataatctaaattattattggggtagaagaaaggtattgagtttccaatgttgatatcttgtgtggcaaacttactgaactttcttggtgtaataattcatcattttacacacttacattgtctatgctaaatttgaattatttcttaacaattttaatacctcattatatatgtatttttttagttcctgggctaaacctttcagcaaaatatgaattagcatcataatcttgtttccatccttgtatgggttagttctattgttttactattaagtcaggcagttgatgtagatttctgataaaaatttcatcttttttttttttttttctgaagcaaactctggctctgtcacccaggttggagtgcagcggcacaatctcagctcactgcaatctccgcctcccaggttcaagcgattctagtgcctcagcctctatagtagctgggaccacaggcacgcaccaccactcggggctaattttttgtatttttagtagagatgggatttctctatgttggccaggctggtcttgaacccctggccttaaattatctgcctgcctcagcctctcaaagtggtgaaattacatgcatgagccaccgtgaccagccaaaatttcatcaattttgttatgttttcttctattcctggcttgccaagattttttaaattagaattttatattgaggctaggcacagtggctcatgcctgtaattccagtactttgggaggccaaggaaggagagtcatttgaggccaggaatttgagaccagcctgggcaacatagctagatctcgtctctactgaaaaaagaaaaaaaaattagctaggcatggtacctgtattctcagctactcaggaggctgagatgggaggataacttgaacccaggagttagaggcagcagtgagccatgatcacacccttgtactccagcctgggcaacacagcgagaccctgtctcaaaaaaaatttgtgttgaatcatattaaatacttttcagcatctattaacatgatcatacgagattttaattcaatcctttaacaaagttattcacaatgaaccattcttatactcttgggaaaaccttactgggtcacaatctattattctttttttttttttttagagacagagtcttgctctgtcgcccagactggagtgcagtggcacgatcttggctcactgtaagctccgcctcccaggttcacgccattctcctgcctcagcctcccgagtagctgggactacaggcgcccaccaccacacccggctaattttttgtatttttagcagagacggggtttcatcgtgttagccagatggtcttgatctcctgacctcgtgatccgcccgcctcagcctcccaaagtgctgggattataggcgtgagccaccatgcccggcctctattattcttttaatatgtgatggatatggtttgcttatgccttatttgggtcctacatagttttcatctgggggctgttctcagtcctttgcattggggcagtgctggcaatgcagaatgggttgagaagcattcaatgtgtttctgtgttctggaaacatttctatgtcatgggaattagctgcttcttaaagattggagtgggccggacatggtgcctcatgcctgtaatcctagtactttgggaggctgaggcgggtggatcacctgaggtcaggagttcgagaccagcctggccaatatggtgaaacccccatctctactaataatacaaaaattagctgggcatggtggcacacaactgtaatcccagctgctcgggaggctgaggcaggagaatcacttgaacccgggaagcggaggttgcagtaagccaagatcacgccattgcactgcagcctgggtgacaagagcgaaactccatctccaaaaaaaaaaaaaaaagttggagtgaacatgcctgcaaaatcttctgggcctgtaatctttttcgtgtagcagattttgagtactttgtcttcactatgatggtgaaagcagcaactctcggagtcaagtacaagccactgttatgagcagcttcggagtattgattcttttggtctccacactaaccctatagcctgcattcttacagactgaggataaagcacagggagctggaaagacacagtgcaggtctcacagcgaattcactgaggggccaggattgggaaccaggaaatctgccaccaaaagccgtgttcttaagcactaggtggacaacactgcctcccatcgaccgttagtagcaattcaatctttttacctgctggagtcacttgttaatcacttacctttctcttaacaaatcatttttattttcgacatagaagctaacttgaaggagcgcccactggcccagagtggtacaacttaaacatcaaaaatattaataacggccaggcgcggtggctcactcctgtaatcccaggactttgggaggctgaggcaggtaaatcaattgaggtcaggagttcgagaccagcccggccaacatggtgaaacctcgtctctactaaaaatataaaaattagccagccgtggtgacagtcacctgtaatcccagctactcgggaggctgatgcaggagaatcgcttagagctcgggagtcggaggttgtagtgagccgagatggcgccattgcactccagcctgggcaacaagagcaaaactccgtctcaaataataataataataataatagtaataacaataatagatttaaacacaccaaatatatatcatatttaatgatgaaggatggaatactttccctataagatcaacaacaaggaaaggatgtctgctcttgacactcctatttgacatagtgctggaagttctagtcactgcaagaaaaaaacgcaaacagggcccggcgcagtggctgacgtctgtaatcctaacactttgggaggcaggaggatcacttgagactaggatgtcaagaccagcctaggcaacacagcatgaccccatctctacaaaaaatattaaaaaattagccaagcatggtggcacatgcctgtagtcctacctgctcagggggctgaggcagggagatcacttgagcccaggactttgagactgcagtgagctatgatcacaccaacactgcactccagcctgaggaatagagtgagactctgtctcaaaaaagaaaaaaaggcatttagattggaaaggaagaaataaaactgtatctgcaggtgacatgagatatgtgtgtgtgtgtgtgtctgtgtgtgtagttgatgcaaaaataattgcggtttttgccattgaaaggaatgactgctgggcatggtggctcacgcctgtaatcccagcactttgggagggtttttttttttttttttttttttgagatggagtctcactctgtcacccaagctggagtgcagtggtgtggtctcggctcactgccagctccgcctcccgggttcacgccattctcctgtctcagcctcccgagtagccgggactacaggcacccgccaccacgcccagctaaatttttgtatttttagtagagacggggtttcaccttgttagccaggatgggctcgatctcctgacctcgggatctgccctcctcaacctcccaaagtgctgggattacaggcatgagccaccgtgcctggcgtttttcttttcgttttttttttttcttttttttttttttttggagatagagtctcactctgtcacccaggctggagtgcagtggtgtgatcttggctcactgcaacttccacctcctgggttcaagcgattctcctgcctcagtctccctagtagctgggattacaggcgcccaccaccatgcccagctaatttttgtatttttagtagagacggggtctcaccatgttggccaggctggtcttgaactcctgaccttaggtgatccacctacctcagcctctcaaagtgctgggattacaggcgtgagccacagccctggacggatgtattttcaatacatgtctttataatgcatgtgaaagctaacgcatacatgggagacaatgaagggaccaatatggtggaagttttccatattccacttgaagttgcaaaatattcaatctaggtagactatagaatgtttaagtgtgtttaccataatccgtagagcaatcacttaaaacttgcaaagatatatagtgaaaatcacaataaataaattaaaatggagtactaaaatagtatttgaataatccaaaagaaagaaggaaaagggaaaacaaggaacaaaacacagaaaagtggaaataaaaaacaaataatagtagacctaaagcaaaacataccaataatcatatttaaggcacatgatctaaacacacaagttataaaatattttcataatgcacttaaaaaaaaaatagccagagccgggcgcgttggctcacacctgtaatcccagcactttgggaggccaaggcaggcagatcacgaggtcaggagaccatcgtggccaacaaggtgaaaccctgtctctactaaaaatacaaaaattagctgggcgtggtggcggatgcctgcaatcccagctactagggaggctgaggcaggagaatcgcttgaaccagggagtcagaggttgcagtgagccgagatcgcaccactgcactccagcctggcgacagagggagactccatctcaaaaaaaaaaaatagccaggttcaaaggctcatgcctgtaatatcagcacttcgggaagccgaggtgggtggatcacttgagcccaggagtttgagatcagcctggaaaacatggtgaaactccgtctctactaaaaatacaaagaagttagctgggtgtggtggcacacgcctatagtcccagctacttgggagactgaggcaggaggataacctgagcccaggaagtcgaggctgcagtgagccatcatcacatcactgcactccagcctgggtgacagagtgaggccctgtctcaaataaatacatacataaataacttgagcccaggagttcaagatcagcctgggcaacatagtgagaccccatctctgcaaaaaatttcaaaattaacctggcatggtggcttgcacctgtagccccagctactcagaagtttggggcaggaggttgtttgagcccaggaggtcaaggctgcagtgagccgtgttcacaccactacactccagactagcaacagaacaaaaccttgtcttaaaaaaaatagaagtaggccaggcgcggtggctcactcctgcaatcccagcattttgggaggccaagatgggctgatcacctgaggtcaggagttcgagaccagcctcactaacatggtgaaacccagtctctactaagcatacaaaaattagccaggcatagtggcaggtgcctgtaatcccagctacttgggaggctgaggcaggagaatcacttgaatgcaggaggcggaggttgcagtgagccgagatcacgccattgcactccagcctgaacaacagagtgagactctgtctcaaaaaataaaaaaattaaaaacttaaaaaatagaagtaggccgggcgtaatgcctgtaatcctagaactttaggaggccaaggcaggcggatcacttaaggtcaggcgttcgagaccagcctagtcaacatggcagaaccccgtctctactaaaaatacaaaaaattagccaggcatggtggtgcgcacctgtagtcccagctactcaggtggctgaggcaggagaatcacttgaacccaggaggcggaggttgcagtgagccaagatcacatcaccacactccagcctggaagacagagcaagaagaaagaaggaaaagaaagaagagaaggaaaaggaagaaaagagggaagggaagggaaagggaaagggaaaggggaaggggaagggaaggggaaagggaaagggaggggaggggaagggaagggggaaagaatgaaggaaagaaaggaaaggaaaggaaggaagaaaagaaatgattgtttgcttggtgttggaggggcttgagggggtggggaaaaaggggggaacccacacatttgatcaaagaactcttctgtgttgactgttgtggtatgagagcagagaaaatgcattgtgtttttcctgaaacacaagactccgaggcctacatcactcttgccccaagtagtgcttttctctcaagatgctcaggaggaatctttaaacaaagatgatcaaggaaatgaggcttatttataggtctgttttgaaggtggaaccagggattcctcaattggccaatcacttgagagagtagaaggagctgtcaccccatcaaaccaatcagaagccaggtgttggttcccaccctatgacataccacctccaattggccagtagaagtagagagacaggctaggaggcggggcctgcctggccgccatggtaatcccctgtggttggtgatcaaggaagagcatagtgccagacctaggtgccctcctgggaatgttccaggagggcaggagtaggaggaggagtgttagagtagaggggaaatgatgagagcagaaagggtatcataaaggaacctcaggggtgatataagtggacacagacatatgtcacaagggcacgggtttagaacaggaaggctgttgtacgtggttggagagggagttcaaagagtcagaaagctggtttcagaagttgagaggtgttagagggagacagggcaggactttgtaaggtgacaaagaagtagagactgaaaccctgtctctactacaaatacaaaaattagccgggcgtggtggcgggcgcctatagtcccagcaagaggagtgaataggtggtcaaataaggtcttagaggagctaaaggggcagggagcttatgggcgaacaggaaaggtttacagcaggaccccgcaggattcatagggacgaagtaaaggatattataaaaggaacagtgagagagctaacagaagttttactttggggggcagaggtgggaggatcacctgagcccaggaattcaagaccagcatgggcaacattgtagcaaaaccccatctctaccaaaagaaaaaaattttttttttttttttttttttttgagagagtctcgctgtgtcacccaggctggagtgcagtggcaggatcttggctcacttcaacctccacctcccgagttctgcctcagcctcccaagtagctgggattacaggtgcgtgccaccacgcccggctaatttttgtatttttagtagagacggggtttcactatgttagccaaggtggcctcaaactcctgacctcaggtgatccgcccacctcggcctcccaaagtattgggattacaggcgtcagccaccacacccagcaaaacaaaaacaaaacaaaacaaaattttagttagctgggcctggtggtgtgcacctgtagtcccagccactcaggaagctgaggcaggaggatcacttgagcccaggagtttgaggctgcactgagctatgattgtgcctttgcactcctacagcctgggagagaagaccctgtctctgaaaaaaaaaaaaaaaaaaaaaaaaaaacagaagacaaagaagttttacagggtgagagttttataagggaacagtgaatttataatgaaggttttatacccaaacacaggtccagtcactccacgcttgcagagtccaattaacaagagcaagttctggtagaaagaaggtgactttattccagagctcaggtgaggggaagaggtacaggttcctgccttaagggtattgcttcagctttcaggacagaaagcagggacttttaaaggggggcttgatgtgaatgacataaaggtggggggcaaggaggtgtggggtctatgtgacatgctttgatgtcttatctatcaggtgttctagctgtcaccatcgtgagaagagaaattgaccattgtctcaaggcaatctgatgggagagaattctgggggtgcctgatttgtttcaaggttcagtccctggaacttctaagtaaacatattgttagataagcttgccatgtagggaggttacagttgcattcctaaagagttaagtaggagatggggggaaaagaaaaaggaaaaaaatccttttttttctttaaaaatggggtactctggccaggcacagtggctcaaacctgtaatcccagcactttgggaagctgaggcaggcagatcacaaggtcggaagttcaagaccagcctggccaacacagtgaaaccccgtctctactaaaaatacaaaaattagccgggcgtggtggcaggtgcctgtagtcccagctacttgggaggctgaggcaggagaatcgcttcaacccacaaggcggaggttgcagctgagctcacgccactgcactccagcctgggcgacacagcaagactttgtctcaaaaaaaaaaaatgtggtactcaattacagtttcccactgtcaaattccattccatttctatgggatttggatgccacattcatgctggctacttcctgctgaaagagggcattgtgattagtcatcagaatggaaccgatccacttggagttggaaatatttatgagtagttggaccaatatggtgtaaggtctggaaagtctctggggaagtctgtcttgcattcccatatagaaggtgaaacagcagaaaaatccacagcagagaagtatgtctatcattgcaactagggccaaagttgtaaatagcttctttccaggtgagaacagtcctcacctgcaacaggatgccaaccattgacctggtgataatgtggggtcagacatagctttgatttttaggtgcatgtctctcagggctattgagacatttactgaattatctgagatgtgtacacagcatttagtcttaattgtcaggcacattcccagctgtcaattgtacctggagctcctgtggagatatgatgacagggtggttaaacacatatatttaacaggttacaagaggagctatgggccgggcgtggtggctcacgcctgtaatcccagcactttgggaggccgaggtgggaggatcactcaaggccaggagttcaagactagcctggccaactaccagaccgatgaactcagtctctactaaaaatacaaaaattagcgggcatagtggtgcacacctgtaatcccggctcctcaagtggctgaggcataagaattgcctgagcccaggaggcagaggctgcagtgaggcgagatcgtgccactgccctccagcctgggtgacatagtgagactttgtctcaaaaataaaaaataagtaaataagaaagggctgggtgtggtggctcatgcctgtaatcccagcactttgggaggccaaggcaggtgggtcacctgaggtcaggagttcaagaccagcctggccaacatggtgaaaccccaactctactaaaaatacaaaaattagctgggcatggtagcacatgcctgtaatcccaactactcaggaggctgaggcacgagaactgcttgaacccaggaggcagaggttgcagtgagctgagatcacaccattgtactccagcctggagaaaagactgagactctgtctcagtaaataaataagagcgatacagaggccaggcatggtggttcacacctataatcctagcactttgaaagatcaaggcagaaggatcatttaaggccaggagttcacgacaagcctgggcaacataatgagattccatctctacaacaacaacaaaaatcaaaaattagctgggtgtggtggtttgtaccagctacgtgggaggctgaggcaggaggattgcttgagcccaggagttcgaggctgcagtgaactgtgatcatgccagtgcacttcagcctgagtgagagagcaagaccttgtctcaaaaaataaaagggatttgccgggcgcggtggctcacgcctgtaatcccagcactttgggaggctgagacaggtggatcacgaggtcaggagattgagaccatcctggctaacacggtgaaaccccgtctctactaaaaatacaaaaaattagccaggcgtggtagcgggcgcctgtagtcccagctactcgggaggctgaggcaggagaatggcatgaacctgggaggcagagcttgcagtgagccaagatcgcaccactgcactctagcctggatgacagagcgagattccgtctcaaaaaaataaataaataaaataaaaaataaaaaaaagggatagagagaggttagaggagacatggtgggggttagagaaagtcaatgagaattttaaatggggtcaatgaagatcatatagctgccaaggagagatgtgttagggtaagtagggagagagtgagaaaggattgttagagttcagaagccatagtgagacataaccaactctctgccccccaggtgtttgaactgatgtctgatgaggatgaatccagcgactacctctgcctgtccatcctgggcctcttctgttgccttcccctagccatcccagccgtgatcttttcttgcctggtgggcacctgcatcatgccaatccttcaccctccctctccatcttgcccctgaccctgactcaacttcttccttgttctcccttctgaactaggagcctgagcaacaccagcacctcctgtgggttcagacccccaccctgagtccttacagttccacagcccaccctcacccaacaactgttttttttttttttgaaacagagtctcgctctgtcacccaagctggagtgcagtggtgagatctcagctcaccgcaacctccatctcgcaggttcaaacaattatcctgcctcagcttcctgagtagctgggattagaggcgcccaccaacacgcctggctaattttcgtatttttggtggagctgggtttcaccatgttggccaggctggtcttgaacacctgacctcaggtgatctgcccacctcagcttcccaaagtgctgggattacaggcatgagccaccatgcccggccacgcaataactcttttatactcatctttccctgttccctctctcctaaaactcagacaaagtttgtattgtagacaaagaactacaataaatccagtgactatgagctggcagccaagacctccaaacaagcctactactgggccatcgcgagcatcactgtgggaatcttaggtaccatcttgtacacctacctgatatacttacttagattgtaaactgcttcccagctcttgaacaaaccaccaaatatacaccacagtgcaatttaccttggctctaagcatctacttgggctgaatggaacacctgctcctcaatgtctggagtgccaagctatctaagattagaaaaacaaaatgcaaagtgttcttcctattcttacatgcccctcaaagtaacacttctttttttttttttttttttgacagagtcttcctctgtccaggctggagtgcagtgccacgatgtcggctcactgcaacctctgcccccaaggtttaagtgattcttctgcctcagcctcctgagtagctgggattacaggtgcgtaccaccatgcccagctaattttgtatttttagtagagacggggtttcaccgtgttggccaggctggtctcaaactcctgacctcaggtgatccactcaccttagcttcccaaagtgctgggattacaggtgtgagccaccataccaggcctcagcataacacttctaacaccaaatgttagagccaggggcaggggtattttccccacctaccaaccaaccagattctccagcagacaccaactgggtgtcctgtaatttaattcaattctgacactatctacctggagatggcatcagatcccacaggttgaaggctcagttccacaagactgcccccaaatttggatgtcagccacaagtggtaagttgtcacctagacttgtgactgacaagctataaatcaggtgttcccatgacccccctcctcaagcctgattaatttgttccagctggccaggtgcagtagctcaggcctgtaatcccagcactttgggcggctgaggcaggaagatcgcttgaagccaggagtttgagaccagcctggccaacatggcaaaaccccgtctctactaaaaatacaaaaattagacaggtgtgatggcatacgcctataatcccagctactcaggaggctgaggcaggagaatcgcttgaacccaggaggtggaggttgcagagagctgagatcatgccactgcactccagcctgggcaacacagcgagactccgtcaaaaaaaaaaaaaacaaaacactattatcactccagcgattccaagggttttaggagctctgggccacaaaatgggacctagaccaaatatatatgtcacagtatcacacaagtgttgccagcctgggtcagcagcttgaagggaaggaagtggtagtgccagcagcccactcgaccagaactcaagaccaactccaggaccctgctatggcgtgggggacatgggagagagaggaggaccccgttgctcgaggacagcctgcccagattcatgtattcacatcgcaagtctagttctgcctaccaagggcgttggctgtgctacctgactctggagacgtagcaatgactacttcaaattcaactcaaccccctcagaacatataaattggggtgagagacagacatgccaccagacagtgacaatcggagtggtccaatatataatggaagaaaacttgggaagggttactaaagaaacacttgtttaatgacactcgttacagacagtaaggcgggccaggcacagtggctcatgcctgtaatctcagcactttgggaggccgaggcgggcggatcacttgagcttgggagttcaagaccagcctggccaacatggtgaaaccttgtctctactaaaaatacaaaattagccaggcgtggtggtgtgcacctgtaatcccagctactcaggaggctgaggcatgagaattgcttgaacctgggaggcagaggttgcagtggttcgagattgtgccactgcactccaacctgtgggacagagcaaaactgactccatctcaaaaagaaaaagacagtaaggcagactttattcaggaccattgcaatatgcagagggaatactgagacaggggcctgcactggaggagaaagatggggctcaacactaaatacagcatgagcaagtgggaagtcctacccaaggagcagggtaggggtcagtggatggaaaattagtaagagaaaacattgagggtaagggggattctgactaaaccaacctaataggattctagttgaagacaggccagggtgaccagacatcaccagggggatggtggaggatgaggaacctgatcagatgccgaggtgtatcagatacagaggatgagggtttctagctaaactgacgtagaagggttcttttgctacaactggattttacaaagaagtgcacagaaggagaaggttcagatgcttttttttttttttttgagatggagtctcactctgtcacccaggctggaatgcagtggtgcaatcttggctcactacagcttccgcctcccgtattcaagccattttcctgcctcagcctcctgagtagctaggattacaggtgctcaccacctcaaccagctaattttttatagttttaatagagatggggtttcaccatgttggtgaggctggtcttgaactcctgacttcgtgatatgcccgcctcggcctctcaaagtgctggaattataggcgtgagccaccgtgcccagcctttcttttttttttttttttttttttcttttcttttcttttttttttttttttgagacggggtctcgctctctcactcaggctggagtacagtggcatgatctcggctcactgcaacctctgcctcccaggttcaagtgattctcctgcctccacctcctgagtagctgggattacatgcgcctgccgccacgcctggctaatttttttatttttagtagagatgggatttcatcatgttggccaggctggtcttaaaactcctgaccccaggtgatccacctgccttggcctcccaaagtgtaggaattacaggcgtgagccaccgcgcctggccgcccggctaatttttatatttttagtagagctggggttctccatgttggccaggctggtctcaaactcctgagatcaggtgatccacctgcctcagcctcccaaagtcctgggattacaggcatgagccactgggcccggcccaggttcagaagcctgactaaagtttggccaagcaaagaatccttgtcaggaggctgtaaataagagacctgtgagaaataaaaattgtcaggtgtctgagcccaagcctgcatgtatacatccagatggcctgaggcaactgaagaaccacaaaaacaagtgaaaatggccagctcctgccttaactgatgacattaccttgtgacattccttctcctggacaataagtctccggagctccccaccgagcaccttgtgacccccgcccctgcctgcaagagaacaaccccctttaactgtaattttccactacctacccaaatcctataaaactgcctcactcctatctccctttgctgactcctttttcggactcagtccgcctgcacccaggtgattaaaaagcttttactgctcacacaaagcctgtttgatggtctcttcacacggacgcacgtgacaaaaataaaatcctaagtccgccaactggctgaatgaacactgtcttggccaaggggcctacagagaaacactaaaagctgagttcctagccgtgactgaacgggtggtcgggcacacctcattctacctcctcccttgctgactgccatgaagctttcttccctaagggttaaacagaaaccagccctattgaaagactcattcactgctaatttcaaccaatggcctgaaatacatggctgctcctcccttttgtggtttcaacataacaactgaccagcattccttcctgatcagaggccacctaaccacggggtgtggctctggccagtctacagaggctgcacacaaagggcctttgtgtcctctgcatcaccttttgatgtatagggcctaattgtaatacatttaagtgttaagtctccactccaaagtgaacatggggcctggcacggtggctcacgcctgtaatcccagcactttgggaggccaaggtgggcggatcacctgaggtcaggagtttgagaccagcctggccaacatggtgaaaccctgtctctactaaaaataaaaaaattagccaggcatggtgatgggtgcctgtaatcccagctactcatgaggctgaggcaggagaattgcttgaaccctgggaaagagaggttgcagtgagctgagatcgcaccactacactacagcctgggtgacagagtaagactccatctcaaaaaaaaaaaaaaaaaaaaaaaaaagtgaatatgggatgttactacacatgtgctgtaccttcccttcatgaatattcatagctcctcctataacctgttgaatatgtatactgagccaagccattcagcgttaactctgaccttatccttcccttactggaggtgcctgctctcagcttctaccggaggctacacttctcggcctgtgagatggcccggctgcaggctgcaactctttatgagaaataaagctctcctttccaaatttgtaaacctgtattagtctgttctcacgctgctgaaaagaactgcccaagactgggtaatttataaaggaaagaggtttaattgactcacagttccgcagggttggggaggcctcagggaacttaaaatcatggtggaaaagaaagcaaaaacgtccttcctcagatggcagcaggaaggagaagtgccaagcaaagagggaaaagccccttataaaaccatcagatctcgtgagaactcactatctcaagaacagcagcatgggggtaaccacccccatgattcgattacctcccactaggtccctcccacaacacatggggatttggggaactacaattcaagatgagatttgggtggggacagccaaaccatatcaaaacctcatgattcttcagttgacatctaatctgagctaccatggtctatcaaaaaaccacagctcttgaggggatctcaatggctgttaacaaactggttagagttctggtcaggttctgattgtagagagcctctgtaacagatatggattgcctccttccccccaccctccttgttatttttatttcattttattaaatttttttttgagacagggtcacactatgtcacccagactggaatgcagtggcacaatctcagctcactgcaacttctggctcccaggttcaagtgattctcatgcctcagcctcctgagtagctaggactacaggtgcatgccaccatgcccagcaaatttttatattttttgtagagacagggttttgccatgctgcccagactggtctcaaactcctgagctcaaccaatctgtctgccttggcctcccaaagtgctgggattataggcgtgagccactgttcccagccatgatttttatttaacaaatactcattatttaacaaatactttctgagcacctactgtgtcccaggcattgtcttgggaacgaggaacacaacggagcaagagaagtaaggccaacttcttctctgatggagcttacattctagtgggaaagaaaactataaacaagtatacccaaaaataaacaagataattacagggaatggtaaatgctatagagaaaaataaaacagaataagaagctaaagtggtgccaggactggtccagcaactattatggtgttgggagcaagccccccaaaatatggccataaactgaccccaagactggccacaaacaaaatctccacagcactgtgacatgttcataatggccctaacgcccaagctggaaggttgtgggtttacgggaatgagggcaaggaacacctggcccgcccagagtggaaaaccacttaaaggcattcttaagccacaaacaatagcatgagcgatgtgtgtcttaaggacgtgttcctgctgcagttaactagcccaacctattcctttaattcggcccatcccttcgtttcccataagggatacttttaatttaatatctatagaaacaatgctaatgactggtttgctgttactaaatatgtgggtaaatctctgttcggggctctcagctctgaaggctgtgagacccctgatttcccacttcacacctctatatttctgtgtgtgtgtgtttaattcctctagcaccagtgggttagggtctccccaaccgagctggtgtctgcaatggtgtgccaccagataagtacggaaattgccagcaagtgtttagaaacacagcaatttgacatatccatgacatccaagtataggatcaatggattttcttgttgaacagggtagagaccaaaaggattggtccatgacaggttggaaacatcaaacaaatgatccttctccatagttacaagtagtttgagatacactgagctagtgggcaatgatgtctacaaggtatattatttagagtcatgctagctgctataacaaataaaccccaccatttcagtagctcacaaaataaaagttctttttttttttttttttgagacggagtttcacttttgttgcccaggctggagtgcaatggcacgatctcagctcacaacaacctctgccccctgggttcaagcgattctcctgccccagcctcccaagtagctgagattacaggcatgcaccaccacacccggctgatttttttgtatttttagtagagacggggtttctccatgttggtcaggctagtctcaaactcctaacctcaggtgatccacctgcctcagcctcccaaagtgctgggattacaggcatgagccatcacgcccagccagaagctcatttcttactgttcctttgagcacattccagcatcagggtctttccacttgctgttcccactttgggaactccattttcacagttttcaagtagctctcacactttggctctcacgtctcagctcaaagaacatcttagaaaggccttctgtggcagagccagcaggatgtttattgactgcctagaccaggactacatttcccagaggcccttgcagctagttgaagccataagacaagttatgttcaatggactgagagcagaagtgatgtatgtcactttagggtgaagactttcaagaagcaggtgcgagttccttattctctcttctgcctggattcaaaagactctgagcccatagaagatggttgaatcaccttatggaagaagcctggatccctgaattactatgtggatcaggagaaatgtctgatgggatgttctatgagtaagaaatgagaagactcttctcaaacgtggaaggagctgctgaaaccaaaatcacaagtcctagagaagcttcttattatctctcagatggtggatgggttccaaaaagcatcctgaaattatccagaaaaacagaaaagagatttcagataaagcaaagggagagagatgctgacagaagaagaccaagaggccacaggggctctgctccttcaggatctaagaaagcaggaaggcaccagtacctcccaccaaggccaacagaacagataccatgagaaaggaaccaagaaaaggacaaatggtgacatgtctccaaaacaaggagacattgagcataagaagcagaaagtgaggccaggtgcagtggctcacacctgtaatcccagcactttgggaggctgaggcaagtggatcacttgaggtcaggagtttgagaccagcctggccaacatggtgaaaccccgtctctactaaaaatacaaaaattagccgggtatgatggtgcatgcctgtaatcctagctacttgggaggctgaggcagagaattgcttgaacccaagaggtagaggttgcagtgagccgagattgtgccactgcactccagcctgggcgacagagggagactctgtcacaaaaaaaataaataaataaaagcagaaagtggccaggtataatggctcatgcctgtaatctcagtgctttgggaggccaaggtgagaggactgcttgaggccaggagtttgagaccagcctgggccacatagcgagaccccgtctctacaaaaaattaaaactgaaaaaaatctagctgggagaattggctcaagtcccagctactaaggaggctgaggcaggaggatcacttaagcccaggagttccagcatgtgatgagccgtgatcgggccatggctccagcctgggcaacagagtgaggtcccatctcacaaacaaacaaacaaacaaacgagaaagcccaggtagcaatgagaatgagacttgcccagacaggcaccccgggtgactgctcctgggggtgcaggccatccattgtcctttggtggtgtctcagtccaaaggcaattgtgaccaaatcacagggacagatcaagtcttctcaaagcagagactggtgaaactttccaaatcatggcggtagggcacgccttgcatgttactgagaacttcctcctctctcttgactttgcagtctgagacccggtcatatctacatgtgtgtttggggcaggatgggcagagacatagcaggaaaggaagtcacaggggtgtgtcctaccccagccaggaagcaggcagcagggaccgctgtggggcatgcctggaggttcttcaccatctgctgagcaccagcataacaatgggacattgggactgtccacctgcactgtgctgttaccactaaccagacaactggctttcgtgggattcaccctgggtccctggggcagaaagcaccctaagtgctcagggccttcctctgaaggggtcactttttccttcattgtcttgggtgatgtaacaagctgtgccagactggaggaagtgagaccaggtgcctgcagtgagctactgagacgcaggtgacagtcacagcagttgcattatcagggagtttcctatggtcatctgaacttcgagggaggttttctggggccgggcattccttcctcattcccatttacctaaattggcccatccttgtctggtaggtcagcacccagcagaggcttctccccatgcacagcactgtgaggttcaggcacctgggcacagtaaccacagtgattcctggaagctggtgggcatgctatcctggggccatctgaactgggaaaagctgtgtgagttcttgggggccagcttgtagcctttttggctggggccaggttgaaggtcttcctgggaaccagagtcaagagcggccacttacattaagcggataaagcccacgactttcttgagctgcttgacagctgtaccaaaaaggcacaaacccattgaggatattatgaaacatgaatacagatgattattttattttggtttggttttgttttggctttgagacagggtcacccaggctggagtgcagtggtgccatcatagctcactgaagcctcaacctcccaggctcaactgatcctcctgtttcaaccccccaagtagatgggactacaagcgtgcaccaccacgcctggctaattttttttaatttttaatagagacaaggttttgctgtggtgcccaggtgggtctcaaattcctagcctcaaacattcctcccacctcaaccgcccgaagtgctgggattacaggcatgagccaccacgcccagccattgccttataattttttactgatgtcagatattgttaattttacagtgttggatgctggattttttttaatctctataaatattcttgaattttgttctggaatgcagctaaataatagcttgatcctttcgggccttgcttttaagcatggttggttagtcagcatcagagaagtatttcatctagggcaggggcaggggtctccaaaccccaagccgtgaaccaatacaagtccatggcctgttagaaaccaggctgcacagcaggaggtgagtggcgtatgggtgagcatcactgcctgagctccacctcctgccagatcaggagcggcattagattcttacaggagcgcaaaccctattgtgaactgtgcatacgaaggatctagattgcgcactccttatgagaatctaatgcttaggcggggcatggtggctcacacctgtaatgctagcactttgggaggctgagatgggctgatcacttaaggtcaggagttcaagaccagcctggccaacatggtgaaaccccgtctctactaaaaatacaaaaattagctgggcatggtagcgggcgcctgtaatcccagctactcaggaggctgaggcagtagaatcgcttgaaccccggaggcaaagattgcgctgagccgagatcgggccactgcactccagcctgggtgaaagagggagacttcacctcaaaaaaaaaaacagggaagaaaaaaaaaaagagagagagagacagagaatataatgcctcacgacctgaagtggaacagtttcatcccgaaaccatccactgctcccaccctccatcccccagactgtggaaaaattgtcttccatgaaaccagtccctgatgctcaaaaggttggggactgctggtctagcgcagacctctcacacctgctgtgtcccaaattgacccacccctgctgcttatttttaccacccctacctggtggtgcgtctgtctccccactcaactgtgagctccgtacaatagggaccagggctgttgtggtcaccatggtgtccccagcatcacccagcacagggtcagctccctgagtttatggaatggtaagcacgaatgaatgggaaaacgcatgccagggaaatgttagggtcatgctctctgcccctaccctccactcagacatgagacacctgtttctgaaatcaaagagcagtaagtccaggatctcattgcctggttccagtcctcctaggacgcaagtcccattttgtcaagaaaataaagggggtgagcgtggtggctcacgcctgtaatcccaacattttgggaggccgaggcgggaggatcgcttgagcccaggagttcaagagcccagaagctgagactagcctgggcaacaagtgagatcccatctctattaaaataaaagtgtttagttaaaagaagaaaaagaaaataaatggaagcatcaaggactgttttgcctctttcgggttagctggtagtgagcgggagaacgagggaaggcgggcggggctgcagtctctccacgcccttttcatttccactcaaggagacctacctgggaagagtgagcgctgcaagacccagcctgaccgcgctaagattactatgcagcgcccgagcccgctgtctgcccggcaaccgatgacgtcactgttggcgcgcccgtgacgtcagaggcgggcgccacacttgaagaggctgagggaggcggtgtcgccgccgcggcgctgtcatggagctagcgcaggaagcgcgggaactgggttgctgggcggtcgaagagatgggggtgcccgtggcggcccgggccccggaatcgacgctgcgcaggtgaggaccgctcctggagtgaggacaccccaccctggagattgagtctccgggagtgagaactccacccctcattgaggactcgactccccccaattccccatcgagagtgacccgacttactgagggctccctaccctgggaggctccccagagtgaggtccctagcactggtgaggatcctccacgagttagctaagacctcgctccttatggaaataggatctccagagtgaggctgtccccgcagcacctcccctccctcccttaacctaaccaagaaggacactcaggagttagccgtggccaccccatcggggattgaagctgtaggagtgatgccccacgtctggtcatgagatggcacttcctggcagtacatcccccacctccacctctggatgtgactgggataacccactcccaggagaaagggagcacccgcctctcccgcgctcccccaccacccgccttcccagggaatgagaataacaccacacttagtgcaaacatccagtccctacaaaaaaaatgttttaccaattagccgggtgtagtggtgcctgcctgtagtcctagctactctggaggctgaggtgggaggatcgcatgagcccaggaggttgaggctgcaaggagctatgatcgtaccactgcgacagagcgagactgtctcttaaaaaaaaaaaaaaaaaaaaggcaaaaaaaagtttgggccttccctcctcaagaagtgagaactccctagtaaaaactccctaccaccatcaccctaggaatgaggatcccacaccctgtgtgctgccccaggcatatgcttacacactgtccccacaggctgtgtctgggccagggggctgacatctgggcctacatcttgcagcatgtgcacagtcagaggtaagctgggctagagcaggggagggggcacaggtgaggcccatagtaactcctctttctgcctctgcactgtaggactgtcaagaagatccggggaaacctactctggtaactgcttcttaaagctatcccctcctgtcttccccactcccatttagccctgtccccaccacagcatcacacctattgccctcccccctagaagccccactcatccgctgactctggcctcgttttcctaggtatggccaccaggacagtccacaggtgagaagcatatgctacaagattctctttcatccgaaaaatgacttgtagatcttctgctctaagcccaaccaggtgctgggtgatgctggggacaatgggtcacaagacagccttgatctccatcctcatagggcttaaagtccagtggaaacagcattagctcagccaggtgcagtggctcacacctgtaatcccagcactttgggaggctcacctgaggcctcatctcaggtgatgagatcacctgagggctccaggaagcgatcagtactgggacaaagatgtggtttgggaggcggatcacctgaggtcaggagttcgagaccagcctggccaacacggtgaagccctgtctctaataaaaataaaaaattagccaggcgtggtggcacacgcctgtaatcctagctacttgggaggctgaggcaggagaatcgcttgaacctgggaggcagaggttgcagtgagctgagatcgcactactgcactccagcctgggcaatagagcgagactctatctcaaaaaaagaaaaaataaataaagagcattaattagctgggcgcagagaggtgggacctggatatgtggcatcaaagctggtgagaagagatgatgggacaggtatgggagagatgctgaggccagtgtgggacccaatgggtgcaaggggctcatatgacacctaaggggaggcttccaggaggccttgggacttctaggtgcagggctccgggaagagatcagtactgggacaaagatgtggttgtcaccagcacagacaggaaacaggctggaagtgtgggtaagacaatcctaggaggaaggagggagggagccaataccctaatgcttctgtgtcagacacagaaactgctgagcaaaaaccctctgccaccagttgaggagcctggtacccccaaaagacaggccaggctgagccccgatcagaccatctgaccctgaatctgatcctcccaggtccgtcggaagttagagctggaagctgctgtgacccgcctgcgggcagaaatccaggaactcgaccagagcctggagctgatggagcgagacactgaggctcagggtgagccatggggccagaagatgggcaccagaatgtggggcgggaaaggtgctgatggccacccctgttcctcccacagacacggccatggagcaggcacgtcagcacactcaagacacccagcgtcgagctctcctcctccgggcccaagctggggccatgcgaagacagcagcatacgctccgagatcccatgcagcggctgcagaatcaactgaggcgcctgcaggacatggagaggtgggcctcagggacccaccctcaccaggctgggtggccagacattctcttagagacctcagggctctgccctgatcccttcttgggttccagaattctggaaccattaggatggaatgtccatgaggccaggaggttttgtcatctcagtcacctgtattttcagtgcctagaatgataccacctgtatacctagaacaccagccctggggaaacagccacaaacagagaacatgtccctgccctcctggagcttatgctgtgacacagagaagacagatagtaaagtaggaaccaaacagaccctatcatttctggtagagatgagtgctgtgaagaaaagcctatcatagaagggagagggagatgctgccctagcgagggtggtcagcgaaggcctctgaggaggggacattgagttggaagaggaatttctgtggagaaggaatagcaagagcagaggtggtgtgctcagcatgcaggaagagcagcccggaggccaatgtcagctcaagtttctcaggcaagaccgagaacctgaggaggtgaggtcgaaggagtggacagagaactgtggatgatgtgttgcgattttaccctgacactggttcatgccctggcttggccacttaaaattgggtgacctaaggctgggcatggtggctcacacctgtaatcccagcactttgggaggccgaggcaggcggattacttgaggtcaggagttcgaaaccagcctggccaacatagtgaaaccccgtccctactaaaaaatacaaaaattagtcgagtgtggtggcacgtgcctgtagtcccagctactcaggaagctgaggcaggagaatcacttgaacccaggaaaaggaggttgcagtgagcctggattgcaccactgcactccagcctgggtgacaagagcaaaactctgtttaaaaaaaaaaaaattgggtgaccttgggcaaggtatttaacttctttctatgtgcctcagattctaagatctgtggaatggggataatattaataccaagcttatagggtaggcatgatcgttaggtggaataaatcatgtgaagtgcttagagaagtgcctgttaaccattgttattctgggtttggtttttttgttttgttttgttttgtttttttgagacagagtctggctctgttgcccaggctggagtgcagtggcatgatcttggctcactgcaacctctgcctctggggttcaagcgattctcctgcctcagcctccccagtagctgggattataggcgcatgccactgtgctcgactaatttttgtatttttagtagagacggggtttcaccatgttgtccaggctggccttgaactcctgacctcaagtgatccacctacctcagcctcccaaagcgctggggtacaggcatgagccaccacgctgggcccattgttattctgaatgcgctggggaaacatcacattattttggacagatctgagcagggacatgatcttcctacagttttaacagaatcactgacttctgggtggcaaacagtctcgtggagcaaaagcagtggggaggctaatgcaatattccagctgggaggtgacagtggcctaatctggagatggctcccgagatctaggcttagtgattcctctgaccggccttgctggcagtgagaggagatggggcacagacatctgttctcccagggaccccagccccagctgcacttctccctccaggaaagccaaagtagatgtgacctttggatccctcacgtcggcagctctgggcctggagcccgtggtcctggtaagagtcctggtcatgggagaaggggcagggagcctggagtcaggcagatgctagggtccccctcaggtcccttcctcctcttctccctagcgtgatgtccgaacagcctgcaccctccgggcccagttcctgcagaacctcctgcttccccaggccaagaggggcagcctcccgtgagtgtccctagcccccagagaccctgtaaagaccctgggttttaagtgggggtctcttatttattaattcctcagacactgagcttctgggctacgttctgtagaaggggacttccaggctgggaatagaaggagacagtctctcatcacaaacagtgacagccaggtggtcagggctgttgcgggagtgaggaggcctgagaggctctgggcacccagaggcagtgcctttcccagctaagaaggcagggaggggagaggttctctggtgaggaggcttagctggggtgaagggtccagagagtgtcccagatgaacaacccatgtaaaggccccaaagccagcaggttggtataattggggaactcaagtctaacaggcatagggaagatgacagcccctaccttatagggtggtggtgataactagaggataattgacgtgtcttgtaacgttctctgtccgcttacccaaccccacagaacccctcatgatgaccactttggcacttcgtaccagcagtggctgagctcagtggaggtgagagggcagggctctcaggaaagccacaccctcccgctccttgatcaaaacttagggtgccaggacctaactcttgatgacagccctattcccatggggtctcagctcacagccctgccccgatcctgccctgacttcaccctccctccccctagacgctgctgacaaaccaccccccaggccacgtcctggctgccttggagcacctggctgcagagcgggaggcagagattcggtccctgtgcagtggggatgggcttggcgacacagagatatccaggtgtggggcagggtattctcacagttggggaaggccatgtgagtgggtgagctgggacagcctcaggacccctggcccagccacctgctgatggggtagaactgaaacccactgcctggtggggtggcaggactgatactgtccaccctcgagtaccaaggcaaggccgcagcacggctccctcagcagctcttcccccaccccagaccccaggccccggaccagtcagactccagccagaccctgccgtccatggttcatctcatccaggtgaccccagggctcgcctccccaccacattccaagacttccttaatcccctcacccatggatcatgccctgggtgtaccctgattctgtaccccgcttgcaggagggctggcggactgtgggtgtgctggtctcccagcggagcaccctcctgaaggagcggcaagtcttgacccagcgcctccagggcctggtggaggaggtggagagacgcgtcctgggatccagtgagaggtggggggctctccgagaagaggtctctaggccatctcgcttctgagtgtctcagcccattggactttttcagcctctgtggctcctatctctgcctcctctccctgcagtgtctctccctggtttatggtcccttgtgtggctcagtcacccttctctcctttgctctcctccacttgccctgcaggcaggtgctgatactggggcttcggcgctgttgcctgtggacggagctcaaggccctgcacgatcagagccaggagctgcaggatgcagctgggcatcggcagctcctgctgagggagctacaggccaaacagcagcggatcctgcactggcgccagctggtggtgagaggctaggcccagggccttgtggagggccagaggggaggcttgaaaactatggctaagaactgggcctgagccctgtgtggtagcacatgcctgtggttccagcactttgggaggctgaggtgggaggatctgagcccaggagttcaaggctgaagtgaggtatgatcacaccactgcactccagcctgggtgacagagcaagatgctatcacttaaaaaaaaagaatgctgtcacttaaaaattaagaactgggcctcctaggcaagagcccaggtgagactcccaggcagaagcaggacctaagcagagaggcacactgaggctgggagctgggaggagtgggtctcagggtatcctggttcctcaggaggagacccaggaacaggtccgcctgctcatcaagggaaactcggccagcaagacccgcctgtgccggagcccgggggaggtgagatgggagttggggtgaggtctgggtagggctggatctgccaggatggggctgggtggacttgtgatgttgtgatgccccacccacccctccccttccccacaggtgctagctctggtccagcgaaaggtggtccctacatttgaggcagtggcaccacagagccgggagctgctgcgctgtctggaggaggaagtccggcatttgccccacattctgttgggcacgctgctgcggcacaggccgggagagtgagactggggctgccccacccctgccctgcatcccctgccatgggtgactgtcactccctgaacctcctcaaaaaagataaccccagacccccagtgttcccaggctgccagacctcacccttgggtcagcagccctggtcttggcatcctagtccccagacccaccttgaagttcctgggcccccagagcctccagaacccaaggcctcctctcagtccccacccaacccagacttctccccgcccgtaggttgaagcccctgcccacggtcctcccatccatccaccagctgcaccccgcgtccccaaggggctccagcttcatagcgctgagccacaagctggggctgcctccagggaaggtgagtgcccgtctcctgtgacttgtctccccagccccgccccaggtgaccgtccttccctcctcctccaggcctcggagctgctcctgccggcggctgcctctcttcgccaggaccttctgctcctgcaggaccagcggagcctctggtgctgggatctactccacatgaagaccagcctgccgccaggccttcccacccagggtaggtctgccctgccaccccatccagcctccccgcccattcccactaccagcagcctccacgagtccttaccagcaaccccgttgtttacgcagtgcccattgtgtgctaagggctttaaacattctcccttgtttcatctgcacggcagtcccataaggtaagtgctgctgttctctccattctacagagaagggaactgagacgcagaggttagtaggttgcccaaatggcaaagctggaatttgaatccaggtggtctgaaatgggtctgtgctcccaaccactaagctacactgccgtcgactttccacgtgttcattcatcaccgtcacatagtatacctcagcagttcaaagcctgggaatcctctctgccgtctcttcctagctgtgtggcctccccgtgccttagcttcctcctcagtggagtaagcatgaagcaatatcttaccgaggtgctgggcagattgaggcaggggacccacacagggcactgaacactgcctgctatgcagtaagcaccctgtgtctccaatgtgattagcatcattgtctgtgtacacacacagtctcttggagtcatgacgatgaggaaagggacttttaagaaccccagtttacagatgaggaaactgaaggttagagaagtcattcattcctggattcactcaccaaatactgggtgtctaccaggtgccagcccagatggcttgatggggagtgaggagaaaggtccccaccccaggggtttccccagatggaagtaaagagtaaagaatgaaaggataaatacatggaagaggagaattgatgagaaatgaaccggcagtgccagcagcactggaggaagagactgttcaagcctctgagtttggggctccctgccctccacttcttcacaaggggagggaacagtgtgcaggagcaatgagagcagccccagaccccacacggcctctgcccacctcagcctctgcctaccacgccctctgcccacctcatgtgttttttgtttttgcttttgtttttttgagacaaggtctcattctgtcactcaggctggagtgcagtggtgccatcctggcttactgcagcctcaacctcctgggctcaagccatcctcctgcctcagcctcccgagtagctgggaccacaggcatgcaccccacacccagctaattttatatttcttataatcatgggcatcttgaactgtacacatctatcatggaactcctggttctctctactccaaaaaacaattttgttcctcttcttggtttccttccttgttaaattatctcaccctcctcatccaagtgctgcacccagaaacccaggagtcatcctgaatttctccatcaccctaatccccccaccctcaccagcttcagcctctcagcaagccctaagggtcccatccccagagttctcccatcggtcccctgccccagtaattccacctgacagcagacggagctgaacaaagagccagtgtcgtgatcaaggtcacagggcagggatgggatggggtcaggattcaggcccagcttgtctgatcacgctgctcgtctgcacttgctgagctgggcctgttctgtgcacatggagaggtaggcccagtcccagtcccagaggaaagcaccgctagggtgaagctagagcaggcggaggaggaagccttggagcgagagtgttggaggggcctccaggaggaaagatactctctactgtgggccctgggaatcggccaggctttgccacatcatgaaactcaaatacctgctgaagggcttggactctgccttgggggcactggagaaccttggagggttctagacaggagggagagcatcaaatttaggcttcaggaagatcactgtggtgtagtgcggagggtgaaccagagcaggagactgaggcctggagcagaggagaggaagaaacgctcaggagactgagcggacaggccatggagattgatgggctctcacggggagggaggaaggcatccagaaggaggcctggatggggctgggggtggtggactgcccttgagatgaggatctgggaggagggacaggtcctcatctcaagggcagtccctcagaaggggacttccaggctgggaagagaaggagacagactcatcattggtttgcgggagctgctgaggtcaagactaggggactggagaattggggactcattgctgtaaggtaccagcgagccagaggactcaaagctgcctcctggctttctcaccctcagagctgctgcagatccaggcatcccaggaaaaacagcagaaagagaacctggggcaggctctgaagaggctggagaagctactgaaacaggcactggagcgaatccctgagctgcaggggatcgtgggggactggtgagaggggaacgtgccgcggatgggaaacagaaaagtcaggactcaagctgggggcctgatgagaaggagcaggccatggttttgcagggagggtctggagggtcagtcctttcctcgttgacgccatgccattccccaggtgggagcagccaggccaggccgccctctctgaggagctctgccagggcctgtccctgccccagtggcggctgcgctgggttcaggcccagggggccctgcagaagctgtgcagctgaagagagggttcaaacggaagccgagaacttgacactgttcaccccaacacctcacctcccccaggacatttggaagaaagcagcgccaggattcctcggcagtcgtccccacccgcacctgcagtcccctcatgtgctgttctgctgccccactcagctcctggaccctgtcctttcatcccgctaaagcaccccctaaaaccccttcatcactttcattctcagcaaaaagtaattgagcacctcctctaggcgctggggagtccacactgaacaaaagaaacagaaaaccctgtcttccagcagttgagttctagggcagggagacagagtttacaagataaggaaaatatatatgtagtatgctgcaagttaactgctgtgtgggaaatccagcagggggtgggatgtgtgatttgaattgagggccacactgcccaggtcgtgctccgtcaaggggtgagcaggagcaacaggggtggctgagtaagggcttgcagctggaggcaacagcacatgcaaaggccctgagccaggatgtgctgcaataagggccactgagggggacagtgtaggttgggggtgaggaatgtattaaaagatgagattgccttctagtttgtatagtttctttttttacatgtaaatcagccatttggaatttatcctagcacatggatccaattttgtcttattttacatatatcctagtagcacttactgaaattcccagtcagagtggcagttgcctctgagggaaggtgggtggcagggatcaactgaggaggagacacagaaatgtcctagctgatgggaatgtgctgtgtcaagagcagcggcggtgacgcaggtgtagagatttgtcagagctcatgtagttgtagtcttaaggcctgtgcatttcactgcgtgggttactcaatttataaagcaaagcccttacacttttgagatgccacctttttatgcactaaatttccatgtttaattgggttatatctggcttctctccagacctgctttgtatttaactctccatgtgtcattcctacagtagcttaatagaaaggcttgtgacacattgtcatatctgttcttgttttcttttgttttttttttttttttttttgagatgcagtctcattctgttgcccaagttggagtgcagtggcatgatctcagctcactgcaacctccgcctcccaggttcaagccattctcatgcctcagcttccccagtagctaggattacaggtacgcaccaccacgcccagctcatttttgtacttttagtagggacggggtttcatcatgttggccagactggtctcgaactcctgacctcaagtgatctgcctgcctcggcctcccaaagtgctgggattacaggcatgagccaccgcgcctgaccacattgccatatctgaaatggctggattctcttaggtgcttttctttttctttctttctttctttttttgagacagaatctggctgtttcccaggctgaagtgcagtggcatgaactcagctcactgcaacctctgcctcctggattcaaacaattctcatgtctcagcctcctgaatagctgggattacaggcacccaccaccatatctggctaatatttgtattttttgtagagtcggagctttaccatgttggtcaggctgctctccaactcctggcctcaagtgattctatcgcctctgcctcccaaatcttcacctgctgggattagtttcccctgtctcagtaaattttttttcccaaactaagtgaacattagatttaatttggctggccccagaagaaaaacatgcacagatggtagttttactggtgttgcagtaagttttcaaatttggaagtttggcagctttatgatcttgaaccttgctgtccatctctcacacaactcctctcttggcctccagagtccctttactctcccagctttcctcctgcccctggctgctgtttcccagcctttccacattggctttcccatgtagtccttagtgtgtctgctcctcctctctctcctcatcacagttcccagcccccaccttcaactgaactcaacaaaatcttcaacttcatacagtagtcacattgttagtaataacactggcatttttattttgataaaatagaccgtttaaatttttgagattctaccttatattttttgaattatatactaaagcaaataagtagtgatgtaatgtcattggggaccaagatttttagtgtaaatgaaaaaagataacaaatataaactcaagtaaacaccctgtagtctttcacatgaattggaaatatcagaataaagtcatgatttttctctttctaaaaaatatgtatttccctagttaagtcccctgaaaaggtctaaatataatgacaccccagtaacactgagcagcactagtatacagactgtggtctctataagtgccatttctgactaagaactagggacttttgtgaaaacagctgattccaggtctggggcaagaaatgtgcaaaatgtgtccaggatattttgtgccaggaagcaaagagtcctccaagactactgtggccaagtcaaaggaactcaggagccagtctgaagggctgtcactcaccaaaggtgggacatgttgagcagcaaaaagaaccacagtggtttgaagcacatcaaatatgcctgaatgtgtaagttcatgttgatactcatatacctcattgaaatcacctttgaagagtactaggaacccactcattattttgaaaaattttttatatataaaataatccagcatgttctctatttttcttatatgtgaacaagtaaccaacttttttttttttttttttttgagacagggtcttgtgctgtcacccaggctagagtgcaatggtgagattttggctcactgcaacctccgcctcctgggttcaagtgattctcgtgcttcagcctcctgagtagctgggattacaggtgcgcgccaccatgccaggctaatttttgtatttttattagaggcggggttttgccatgttggccaggctggtctcaaacttctgacttcaggtaatctgcccgcctcagcctcccaaagtgctgggattataggtgtgagccactgtgcccagcctaagtaaccaaatttctgatgaagaggttatttatggaagaatcacaactaataacttcagagaaaatactagaattcaaaaaccactatttgctattaattaatctagtgatggatacaggtaatgatgatcaagggctactaaaactattaggggaaaggttgattgggcttcttaaaataggtagaccaggatgacaccactgatcaatcctgatgccaaaggaaggcaaccagacatcttgtgcttctgatgggatccaataggatacaagggatatgataccatacaatattatctatgaagtgtgcttttaccaaattaaacctaaatctcatctagccttagctctcactacaagcatatgggaaaggggcagaaggcagtcagaaacaagtgaaacaaaaaggatgtaattagttaaattcaaaatgtgtgacaccctataggataaatgatccagtttcttcaataaagagaaggcaaaagggggaatggagaaagaaagaagaaagggagggagggaagaagggaggaaggaaggaaagaaagaaagatggcaggcaggcaggtattcatttgtactgattcatactgcagcttcaagaaaccaaggcagccaataaaattaaattttcttttttttttttttgacacggagtctcgcactgtcactggagtgcagtggcacaatcttggctcactgcaacctccgcctcccgggttcaagcgattctcctgcctcagcctcccaagtagctcggattacaggcgctcgccaccacgcccagctaatgtttgtatttttagtagagacggggtttcaccacgttagccaggctggtcttgaactcctgacctcgtgattcacccgccttggcctcccaaagtgctgggattacaggtgtgagccacctcgcctggcctctaagtttttcttgttggtaaacatctgagcaagcaaaaatttaagttttgacaggaaaaaaaaaagacaatcaaatgcaatatttggaccttgttttgatcctgattctactatcgtataaagacatttttgagacaaggaaaactgaacacggtctgggtgttagatgatactaagaaattaatttgatggtattcataatggcatagttaatggtattttttttttcttgacactgagtttcactctatcgcccaggctggagtgcagtgacgcgatctcggctcactgcaacctctgtctcccgggttcaaacaattctcctgcctcagcctcccgagtagctggaaccacaggcgcacgccaccacggccggctaattttcgtatttttagtagagacagggtttcaccatgttggccaggcgggtttcaaacccctgacctcaggtgatccgcccacctcgacctcccagagtgctgggattacaggtgtgagccactgagcccagcgttaatggtattttttaaaaatagttcttatcggccgggccgagatcgcgccactgcactccagcctgggcgacagagcgagactccgtctcaaaaaaaaaaaaatagttcttatctgttaaggagacataatggcgcatttatgactgagttgatgtctggaatttgctttaacatactccagcaaaaaaatataaaaataagaaaagtataaggccatgcgcagtggctcatgcctgtaatcccagcactctgggaggccgaggcgagtggatcacttgagatcagaagtttgctaccagcctggccaacatggtgaaaccccgcctctactaaaaatacaaaaattagccgggtgtggtagtacacacctgtaatcccagctactagggaagctgaggcaggagaatcccttgagtccaggaggtggaggttgcagtgagccgaggtcacactactgcaatccagcctgggcgacagagcgagactccgtctcaaaaaaaaaaaaaaaaaaaagaagaaggtactttgtaacattctccccgcccttgagaatgtactttataagcctatcccaaacctgtaagaactaatgataatcccaccaccctttgctgactcctttttcggactcagcccgcctgcacccaggtgaaataaacagccttgttgctcacacaaagcctgcttggtggtctcttcacacggacgcgcgtgacaaagaagtatagatcaagtgaaatccagaagtgttgaatattggtagcgtttgagatgtacttaagagtgcgttatactattccccttaatgtgcatgtttgaaaatactcagaataaaacacttgtgagggctacgggaaaaaaaaaagggtcagctgtggcccaagaaaggacagggaccaagcccacggacgtgctcctctgagttgcactagtctctgggccttggctcccaccctgaacagctctcatctttaaatgtcttcagctgtcctcctccaggaagccgggtcaggcgcttcctcccgggcgtctccggtcttcctggaaaccacaggtcgggtgtcaacctactccaggataggggccccgaggggccagccaggcctcccagccttgcccaaccctggggttgacacggactttagcgtctttttaaacttccggcgcgggctctgcggtggcacaggagggtcctccaaactttcctgcgatctcaaaggtccagattccacattggggatgggcccaactgactttgcttcgctctcattagccggtggtcctccaggaaagcggggccgcctctccgctgtgctctcataggcccaggttcttgcgttcgtgtgtccttctctcactctgattggcctatattccccctgagggtgtggccaaatctcattggctctcgcgcccgaatgtatgacgtcatgcgccagcgcccgtcgcttttgctggacgtcatcctcgggagcccacccggacgaagggggagagtagacagcagaaccagcggcggcggctaagcagagactgtagtagcggcgacagcgacgacggcagcgatggctggggcggggccagccccgggactcccgggtgcaggaggacccgtggtcccgggtcctggcgctggcatcccgggcaaaagcggcgaggaacgcttgaaggaaatggaggcggagatggccctgtaaggcccgcgacagagagtgataaaagtcgtcccagagccagagccaccgaatctcggagcctccaggcctcgataggccggagatacggctctaacatggggaagtgggaccttcgggattgtgggggcggggataggggagaggttggcaggggtgagggtcccctcgcgatatacccacagttccaaaattggtacgaggtcctgagcgctgatgtctgttctactcctccaggtttgagcaggaagttctgggggctccagtacctggaatcccaactgctgtgcctgcggtgcccactgtccccacggtccccacagtagaagcgatgcaggtcccagcggctcctgtgatccgcccaattatcgcgaccaacacataccagcaggtacggctgagctaaggcatgtaagtcagggaacacaatgcctcgaacagagtaggtgtttgtgtacagagagctgttgacgttttggcttgttgactaattagcatgacaaatattttatatgccaggcactgagaacacagtaatgactgagagagacatttctgccctgtgggagcttatattctagaacatgttgtccagtagagctttctgcaatgacgagactgttctgatatatttaaaatttatatttaatagttcgttattctcattagtcacatttcaagtgctcagtagccaactatatatgactagtagagaaagagagagaaattattaagatgaaaataggctgggcgctgggcgtggtggctcacacctgtaatcccagcactttgggagaccaaggcgggcagatcacgaggtcaagagatcgagtccatcctggccaacatggtgaaaccccatctctactaaaattacaaaaattagctgggtgtggtggcacgtgcctgtagtcccagctacttgggaggctgaggcaggagaatcgcttgaacccaggaagcggaggttgcagtgagctgagattgcgccactgcactggagcctggtgacagagcgagactccgtctcaaaaaaaaaaaaaaagccctgaggcaggtgcatacctgttgtgttgttgtgttcaaggaacagcaaggagaccagtgacagtggagtgagcaaagaggaaagtgggaggagataaggacagagaggtgaggccaaatcttgtagagccttatggccattttaagaaccctggtggccaggcacggttgctcacgcctgtaatcccagcactttgggaagccaaggcgggtagatcacaaggtcaggagttcaagaccaacctggccaacatggtgcaaccccgtctctattaaaaatacaaaaattaggcgggcgtgtcggcgggcgcctataatcccagctactccggaggctgaggcaggaatatcacttgaacccaggaggcggaggttgcagtgagccaagctcgtgccactgcactccagcctggacaatagagcgagactccgtctcaaaaaaaagactgtaagggacaagggcagaagccaggagatggaggaaggggctagtacagtaatctagacaggagttaatggtggcttggatggaggttgtgcatgggagatggggaggacaggttggacacagtttcagtgggtgctaagtgctgtggggaagatgaaataaggtggtgagagaagttgctgctcagagagccctagtgtgatccaaaaagcctccccgagaagtggcattttagctaagacctgagatagccagccacatacagagcacaaagcatgaagctcttggtctcttggggtgagctggccgcagcagatgggaatgctgagtcaggcccctcaccctgacctcttcctcgacaggtccagcagactctggaggcccgagcagctgctgcagccacagtagttcctcccatggtgggtggccctccttttgtaggccctggtaagtaaagagtagcaaggtgagggggttgggcaatcaggcagggtggtaaaaaggtgtgcacaggactctcctcccaccatccttgcctctcccctcccaacagttggctttggccctggtgatcggagtcacctggacagcccagaggctcgagaagccatgttcctgcggcgggcaggtgagtctggggccagggacccccacatttaatcaggcactcttgtttacatgacttcagcctcttgcctaaatccttgctctaaattaccctttgcctttgatcccaacttgatgttgtcatcctaaagcacgaacctgatcatgtcctttctgatgatgtcaattttgttttaacctgatcattgcaaaccaaccctcctgctgtcagtcctaattcccagttaccacagcacttaacacctcataacaagctatataatttcttatttactatggctatcatcttttgcatcctctaaaataaaagctccatgaggggcagaagtctcagtatctgccacataggaagcattatgtactgtctgttgatgggatgaacggactgttgagacaagcgccaggcttttcccctggcagtcacaaccctacatgaccttgcttcttgcagggagagatccccagcagcccgaacatttctgggatgtgccagcagtgcttttgttaaggtcccttctctccctgctcactgtcacccagctgtaatcttccagccatccttcccccccaggccattttctacattccaccttttgttcttcaggtaacctttactcacactgtcaatttgtaggacattacttccttatatgtatgaaaaggatgcgtgttcttacttggatgtaaaattctggtataatctcggttaaaccaaacgtgctacttatgttacctaaatcctgttatacttattaatctgatgatctctgagaagttgtaatgtctcttactttttagtatggttttgatcaaaatgcaaatctgacctacttcccctgcccagcttccaaccctgctgtggctccccagtgccctcaggaggacacccatggctcagccaagaatgctgtgctttaagaacaaaaaagctctactggggtgcctgctggctgctcagcccttctcatgacactctctaagccccactacttctattacagttacactaaactgaaaagggaaaggttttgcttataaatattcttcctgccaataatattcccactcaccccttgcctaacacttcattgccccttgggtctcagctcacaggtccctttctccaggaagccttccctgggcctggctgggtcagagggctcccctctcttagcactgatcccactgcctgggcttccctgcttccagcgctggtccccactggctctccttctctagtgatgtctccattccctcctcctctggaccaggagctccctgagaaccctgggtctgttggtgtgtccccagcattgcctgccacagggctgagccagaggagcttctcagtggtaaattttcatggaatgaaccaggggagaggcccccacatctccaggagggctccccagactcttctccaggatttcttgatgctgagagtgcacacacacacacgcatgcacacacacaccttgtcccaagtgcccctgtcccccatgacacacacccccatctctctctcccacagctgtggccccccagagggcccctatcctgcgtccagccttcgtcccccacgtgctacagagagcaggtgaggggccagggtcatcatccctgccacataactccccccaggccctggaactccccactaacaccctgacagattccgctctctcctctgcagcagccggcccccgccctatggccctacggccccctcaccaggccctcgtgggcccccctctgcctgggccccctggaccacccatgatgctgccaccaatggctcgggctccagggcccccgctgggctccatggctgcactgaggccccctctggtgagtgtgaacagggaactaacggtcagatgtgcggtggacggggagaccatccatcctggcccaatgggctatgtctgagttggcctctctcctgactttctgtttctctaccttctcactctgcctttgtctctgtctctttctgcatctttctgtggcaaaatctgttctctccttttgtgaagggagtacagagagaaacatgctattggaatatttctcttttgattgttactgatgttcttgtctgtggctgtctctctctgcctgtgtttctccttctctgtgtttgtctggctggagactctctgcttgggtgtctcttggctgctctctggcccccaggccctttctttgttggatggaatggagatgacagtaaagtctgagcctgtgagccggcccccctcatgctctcctcttacccacaggaagagccagcagcaccccgagagctgggcctaggcctggggttgggcctgaaagagaaggaagaggcagtggtggcggcggcggctgggctggaggaggctagcgcggctgtggccgtgggggcaggaggtgccccagctggccctgcagtcattgggcccagcctgccgctggccctggccatgccattgcccgagcctgagcccctgcccctcccgttggaggtcgtccgcggcctcctgcccccgctgcgcattcctgaactcctgtccctgcgtcctcggccccggccccctcggccagagccacccccaggcctcatggctcttgaggtaagcagggagcctagcggtgaagggacagaagggacggggggcagacaggagcccaggaacttccacacagacagaccggacagcaggaggacctgggggagggaggcggacacatgtgccccacatccagaagcacatccagcccttactgtggtggcaggagggccggggaccaaaggacagtgggagaccccaataccaacccctttgcacctctcccctttcctctgcaggtcccagagcccctgggtgaagacaagaagaaggggaagccagagaaattgaaacggtgcattcgcacagcggcagggagcagctgggaggaccccagcctgctggagtgggatgcaggtaagctgctgaagctcgaggtcaggcgtggctcggccaaggtcagaccaggctgctgtccttgggctgcagactgggagggtgaaccctctcagtagggtgggcgctgttgttagcccaccttggggaggggaggctatggctcaggggctggttcttcacctagccatgggccggagcttggtggaggtgacggggacatggggctttgtagcctgttttactcatgaggtgcctggcttcagagagcattctttttttttcccaactcttaggataaaaattttttttttttttttttatgagacagagtaccactctgtcgcccaggctgcagtgcagtggcgcaatcttggctcactgcagcctccgccccccaggttcaagtgattctcctgcctcagcctcccaaagtgctgggattacaggcatgagccactgtacctggccgggaaaaattttaaacacagatggcacagtaaacacccgtctacccaccacctagattctgcaattaacattttgctgtgttcacttttttcctctttgtgtatgtatctggtttctttgtttttagctcagtcatttgaagcaagttataagtgaattaatcacttctaaatatctcagtatttatctcctaagaaaagagatattttggccaggcacggtggctcacacctgtaatcccagcactttgggaggcggaggcaggtggatcacttgaggtcaggagttcaagaccagcctggccaacatggtgaaatcccgtgtctctaaaaatacaaaaaaattagccaggcttggtgggaggcacctataatcccagctactcggttggctgagacaggagtatcgcctgaacccaggaggcagaggttgcagtgagccgagatcaggccactgcactctagcctggcaacagaacaagactccatctcaaaaaaaaaaaaaaaaagaaaagagatactttttgcatatcataatactattatcaagtctaagaacattaactaattcggtatcttcttttcagtttatattcgtatttccctaggtgtcccaaaactctgttagaactattaatgtttttgccctgaaccagcatgcatgcagttttatgtccttcaattatatctttttttttttcttttttttttttgaaacggagtcttgctccatcgcccaggctggagtgcagtggcgcaatctcggcagctcactgcaacctccacctgccagggtcaagtaattctcctgcctcagcctcccgaatagctgggactacaggcgcgcacgaccatgcttggctaatttttggtatttttagtagagacggggtttcaccatgctggccaggctggtctcgaactcctgaccttgtgatccgcctgcctcagccttccaaagtgctgggattacaggcataagccaccacgcccagcctcgattatatcttaataagaacggtctctttcctgcctctttgttttgtacatattttttgaagtgtccagggcagttgtcatgtatgatgtcccaccttctgagtttgtccggttgtttgctcctggcattgcctaacttgtgcttagagtgtcccatatcacagacgccatggggcagccgtgcaatggctgaggaaggagatggacccctcctgcttcagtgtttgacttccaccccctctcctgggaccgtctacctggcccagagaagaccctagctctgtgaccttgggcaagtcacttagcctggttttgttttgtttcttcttttgttttttttttttttcttttttttgagacagagtctcgcactgtcacccaggttggagtgcagtggtgtaatcttggctcactgcagcctccgcctcctgggttgaagcaattctcccacctcagccttccgagtagctgggattacaggcacccaccaccacacccagctaatttttgtattgtttagtagagatggagtttcaccatgttggtcaggctggtcttgaactcttgagctcaagtcatccacctgcctcagcctcccaaagtgctgggatcacaggcgtgagccactgtgcttggctcacttagccttttaagcctcatattcctcatcccctcccttgtggggacagggattcattgggacagagcatgttcagtggaagcacaggcccaactcagaggcagcatgagaatgtcagctgggtgcagccatggcggaggagcaggcagcatgtccaggtctcaagggggagttagggcaggccttgccaaggaagcagggctgaggaaagatgaagcccatgttcctgaggtgccatgacgggcagccagtgggtgacaggggtccaggggaccaagggacaccaaggctcagaggaaaggccagggctagggcagagttaagggtgttactacaggaatgagtgaggtggccctggggtggggagggcagtgcagttcaaggttaaaagtaaggactggagccagatgcctgagctcttgtcttagctctgccgcttcctgcttgtgtcactgtgggcagtgacttcacctctctgtgcctcagtgtaaaagcatggttgggagtgccagaaatggaaacacccctccaggtgccagcagagctcctggcgcagggtcagtaggtgttgaccattattactaagaggtccctaggcagagactagatacctccgaaaaggtgggatcgttcagacaaggtagacactgggcaaggcctctgcatcctctgatgtcatctcttccccatccccagatgacttccggatcttctgtggggatctgggcaatgaggtgaacgatgacatcttggcacgcgccttcagccgcttcccatccttccttaaggccaaggtgatccgtgacaagcgcacaggcaagaccaagggctacggcttcgtcagcttcaaggaccccagcgactacgtgcgcgccatgcgtgagatgaatggtgggtgcggcctcccctgggaactgcaggcgcggcaggcgctggcctaagcctgacccgagcctgccttgaaccctctgtctccacagggaagtatgtgggctcgcgccccatcaagcttcgcaagagcatgtggaaggaccggaatctggacgtggtccgcaagaagcagaaggaaaagaagaagctgggcctgagatagggtctgtggccaggcacccgctcccacctggccgggcgctggctcctccctcagttctctttggaaaacccccagctgtccacccatcccctgccccaaaaccagtttcaataaatttacgttcatttccacccctggctgggcatggaagcacgctgtggggagcagggcttggcttccccacagctggaaatggcggggagccttgagagtttacccaggcaaacacccaggcgggggcttctgagcccttcctgcgcacccattccctcttcaaacctcttccacacatgctgagtgctgcttattccagaggagaaaggggggccaatggcaagggtgaagccaagctgaggcccatccccgtgtcctggctacttcctgtgttctcagcaccaaggtaggagatctaggcccttcccttctggagctcacaggcttctaggccctcttccatccagcagactctcaccaagggtctgaacagtgcttgaggacacaatggtgactaaaagtcctgggccctgcaccgttagagctcaaggtccagtgcagaaaataggcccggtgccctgacgataagagcccagagtggtcagggcaggatgggggcgctgacctgtgggtgagggggcccttcctgaaggaaccgtccacccccaagtctcctctggggctttccagcttctccagtctgccatgcccagccagctcaccatgctctaagtctcggtgggcacctctatctctgtctctgtgggtacccctccatttcttgtctctaagcttctatatccctgttggtctctgttctctcccttggagctgggaaatgaaaaaggaggagagacccacagatagagagaacagagacttggggtctgttcccctctcttcccagctccaagctggcctctgcctgtctgaagaggtgtctgtgcagggccttgaatgccaggctgagggcttaagctttacgcagaaggcagcagcaagccccaaaaagctgagaaaattcaagcagcagcaaggtcctgggcagcacagatgtgcgctgtagaaagggccctgtgaccggctgggtgcggtggcgcacgcctgtaatcccagcactttgggaggcaggcagatcacttgaggtcacgagttcgagaccagcctggccaacatagtgaaaccctgtgcctactgaaaaatacaaaaattagttgggcgtggtggcgggcacatgtagtcccagctacttgggagggctgaggcaggagaatcgcttgaacctggtaaaaggaggttgcagtgagctgagatcgcgccactgcactccagccttagtgacagagtgagattctgtctcaaaaaaaaaaaaaaaaaaacgccctgcgaccaccactgtggctggaagtctagaaggctggggcagggactgggccagaggagggagatggcaggtttgagtatggggaggagtggagggtctcccagggacacagccatcggaaccctccattaggagggagcaggttgggcaggactttgtggggcataagtcgggggatggacaataccaaggcctctcagggaccgaggtcccccaggagaggtgtcgaatttctcctgttcctgtcttccccgccttactgccccctctctgacgtcacattttccagtctggtcagagggtgagagcctccctggcaggaagtgccctttagccccctgccacctgggccagaccacccagccccaggatcctcaaagccccttccccccatcactagtcttttctacccctgaccccccttgtactgacagcaagcatagggtcacgggaggagatgggaagagaggatggctccagaaaggacgcttccaaatgcatgtgattctcacttccaagtgggagcagaacagcaggtacacgtggacatgcagagtggggtaacaggcactgcagactccaaaaggtgggagcgtgggggaagctgaacagttaccagttgggtacgttgctcaccattcgggtgcactaaaggcccaggccagtatactggatatactgacatatatccagtaaggaatctgcacttgtaccccctaaatgtttatctttttttttaatgcacacaagtcttcctgagaacaagaagagacacacacacatagaatgtggcaagcagaggtagagatggcgctgtgagcaggaggctcagaggcagagatgagaaccatcagagactgtgcagtgggaagggggacggggagaaaaccaagagacagatggagacggacaaggagatgagataggaacactcaaagacagatggggagggacagagatgtcagaagagaccaggtgacaaagcctcactggagtcaggcccgtggcaacagagacccagctttagatatgccaacctgaagaaagagggcagagagacatggagagacagacaagaggccagcttcaaggatgggaagccaggactcccttcaggcctccgcgctggacggatagagggaccagtgatgctccagggctctgtggcttaccccacactgattccaatcccagtcccactcccactccatgggacccccggtttactttactgtaaaatggaaggaggagcaatgccacccgctctccagaacggcaagtagttaatgatcaagaggctgggctggggactggaagatgccgatatgcaaaagttatttttaatggtaaatattacatacttattaaaatacagcaggatggctgggcacggtggtggctcatgcttctaattacagcactaaggctaaggcaggtggatagcttgaggccaggagtttgagaccagcctggccaacatggcaaaaccccatctctactaaaaatgcaaaaattagcctaggcatggtggctcacgcctgtaatcccagcactttgggagaccgaggcaagtggatcacttgaggtcaggagttcgagaccagcctggccaacatggcaaaaccccatctctactaaaaatgcaaaaaattagccgggcatggtggtgcttgcctgtaatcccagctacttggaaggctgaggcaccagaattgcttgaacccgggaggcagaggttgcagtgagctgagatcgcaccactgcactccagcctgggcgacagagtgagactccatctcgaaaaatattttatatatatataggacacccagttattgaattttacgtgaacaattttatagtttaggtatgtcctaaatatttcatgtatgtatgtatatgttacatgtatagctgtggttttttgttgttttttgctgaattatttgagcaagttacagactttttttttgttgtttctttttttgagatgaagtttcgctcttgttccccaggctggagtgcaatggcatgatcttggctcactgcaacctccatctccctggttcaagcaattctcctgcctcagcctcccgagtagctgggattacaagcacccgccaccacgcctggctaattttttgtatttttagtagagacagggtttcaccatgttggacaggctgatctagaactcctgacctcagatgatccacccgcctcagcctcccaaagtgctgggattacaggcgtgaatcaccgcgcccaaccacaagttacagacattataacatttcatctctgagttcattttctaaatgatatctttcctcctgaataccattatcaaatctaagaaaagaattctatgatatttcatattcagttcatactccagtttccccaattgtcctaaactattacagcgcggaagggcatggggtctggagaaggagagcagtgggaggatgcctgccttaccttcccccttcatcaaatgagagtatgtattgtacttgcctcatagaaggattcaatgaaggggtatggcacagttggtttcacacaatgagccctcatttaatgttggccgttattgctactattgttattgttgaaattgttgatgtcaatattgctatgattggcactcctgggaagcagccccaggacgccctccctactgggcctggtggaggattgggtgggccttcactcctgctccacgcccccgcagttactctgccgattgtgacgtcagctgacgctgggggcgggtgggggaatctggccggaaatccctcttcctgttgcagataagcccagcttagcccagctgaccccagaccctctcccctcactccccccatgtcgcaggatcgagaccctgaggcagacagcccgttcaccaagccccccgccccgcccccatcaccccgtaaacttctcccagcctccgccctgccctcacccagcccgctgttccccaagcctcgctccaagcccacgccacccctgcagcagggcagccccagaggccagcacctatccccgaggctggggtcgaggctcggccccgcccctgcctctgcaacttgagcctggctgcgacccctgctctgacgtctcggaaaattcccccttgcccaggcccttgggggagggggtgcatggtatgaaatggggctgagacccccggctgggggcagaggaacccgccagaggtgagcgatgaactgaggactagatgcctgggtgtctgggttaggaaggacctgggggactagactcccaagaagccgggggcctggactcctgggtctaacagaggaagagagctggggtccctcactcccaggaccaagattttaggctcctggggaaggagggagcggaggcctggactcctggctctgagggaagctagggctggggcccagactccagggcctccaagtgtcaccagctcacccattgccatctggacttttcccgacccagaacattcagaaggccttcatcgcatccatggacctgtggaactgggatgaggcatccccacaggaagtgcctccagggaacaagctggcagggcttggtaggctgccgaggctgccacaacgtgtgtggggagggtgtccaggtggggcctctgctgaccctaaccccttatcgcctgcagaaggagccaaattaggcttctgtttccctgatctggcactccaaggggacacgccgacagcgacagcagagacatgctggaaaggtggctgcgggctgggacccctaagtgctggagaagaagcggggaggctgggatcctagggcaaagggaggaggggggcgtgcctaggttcctgggactgggtggggaggggccgcgtgcttgacccctgagggtgaaggaaaagggggcgcggggtgctgaaatacgggctggggggccataactcccagtccctgacaagtagagactagagagtgggtagttgaggggtctctttcattgctcacagtcctccctaaactcaggtacaagctcatccctggcaagcttcccacagctggactggggctccgcgttactgcacccagaagttccatggggggcgggtgagtgtggggagaggcggtgggaggtggggactggggtcccgaggcaccggggctagaggtgtagactccctgatctttgaggactgagaacacctgcgccctcaaggtggcatgacctggatccgggtcagccgggccccaagtgccagggttgagagcttagaccctagagtttttgagggggcacctgggctcccctcactcgggatccgttactcctcacagagcccgactctcaggctcttccgtggtccggggactggacagacatggcgtgcacagcctgggactcttggagcggcgcctcgcagaccctgggccccgcccctctcggcccgggccccatccccgccgccggctccgaaggcgccgcgggccagaactgcgtccccgtggcgggagaggccacctcgtggtcgcgcgcccaggccgccgggagcaacaccagctgggactgttctgtggggcccgacggcgatacctactggggcagtggcctgggcggggagccgcgcacggactgtaccatttcgtggggcgggcccgcgggcccggactgtaccacctcctggaacccggggctgcatgcgggtggcaccacctctttgaagcggtaccagagctcagctctcaccgtttgctccgaaccgagcccgcagtcggaccgtgccagtttggctcgatgccccaaaactaaccaccgaggtgagagggccgcaaagactgcggggagggcgaagctggagtcctgagccgggacccaggcacctaagggggcggggcccgggagactgacagtgagggggcgggggcttagggaccaggggctcgaaggaggggccggtggcccgcactccaggtccttggggaggagagggctaagaaactggtagtcttatagggaccaaggggatgaggacccaggctcctggattatataaaacgaaagcgataaaggcccagattcctgggtctccgagatggggaggccaaactcctaaatctctgagactggggccctggacgcttgagtctccaaggctgactgttggatctcagagaagggggggcggatccccttctcgggtcctgggtcccgagttgggaggacccggacctctagatcattgaagtggtgtgatctagggccgggaagactgagtgtgcccctcccttcatcccgcaggtcccattcagctgtggcagttcctcctggagctgctccacgacggggcgcgtagcagctgcatccgttggactggcaacagccgcgagttccagctgtgcgaccccaaagaggtggggcagctcccctgcccagccaaatccgccccgtctcttctagttcaatttagctccgcccaagggctaggttcaaccgcgtagccctcggccccgccgctccccggcccactcgaggccccgcccaacccttctcaaacccaatctcccgcctgtactcctgcctcaaccaacccagtctccaccgggctctgcgaggcctcgcccaggtctgcactgcacaccgcccccaggcccggccctccccactatcgccaagccccgccccttcccactccgaccgagcgggcctctgtcctaggtggctcggctgtggggcgagcgcaagagaaagccgggcatgaattacgagaagctgagccggggccttcgctactactatcgccgcgacatcgtgcgcaagagcggggggcgaaagtacacgtaccgcttcgggggccgcgtgcccagcctagcctatccggactgtgcgggaggcggacggggagcagagacacaataaaaattcccggtcaaacctcttcgcgcgtgctcctctgcagcattcttcccgctgatactgactacagcagctagggagcctaagtgtgcagctccacatgttggaatttggcctccccacctcggagacccaggcgtctgggccttcatctctttcctctcacatgatccagaggcctggatccttgctcgctaaaagactgcagtgtcttagtcctcttctccctgaagaccctgaagtgcgggccaccagccccaagtcccttaagctcccaggtccctaagccccgccccacgctgtcagtttccccggtcccgcccccttaggccccgcctctcgactccgccttcactccctccgcaatcttcgcggacctccctcctcggtggttagttttgggatgaggaaccacccacctccagtgctgcgcaatgatcaaaggagacccagactcagggagcctgccatgtgcccgccctgtgatgagagaggcaaagaaactaaacccaaagcccatagggcctactgtgtccctgccctgtgtcgggatttgtaaaggaatcagacccaatcatgagagtatatctgctgtgtccccttgaagagaagactcagaccctgaaaagggcttactgtgctgtgtgtcctcccagtgcaagggatcatcaaagaattaaaactagtgcttgcaccccaacaccactcactctttccccactccaagctggaggacacaggactcagacctacactgtaaagagagcctacgccattctgagagccactgagcccctaaagagagcctgctgtctgtgagcgatgcgggggatacagcagggaccaagacagccctggaccctccccttaaggagctcacagtccagtgggaagacagacccatcatcagagtgttttgacctgggatgagaagactccaggggactgagggaggccaaaaggagagacctgatctagcccaggaggagaagggtcaggggagactccctggaggaggagacagctgatttgagaagtcaggtaggcaaagaatgtttcaggcagaaggaacaacaagatcaaaggcccagaggcagacgatctcataccactgctcaaaactatcagtgtgggccaggcatagtggctcacacctgtaatctcagcattttggaaggctgaggcaggaggatgccttgaggccaggagttccagaccagcctgagcaacataggggagacccccatctctatttaaaaaattaaaaataaacgtggctacagcagcaacagggaccaattcataaaggatctgtgggccgtggtgaggagcctggactttgtctccagggctcctggggagccatcaagggttttgtttgtttgtttgttttttgagatggagtctcactctgtcactctggctggagtgcagtgatgcaatttcagctcactgcaacctccgactcccaggttcaagcaattctcctgcctcagcctcccaaatagctgggattacaggtgcacaccaccacgcacagctaatttttgtatttttagtaaagatggggttgcaccgtgttggtcaggctggtcttgaactcctgacctcaggtgatccgcctgccttggccacccaaagtgctgggattataggagtgagccaccgtgcctggcccccatcaaggggttttaagcagggaaagggatttggattttaggaagatctcattgcaggggatgaatacatgcatgtaaacaggtaattccacaaataatcacaatgttgatggacacagaatgtgtaagaagaggtccctgacccaattccatctggacactgcaccccagatggtatgtgagaggctttagaggccagatgggggaggaaggaaagcagttctctttcatagctccctctcctagtccctagatgcttccttcatttccacaagaaattcttgcattcagcaaatatttatagaccacttcctgtgtgccaggcactgctttagatacaatggtgaatgaataaggcagacaaaaattcttcctttatgataattcttttctgttgagggaggcaaaaagaggtaaacataatgtaaaagaacagatatagccgggcacggtggctcacgcctgtaatcccagcactttggaaggccaaggcgggcagatcacctgaggtcaaaagttcaagaccagcctgaccaacatggacaaaccgcatctctactaaaaatacaaaattagccaggtgtggtggcgcatgcctgtaatcccagctactggggaggctgaggcagaagaatcgctctagctcgggaggtggaggttgcagtgagccaagatcacaccactgcactccagcctgggcaacaagagcaaaactctgtctgaaaaaaaaaaaaaaaaaaaaaaaaaaaaagccaaattggccaggtagggcagctcacgcctgtaatcccagcattttgggaggccgaggtgggcagatcacctgaggtcaggagttcaagaccaacctgaccaacatggtgaaatcccatctctaccaaaaataccaaaattagccgggagtggtggcgtgcgcttgtaatcgcacctactcgggaggctgaggcaggagaatcgcttgaaccgagtagacgcaggttgcagtgagccaagttcgtgccactgcactccagcctgggcgacagagtgagactccgtctctctctctatatatatattttaagggtagggatttttgtgttttgtgcagcgtgctttctcaacccgtaaagtgcctgatggctggatacggtgggtcacgccggtaatcctaacgctttggaaggccgaggcgggaggatcgcttagagaccaggagttcgagtccagcctgggtaacacagcaagaccccatctctataaaatgcatatatatatccaggagtagcggtgcgcatctgtaatcccagctactcgggaggatgaggcgggagaatcgcttgaacccaggaggcggaggttgcagtgagctgagatcgcgctactgcactccagcctgggccatagagtaagaccctgtctcaaaaatttaaaaaaaagaaaaaaaaaatttaaagaaaagaaatacctgacacagaaaaagcgttcaataaatatttcttgcatgaataaaagtactttcgctgggacatttttctccacacctaccctccagccagccccgggatctataacactctctccgagtgaagacacagaggtgatgagatcgggtaacccacgggcgcccgagccccagccgcgcaagctcacgattgggccagaagtgaggatgaacaagcatttagcccaatagaaagtcgtagttctcttgctgggcgtggcttgaatgacttcagtggcctcctcctgggagggagctgaagccgctcgcaagactcccgtagtccccacctctctcagcttccggctggtagtagttccgcttcctgtccgactgtggtgtctttgctgagggtcacattgagctgcaggttgaatccggggtgcctttaggtgagtgtggagggttctgtaacctgggaccccagtctagcgggctgaggagccggaccccagcttccctgagaacgggttgaggcttccggctggcggcgtccggcctccctggaccccggggccctgttctgttcatcgtaagagctaacaatgatacggttcttccttgatgccaggcaacatcccaaacaactttaattaatttatttaactctcccaccagccctatgagatagggcctgcgattatccccttttgtcagtaaacaggctcagagataccaagcgacctagctgaacctacacagcgaccaggatttggcccaggagtttgtcctccagggctcttcatggctaattcacaggcgtggcctctcgcggcttgcctgggccgcagcctggctcccgggtgtccagtccatcctcccttttggacgttggaggggccgcagcgtcatctccgatgcaccctcatcctcagataccgggtagagatctcgccggtaacgatccttcctactgcgtctgtgccccagcagctggtgttttacaccccacttccccaccgaaagactgttttagtgctccagacccccaccaccaccttgcgtcgcttgaatttgacactgctctgcaagtctctgtatagccccacgactcctaggattccctggaatatagatacttttctctcaggctcccgacgaacactgtcacttcttcagagacattatattaaaggtgtttaaccctgggtccgcagagttggtagaattcaaggaatgctagtacttgaattggggtggggggtggaattgcatctgtgtttttactaaccttttgaggcagcaacctcggtagtactagcagcagcggtgattttgttagcaatgaaaatcatagacattccttttttttgtttttctccttttttgagacagggtcactgtgtcacccaggctggcgtgcagtggagaaatcttggctcactgcaacctctgcttccctgtgcaagcgatcctgcctcagtagctgggaccacaggcacgcgccaccacacctggctaattttaatttttttttttttttttgagacaagatcttgctgtatcgcccaggctggagtacaatggcacaatctcggctcactgcaacctccgcctcttgggttcaagtgattctcctgccccagcctccctggtagctgggattacaggtgcacgccaccatgcccagctaattttttgtatttttagtagagatggggtttcaccatattggccaagctggtcttgaactcctgacctcaggtgatccacccacctcggcttcccaaagtgctgggattacaggcgtgagccacctcttccggccaattttaatattttttttgtagagatgagatggggtttcaccatgttgcccaggctggtcttgaactcctgggctcaagcgatcctcccacctcagcattccaaagtgctgggattacaggtgtgaaccattgtgctccacccaaaatcacaggtattcttataccacattataacagcaaatgtcacaaaatactatattcattcatgattacttcaaaattgtatttttttttttttttgagacagtgtttttgctctgttgcccaggttggagtgcactggcacaatctcggctcactacaacctccgcctcctgggtttaagcgattcttttgcctcaacatccagagtagctgggattataggcacctgccaccacacccagctgatttttatatttttagtagagccagggtttcaccatgttggccaggctggtcttgaactcctgacctcaggtgatccacccccctggcctcccaaagtgctaggattacaggcgtgagccaccgcacccggcgaaaattgtattccttaatgaatcctcagctggatataactgcttttctttgtgatgctgtgcaggtttttttcacttcatgtactcatggagcctatgcaatttttaaatacatttaaacatattcaggccgggtttggtgtctccgttctgtaatctcaacattttgggaggccaagccgggcagatcatttgaggtcagaagttggagagcagtctgaccaacatggtaaaaccttgtctaaaatacaaaaaaattagcagggcatggtggcaggcgcctgtaatctcagctgttcgggaggctgaggcaacagaattgcttgaatcttggaggcggagtttgcagtgagcctaggtcgtaccagtgagcctgggtgacagagcaagactctgtcttaaaaaaagaaaaaaaaaaacattcagcgagaggtttctgggattcatcagactgctgaggagtttgtggcaccaaaaagattaagaatctttgcagtgtagattatgccaacaacggaggcagcccaccagttatttttatgccgtttaaccgtaggaagtcacttagacaccctgttccttcctcgtctgggcaatggtgatagtaatagttcctaccttttagagtggctataggagtaaagtgtgtagaacagcgcctggcatgtagtaagcactcagtgagtgttagctcatgttatttggggaccaggcttgattttgctgaggagttgtaccccaaccctgccgcgacctcgacactcagatgtgtggattcgccctgcccctcatctctgtgtatgttgagaggcaggaacttgttcacacccagcccattgttccgtgcctgccctcttccattgatcctgggtagtctggcttgctcagggcccctggggcccctgctgacacccactcctttcgcctccaggattcagcaccatggcggaagacatggagaccaaaatcaagaactacaagaccgccccttttgacagccgcttccccaaccagaaccagactagaaactgctggcagaactacctgggtaagcaggacctttccctggccacatacctcgagtcactcaccgcttgcctcttcctaggggacccatccaccccagcctcctcccttttattctgaacatccttactctggaaggcccatgcctctcatcacctgctgttcaggtccaggctagggttacaaactttagttcctgcaatgattttttttttaatttaaattttttattattattatggtttggttttgtttttttccagagatggggtctcactttgtcacctaggctggagtgcagtggtgcaatcatagctcactgcagcctcaacctcctgggctcaagaggtccccctacctcagcctctcgagtagctgggaccacaggcccacactactgtacttggctaatttttttgtagagaagaggtctcagtttgttgcccaggctggtctcaaactcttggcttcatgcgctcttcctgcctcagcttctcaaagtgttgggattataggtgtgagccaccgtgcctggcccctacaatgatttttttttaagctgtatgtgtgtgcgtactgtaacatgtacagaaagcacataacaaacatgtacagctaaatgaataattctaaagtgaaccccttgtgcaaccataacctggagagaaaagcagacattgcccacactctcatctccctgccttcttttttttttttttgagatggagttttgctcttgttgcccaggctggagtgcaatggtgcaatcttggctcactgcaacctccgcctcccaggttcaagcaattctcctgcctcagtcccccaagtagctgggattacaggcacctgccaccacacccagctaattttttgtatttttagtagagacggggtttctccatgttggtcaggctggtctcaaactcctgacctcaggtgatccacccgcctcggcctcccaaaatgctgggattacaggcatgagccaccgcgcctggcctccccaccttctttatgtcctgtctggaacacagcaccccgctctccccagtagagaagtgacgccactaactgggggttatcacatctttgtttttggttttggtttttgtttttgagactgagttttttgttttcgttgcccaggctggagtgcaatgtcacgatctcggctcactgcaacctcttctgcctgctgggttcaagcaattctcctgtctcagcctcactagtagctgggattacaggcacccgccaccatgcccagctaattttttgtatttttttttttttttagtaaagacaaggtttcaccatgttgatcaggctgatcttgaactcctgacctcaggtgatccacccacctcagcctcccaaagtgctggaattacaggcgtgagccactgtgcccggcctcacatctttgttttttaccaccatgtttattattttattttattttatatatgttatgttgttatgttattgatggagtctgtttcttgttgcccaagttggagtgcaatggcacgatctcagctcattgcaacctctgcctcccgggttcaagtgattctcctgcctcagcctcctgagtagctgggaatacaggcgctcgccaccacacccagctaatttttttttttttttttttttgagacggagtctcgctttgtcgcccaggttggagtgcagtggtgcaatctcgactcactgcaacctccgcctcccagcttcaagcacttctctgcctcagcctgccgagtagctgggattacagtcgcctgccaccatgcctggctaattttttttttttgtatttttagtagagacagggttttaccatcttggccaggctggtcttaaactcctgacctcgtgatccacccccctcagcctcccaaagtgctgagattacaggtgtaagccaccatgcctggccaattttatttatttatttgagacagagtctcgctctgttgcccaggctggagtgcagtggtacaaccttggctcactgcaacctccgcctcccgggtttaagcaattctcctgcctcagcttcctgagtagctgggactacaggcgcgtgccaccatgcccggctaattttttgtgtttttagtagagacaggatttcaccatgttggccaggctggtctcgatctcctgacctcatgatctgcctgcctcggcctcccaaagtgctgagattacaggcgtgagccaccgtgcctggccaattttttgtattttttttttttttttgagatggagtctcgctctgtcgcccaggctggagtgcagtggcgtgatctcggctccctgcaagctccgcctcctgggttcacaccattctcctgcctcagcctcccgagtagctgggactacaggtgcccgccaccgcgcccagctaattttttgtatttttagtagagatggggtttcaccgtggtctctatctcctgacctcgtgatctgcctgcctcggcctcccaaagtgctgggattacaggcatgagccactaggtccagccacttttttgtatttttaatagagacagggcttcaccatgttgtccaggctggtctcgaactcctaccctcaagtgatccacctgccttagcttcccaaagtgctgggattacaggcctgagccaccatgcccggctaccaccgtgtttagattcacctctttgtgaactttatacatactgtgtgtattcttttgtgtttggattttttcattcagtaccttctcagatccatacatgctgtggcatatagcttgctcattttcattgctgtccagttttctacaatttattctatgcctgtacacttgtgtgatttccattttggagttcttacaaatggtgtggctgtaaacatctttataaatgtaattttgctgggtgcagtggctcacgcctgtaatcctagcactttgggaggccgaggtgggcagatcaagaccagcctggccaacatggcgaaaccctgtctctactaaaaatacaaaaattagctgggcatggtggcaggtgcctgtaatcccagctacttgagaggctgaggcaggagaatcacttgaacccaggaggaggtagaggttgcagtgagctgagatcgcaccactgcactccagcctgagtgacagattgagaccctacctcaaaaaaaaaaaaaaatgtgttccaactcttgatctgggctgacttgaacccctttcttcacagacttccaccgctgtcagaaggcaatgaccgctaaaggaggcgatatctctgtgtgcgaatggtaccagcgtgtgtaccagtccctctgccccacatcctgggtatgtgcctcctgccagggcccttgggatgctggggtggggtcttagcagaggggagtgtggtggcttggtgggagctcatctgtgaggggcagagggaggacagggcaccacactgtcccaggactcagtgcctttcctcccgcctagaattacctccctgtctccttctgctgatgcctctcaaccagtcagggctctcagctgaggcgaccagggtgctttgctagatgtagctcactcatgcactctccaaatacacactcagcactgggctcccatccctgtgtagctcacaattctgtgcagtcctgtccttttttattaggaacatttttttttctttttttttttctttttttttttttagacaagggtcttgctgtgttgccaggctggaaaggctggagtgcagtggcgcgatcttgcctcactgcaacctccgcctcctgggttcaagcgattcccctgcctcagccttccaagtagctgggactacaggtgtgcaccaccatgcccagctagttttttgtattttaatagaaacggggtttcaccatgttagccaggatagtctcaatctcctgacttcatggtccacctgcctcggcctcccagagtgctgggattacaggcgtgaaccaccgtgcccggccctattatgaacattttcaaagcagagataataattcattgacctcaaatacatccatcacccaaagtgaatagttatcaggatttatccacggtttcttcatctaccccttttcgttttcttctttcctttgctgaagtattctaaagcaagtcccagacacgtcatttcacccctgcctacttcagtgtggacttctaaataatgacacagtaagacagtcctttcagccctgatctgaccaaatctgtcgtcaatatttaatagctctttgctatgcccctgccctttgtttaaaaaaaaaaaaaagtttttaaagacaaggtctcatgatgttgcccaggctagactcgaactcctgggctcaagtgttcctcctgtctcagcctcctgagtagcttggactacaggcatgtgccactgtgcctgtctctctctctctctctctctctctctctctctttgtcgccctctcgctctctcttgctctctttctctctcgctctctctttctcactctttctctctttctttcctttctttcttttctttcttgagccttgctctgttgcccagactggagtgcagtagcatgatctcagctcactgcagcctcagcctcctgaatagctgggactacaggcatgagccaccacacctggcccaatttttgtattttttttgtagaaatggggtttcgccttgttgcccagactggtctcgaactcctgagctcaaagcagtctgcctgcctcagcctcccaaagcgctgggattataggcatgagctaccgcacccagctgaatctttcaaaataaaaaaaattaccctttaacttggcaattccacatctagggatgctacaaaaatcttcatgtacaaagatgcccattgcagagttgttcgtaatggagaatatttggaaataacccaagttaaaacattgatcttgatagtctttatggagactatggtgatctacatgctagcacacagaaagaatgctaagacacaggaaaagtaagttgcagaacaatctatatagtaggagtcaatttgcaaggatggagtttttatggtgtggtatgtgtatgtaaataaagtaggcacataccgctggcacttattatgggccagctatgttgttagacctttttttttttttttttttgagatggagtcttgctctgtctcccaggctggagtgcagtggtgcaatctcagctcactgcaacctccgccttccaggttcaggcgattcccctgcctcagcctcccgagtgtctgggattacaggcgcctgccaccatgcccagctgatttttgtatttttagtagagacagagtttcaccatgttggccaggctggtctcaaactcctgacctcaggtgatgcacctgcttcggcctcccaaagttctgggattaccggcgtgagccaccacgcccagccatgttagcactttacatcacataaggtcaacatgctaacacaaccgtatgaggtaggtactattgttagtatcctcattttacaaaattggaaactgaggcccagaaaggttgagtaacttgcccaaagtcacacagctaggaagtgatggagcagggattcagattcagcctctctgttatccatgctttcatccactgttcgttcttgcaccagtggtcctcaccctttttggcaccagggatgagcttcatggaagacagtttttccacagacagggttggggatggtgtaaggatgagtccagcatattacatttattgtccactttatttctgttattattacattatataataaaataattatacaactcaccatactatagaatcagtgggagccctgagcttgttttcctgcaactagatggtcccatctgggggtgatgggagatagtgacagatcatcaggcattagattctcataaggatcatgcagcctagatccctcacatgcgcagttcacaatagggttcgcactcctaagagaatctaatgctgccgctgatctgacaggaggtggaactcaggcagtaatgcgagcattagggagtgcttgtaaatatagttgaagcttgtctcgctcacctgccactcacttccagctgtggggcccagttcctaacaggccacagaccagtacctggtaggcactggttggggctcggggacccctgccttatagcataaaatgtgagcgtgtatgtatataaaaacgtttatgcttgtaactgcttgtgaggtccacaaagagtagagtgttactttcagggagtgttaacttgacataggccttatatgggccttttcattttttttttttttttttttttagagacagtcttgctctgtcaggctggagtgcggtgtgcagtggtagcatcatagctcactgcagcctcgaactcctgggttcaagcagttctcccacctcagcctccctagtagctgtgactacaggtgcatgccaccatgcctggctaagttttgtattttttgtagagacagggttttgccacattcaccaggctggtctcaaactcctgggctcaagcgatcctcccacctttgcctcccaaagtgctggaattataggcgtgagccaccatgcccggcttattttttattttttgtagagatgggggtcttgccgtgttgtccaggttggtctcaaactcctgagctcaagcagtcctcccacatcggccccgcaaagtgctgggatgacaggtgcgagtcaccacacccagcctccatcattgtttatactgagcatcgcctgtggtcagtggtgggattgcactgtgtattgtttggcaccttttttgcacttgactatgtatcttgaagatccatccattcatgccagaacataaatcagcctcgttttttttcacagctgcctgctattccatctcccctgtttggacaaacagcatagtgttgacttgaggttttcaaagcagggcccacccttggagctctgtacagtgacacatctccccatcgacagctctgcagtgggcctggggttttcctgcccattactctcctcccagcatgtcagcttgttcagaacagtgatttctgtcttttggggtcactgctgattccccggcctctagaatagaggttggcacacagcaggtacctgtggatattggttgaacaaacaggtgggcaaagtgaggaagataagaagtccatccgttcagtttccccactgcggagggaataacactgtctttccacaggtcacagactgggatgagcaacgggctgaaggcacgtttcccgggaagatctgaactggctgcatctccctttcctctgtcctccatccttctcccaggatggtgaagggggacctggtacccagtgatccccaccccaggatcctaaatcatgacttacctgctaataaaaactcattggaaaagtgagactatgcgtgtgaacgggccaggcagtggcaagaagctgggctggaatcagtgccctgaccagggaggggcttgaatgagtattttctctgttttgtttttatttatttaatttaatttaattttttttttttttatgatggagtctcgttcttcacgcaggctggagtgcaatggcacgatctctgctcactgcaacctccacctccagtgttcaagcgattctcctgcctcagcctcccgactagctgggactacaggcacaccccaccacacctggctaatttttgtatttttagtagagatggggttttaccatgtcggccaggctggtctcaaactcctgacctcagatgatccacctgcctcggcctcccaaagtgctgggattacaggcatgagccaccatgcctagcgttttttaacttaattttattgaaccttggccaccctctctgtgccagtcaatgagtcaaatagttgattatacagaataacctaagttcctatgtgtgcaaccaccctacataattttaaagcaaattatatagattataatataatataaaatacataaagattatattttatccagaaataagaaactatatgtatctcttggagatacaatttttttttttttttttttgagacagagtctcaatctgttgcccaggctggagtgcagtggtgtcatctcagctctctgcaacctctgccttctgggttcaaactattctcctgcctggagatacctatttttttaacataattatttacacctaagaaattagttcttaatggccgggcacagtggctcatgcctgtaatcccagcactctgggaggctgaggtgggcagatcacctgaggtcaggagttcaagatcagcctgggcaacatggcgaaacctcgtccctactaaaagtacagaattagccaggcatggtagcacatgcctgtaatcccagctactcgggagtctgaggcaggagaatcgcgtgaacctgggaggcagaggatgtggtgagccgagatcatgccattgcactccagcctgggcaacaagagtaaatctccatctcaccaaaaaaaaaaaaaaaaaaaaaaaagagttcttaatatctaataagcaatctcctgcacaatgtgtaacttctccccgtgttgggacctgctctttcatgctgatcatgatggtagttggaagtcatttaagtaggccaagttgagagctgttcttcatggtgcccccaaaagaattgccacacaataacagcccagaatatccccaacagactcgtcaacagggacctagctagcatgaccagccggaacactcttatggctgaattggtgtgtcctcaaaacctttcaaatggccggggtgtggtggctcacacctgtaaccctagcactttgggaggcccaggcgagtgggtcacgaggtcagggattcaagaccagcctggccaagctggtaaaaccccatctcttctaaaaatacaaaaaaaactataaaaatacaaaaattagccaggtgtggtggtgcgtgcccctaatcccagctactggggaggctgaggcaggagaatcacttgaacctgggaggtggaggttgcagtgagctgagatcacaccactgtactccagcctgggcgacagagcgagactccatccccaaaaaacaaaaacaaaacttcaaatggttacaaacttgtctgatgcattcacatgagcagggatgattcttgtatggagaaaaatggccccagagatagatcttgtgaaatagctgctcatgaagaaaagtggctgtaggggccgggcgcggtggctcacgcctgtaatgccagcactttgggagaccgaggcaggcagataacctgaggtcgggagttccagaccagcctgaccaacatggagaaaccccgtctctactaaaaatacaaaatgagccaggcgtggtggtgcatgcctgtaatcccagctactctggatgctgaggcaggagaattgcttgaacccaggaggtggaggttgctgtgacccgagattgtgccattgtactccagcctaggcaacaagagcgaaactccgtctcaaaaaaaaaaaaagtggctgtaaacaggaccttagtgcacacacagggagcttgagggatcgtgggaggttatggcgtgggttggaagtagcaaagaacttaaacaccatgaaaaaaaaattttttttttgaaatggagtcttgctctgttgtccagactggagtgcagtgatgtgatctctgctcactgcaacctccacctcccggttcaagcaattctgcctcagccttccaaaacgctgggattacaggcgcttgccaccacacccagctaattttttgtatttttagtagcgatttagagagtagtttcaccgtgttgaccaggctggtcttgaactccgtgacctcaggttaaccatccacctcggcctcccaaagtgctgggattacaggcatgagccaccacacccagccaacaccatgaaaatttcaaatgaaacaggacggccagtgaaaagtcaaggtgctggactccttgagtccagctgcctgattctgcccagggtttgccaccagtgccagtgtttcctgtacattcctttagagatagctcatgcatctagaagtatttgtaaatatattgatctgattggatatggtgcccttttgctcacacagcccctgccacactggcctcttcagtgcacaggaactgtgagcaaatgtatttcgacacaccaggctggctccaaccccggatcctttacacttgctgtttgctcgacctggaatgtttggccaccagctgtccacaagctcacccctcactgccttcaggtcttcatttagcgaggccttctctgaccactcagccttcaccttcagctcctccatctttgtgccccttcactccttttgtttctttctcttttttcaatttttatttatttttttagtttttggagatggagtctctctgtcaccaggctggagtgcagtggcgcaatctcagctcactgcaacctcagactccctggttcaagcgattcttctgcctcagcctcccaagtagctgggattacaggcacgcgccaccacgcccagctaatttttgtatttttagtagagacggggtttcaccatgttggccaggatggtctccatctcctgactttgtgatccacccagctcggcttcccaaagtgctgggattacaggtgtgagccaccacacctggccttgtttcttaagcacttaccgctaacatgccaaatgttatccttcatcattgcaccactggaatgtaatttccatgcgggcagatttggaaatatatatttaattccccttttcagctttttttttttttttgagataaggtcttactctgtcacctaggctggcatgtagtggcgtaatctcagtttactgcagcctccgccgcccagactcaagccatcctcctacctcagcctcccaagtagctaggaccacaggcatagaccaccatactcagctagttttttgtttgtttgtttgtttttgatagagacggggtttcaccatgttgcccaggctggtctcaactcctgagctcaggtgatctgcccgccttagcctcccaaagtgctgggattacaggcctgagccaccgcacgccagcctgcattttttccaaatgttctaatctttctcattttattatttttttttttttaattttttttttgacacaagacctcactctgtcacccagcctggagtgcagtggcctgatcacagcttactgcagccttgaactcccaggctcaagagatcctcccaccccagcctctcaagtagatgggactacaggcatatgccaccacacccagctaatttttgtattcttttgtagagatggagtttgcccatattgcccaggctgatctccaactcctgggctcaagtgatcctcccgcttcagcctcccaaggtgctgggattacaggcatgagccaccacacccagcccagctgttaatcttattgatgattaattatacgtgatgggtcacttgtcagttgctgctttcaaggttctctttttatcgttcaataatttgattatgatatgtctggtgatggatatctttgagtttatcctatttgaagattattgagcttcttggctctagattgatggtttttttcatcaaattttgggagttttcagccattctttcttcatatattcttttttacccctttctttttgtcctctccttctgggattcccattatttgatgatgtctcacaggtctctgaagttctgttcacttatcttcgtgcttttttctttctgttccttagacttgatcatctcaactgatctatactcacgttcaccgatcttttcttctgcctactcaaatctgttgttgaaccctctattcctctattgaattttttctttttttttttttttgagacggagtctcgctctgtcgcccaagctggagtgcagtggcgcgatctcggctcaccgcaacctccacttcccgagttcaagtgattatcctgcctcagcctcctgagtagctggtactacaggcccataccaccatgcctgattaattttgtgtatttttagtagagacagggtttcaccatgttagccaggatggcctcgatctcctgacctcgtgatctgtccacctcggcctcccaaagtgctgggattacaggcatgagccaccacgcctggcccatttgaattttttcattttagttactgtacttttcaagtcccaagtttctgtttagttcttttaaaataatttctgcttttaggccaggcatggtggctcacacctgtaatcccagcactttgggaggccaaagtgggaggttcacttgaggtcaggagttcaagactagcctggccaacactccatctcaaaaaaaaagacagtattctttagcattagttccgctaatgattggacaaagatttccttagcctccaaaaaccaataatctcctagcctttgctgaggcatggtgggccatgctttcgacattcagccaggcaattgacaactctgccttcgccactacttctcccaggaaggcacacatcctcaaggtcagcccaatgtaagaagactgggttctcatctctggtctttcttgagcctgcatatactcctgggcatgcacacaaccctatgcatgcatgtgaccttctagatttccaagaatattttggagtttttcaaagccttctcattccccagctttatcttttaaactgtttcattagcctattattggcctcaactgttattcattgcttaggcagctgcctagttaaacaattgcatgcaattgtgtttcacaaatgcccctggggaaataattttgacgatgtatgagctctaagttaggtcaaatacagacaacattgcaagtaggggcttccagggaaccataagacgaatcaaataattctgactttctgggagtgaggcttttatggagtttcatcctcttctgccccgtttggtgtatgccaggctgctagtttccactgagaatgctggcagttaatattcaaggctaccatggagctggaatgggggaatggaactaggccaattaaaaatgtcacaaagtataaaaattagccgggcgtggtggcgggcgcctgtaatcctagctactcgggaggctgaggcaggagaattgcttgaacctgggaggcagaggttgcagtgaactgagatcgtgccactgcattccagcctgggcgacagtgagactctgtctcaagaaaacaaaaataaaaataaattttaaaaaagtcataaagttcactgctcttactaagattcagctgcttttcttgaataaacactttacagatttttgttgttgttgtggagacagagtctcactctgtcacccaggctggagagcaatggcacgacctcagctcactgcaacctctgccttcgaggttcaagcgattagctcctgcctcagcctcctgagtagctgggattacaggcacttgccaccacgactggctaattttgtatttttagtagagatagggtttcaccatgttagtcagcctgacctcaggtgatccccccaccctggcctcccaaagtgctgggattacaggcgtgagccaccacgactggccaaaaaaactattttaaaatctaaagtgggttgactaaaaccaaattaaccattttaatcggaaaacatctcatgtatcttattaccaaaccagtgccttgacgatgggattttcagtgtcatttgccaaattcgcaggcaccgcagtggggagccactgctcccacagcagaggcaatacacggcctagccttggggttgagaagttctggggacggtgtcgggggccctgggccaccatttttgcatggagccagccctgcgctgcgagggcgtggcatcggagagaccgtggcctcgtgggcagcatcggcggcccctggggacacgcgctggctcagtccccacctccgccagggaagcggtctgatgatacccatttcgcagatgggcaaatccacaagccaagtcgtgccgcccagaagaggcagaaccgggatttgaacctaggtttctcattctgcacctgaagaaataaatgtctggtccatgcgtgtgttggggggcgacggggacttttcttcaaccaagcccggtgtgccccctctcattttctagcacgttcttctcccccatctttgcacttatctcagactcccctcacacacctatcctgggtgccatcctttccctcagcccaccgcccatgtagtcagcctcctaagcgccccttccacctgtcccctcatctccccactgctctgcctcggtccagccctggccttggcaggggtccctgcctgggcctccccacgggctcccggcctcacagaggagcagccacctgtgcaaggtcacacagcaggagagacacttctgggattcaggacccacctgtgggtccgaagtggattttttgtttgtttggttttggagacagggcctggctctgtcactcaagctggagtgcaatggcacgatcttggctcactgcaacctctgtccccaggttcagccatcctcccacctcagcctcccaagtagctgggaccacaggcatgagcctggctaattatttttgtattttttatagaaacggggtttcactatgtcacccagtctggtctcaaactactgagctcaagcgatccgcctacctcagtttcccaaagtgctgggattacaggcctgagctaccacgccccgccctgatttggatcttgctcctattcccaggaaggcccatgtcctagcaagagagacaccaggtggtgcgcacgcccctccacctccaactcctccaccgccaacaaagcctgggacccagaggccatgggtcctacacaatctggtatttcaggtctataaatcatgggggtggcagggagcccatcaaagctgttcatccagcctggtctgccggctcagcctcttgtccaccccactgccgtgccccaaaacacacacacacacacacacaccctccctccttcctgggagactagcccaaggaggggcctgggcgtatatagggagccacggtgggtggggctggccagagaggctgcagacagagaaggtgaggagggggccctgggagtctgggtatggcatgaggggtctgaggctcagggaggggcagtgccaagttcaggccagtgactgccccaccggagcccgggtgtcctcttgtgcaaaatgcctccccaccagggctgtgggtacatcagtaccagcctgggccccgcagagagctggagcaacccctcgaagccagggtgtggctcagagatggggggtccggctggccctttacgctcctggcctcatccctgctcatgtgtcccaggatgatggcgtctgcggcagcagcggaggccgagaagggatctccagttgtggtgggcctgctagttgtgggcaatatcattattctggtgagactcgccccagtgctgggagccgagtggttgtgtggtggggaggggacagtcctgagctcggggtgggggatgagggtccagaactgtctctcgggcagactcagtggtcagcacagcctgggttgaaatcccagctctgcctctccccagctctgtgaccttagcaagcgactgtccctctctgtgccttctttcctcatctatagactgtgtcctcattgtgtgggctgttgtcatgtggattaatccatgtgtggccctcagctcagagaaagtgcccgaccaatgctggctatcaccatcagcatcactatggatataaagtgacagcctggtgcacaggaggccacaagaaggaaaaacaacagtgtctttcaattaacattgggttttggttttgtgttttttgttttgttttgttttgttttgttttgttttgttttgtttttgagacggagtctcactctgttgcccaggctggagtgcagtggctgatctcagctaactgcaacctctaactcccgggctcaagtgattctcctgcctcagcctccagaatagctgggattacaggcgcacaccaccacgcccggctaattttttttttttcagacagattctccctttgtcacccaggctgaagtgcagtggcgagatctcggctcactgcatcctccacctcctgggctccagcaattctcctgcctcagcttcccgagcagctgggattacaggcacatgctaccacacccggctactttttgtatttttagaagagatggggtttcaccatgttggccaggctggtcttgaactcctgacctgaggtgatctgcccacctcagcctcccaaagtgttgggattacaggtgtaagccaccgcgactggccgtgtgtttgttttagagacagggtctcactctgttgaccaggctgcagtgcagtggtgtgatgcttgctcactgcagcctccaactcctgggctcaactgatcctcctgcctcagcctcccaagtagctgggactacaggtgcacatcaccacatctagctaatttttttattttttgtagagacggggtctcactattgcccaggctagtctcaaactcctgggctcaagcaatcctcccgcctcggcctcccacaatgctgggactgcaggtgtgagccaccttgcctggcccatttgtaatgtttatggccatggccatgttcccctcctcggggaataacagcactgtcaagggagggcagatggaccaagcatctcctctgtgccagtccactgctccagcctttccacgtggcatccccttttatccccgaagaaactggcagctggggcgtgggggtcggttgtctggctgggctgtctcttctctcctggcctctgctcaccctcatcgctgctcatggaaggcgaggtctttgcccactttactgagagggcagtggaggctccaaatggggagggaacttgctcgtggagatgcctggtgccagggctgctggccccgagcagaccttcctaacccaccgctctgtccagctgtcaggcctgtccctgtttgctgagaccatatgggtgacagccgaccagtaccgtgtatacccactgatgggagtctcaggcaaggatgacgtcttcgctggtgcctggattgccatcttctgcggcttctccttcttcatggtagccagttttggtgtgggtgccgcactctgccgccgccggtccatggtcctcacggtgagactccaggggttgggggatggggacactgaaaacggagttcagcatcactgagtcatagtagcaggtgcagccccagccactagtgtgagttccccatggtgtcacactcagggatcccaggcatcatctcattcagtcttcccacagcccaataacccaggcttgagtagcagagctgggattttttcttttttttttttttggtaaagatgggggtctcactatgttgcccaggctggtctcaaactcctggctcaaatgattctcctgcctcagcctcccaaagtgctgggattacaggcttgagcccctctacctgcacccagtgcagggctagaatttgaacccctgctagctgctttccagagtccatgctcatgaactctgccaataatagcacagctaccatttaataatggtttactacaagccacgagctgttctaaatggtttactggattagttcatttattcctcatagtccaccaagagatactgtcatcatcatgaccctgtttgatgaagattgaaactgaggctcagagaagtgaagtcacttatccagggtcacacattgagacaatggcagagccagtttcaacctgagcagatcggctcttgaggctgtgctcttaatctctgcccacaagaataacccatacttcccaagtgtctctcatgcacctgacactagggtaagcagtttagaaaatgagcttcgtggccaggcgcagtggctcatgcctgtaatcccagcacgtggggaggctgaggcggacagatcatttgaggtcgggagtccaagaccagactggccaacatggcgaaatcccatctctaaaaaaaaaaaaaaaaaaaaaattagccacgcatggtggcaggcacctgtaatccccgctactcaggaggctggggcggaagaatcactagaacccgggaggcagaggttgcagtgagccaagatcacaccactgcattccagcctggatgacaaagcgagactccatctcaaaaaaaaggaaagaaaatgagcttcctcaatcttgccagaagcccttcacagctagtgcttttcaacccatttaccagatgaggaaactgaggctcaaagaggctaacagcctctcccaggtgaccaggagagcagggattccaattcacggccccaatgacacagagacagcactgtgtttcctcgacagcagagggtttttcagattcccagaagcagccactcatttgatgaacaaatgcttatgagcaggagctacatgctgagccctacgctgggcactggggctctgtgctgagcgaaacataaaagcccttgacccagggaagtggtgctcagaggaggaagacagtgaacaggaggggaggtcaggagccgaggagggcgagggaagacctcactgccagggaaagcaaagacctagaggcactgggagcgaggcaggtgtgtaactggaggaagagccttccaggtggaggtggcagcaagggcaaaggctctgaggccagagcgggccaggagtccaaagcagctggagctgagtgaggaggaggttggggggtgagaggacatgaggcagacagatggggaggagaacagtgaggaatggggatgggaaagaagcaggagggaaggcaggtgttgtggactttggctttatcctgagtaagatggacccatagaccccctgctcccctcccctcccttcccctccccttccctcccctcccctctccttccttccttccttcgtttttctacacaggcaggtgttgtggactttggctttatcctgagtaagatggagccatggactcctcccctcccctcccctcccctcgcctcctctcccctcccctcccctcctttcccctcccctcccctcctctcccctccccacctccctccttccttccttcatttttctagacaggcaggtattgtggactttggctttatcctgggtacgatggagccatggacttccttcccttccttctttccctccctccctccctccctccctcccttccttccttccttcctttctttgtttctctagacagggtctcactctgttgcccagtttggagtgcagtggcacaatcatagctcattgccacctcgaactcttcatctcaaatgatcctcccacctcagcctcccaatgagctgggactacaagtgtgcatcaccatgtgcagctaatttttgtattttttgtagagatggagtctcactatggtgcccaggctggtctccaactcctggcctcaagtgagcctcccacctcagcctcccaaagtgttggaattacaggcatgagccaccacacctgccctcttattttcttatcctgtatttaattatctggcataacaatttaaccaaagccctaaaaagtcacccaactagttttaaaaattgtgtctgggccgggctcggtggctcacgcctgtaatcccagcagtttgggaggccgaggcaggtggatcacaaggtcaggagatcgagaccttcctggctaacacggtgaaatcccgtctttactaaaaaacaaaaaattaaccaggcgtggtggcgggcgcctgtagtcccagctactcgggaggctgaggcaggagaatggcgtgaacccgggaggcgcagcttgcagtgagcagagatcgcgccactgcactccagcctgggcgacagagcaagactctgtctcaaaaaaaaaaaaaaattgtgtctgtttccccattagtttgtcattaactaagacattttctccccaaatttctttttttttttttttttgagacggagtcttgctcagttgcccaggctggagtgcagtggtgcgatctcggctcactgcaagctccgcctcccgggttcacgccattctcctgcctcagcctcccgagtagctgggactacaggcacctgccaccacgcctggttaatttttttttttgtatttttagtagagatggggtttcgccgtgttagccaggatggtctcgatctcctgacctcgtgatccgcccacctcggcttcccaaagtgctgagattacaggcatgagccaccgtgcccggcccccaaatttcttacaggaaatttctaaagtagactagagtccgcagtatttgagccctgcatacctctcacctgatttcaacaacatcagctgcagactgcccgacattgtctcctctatcccccttctctcatactttttcttctgggtattttgaagcacattctagatgccaagtcacttgcctgtaaatactggagcacacatttctctgagtgataagcacattgttttaaagcagtcaggaggttgtgcaatgtcatccatctcccagcagcagagttcacacatccacacgcaacctcctgctgctttatagatgaaggtgccaggtgaggacatgaaaagaatttgcattaaacatcaactgacaagcttttttttttctcctgccctctgtgccgttggcacaacccaccaaattcaatcaagttcttctatatcttccaatacccagtctgtgtcaaatgtctctgattatctgagaacatcgttttatgttgtttgttttattttaagagacagggtctcactctgttgcccaggctggagtgtaatggcacaatctcggctcattgcaacctctgcctcctgggttcaagctattctcctatctcatcctcctgagtagctgggattacaggcacccatcaccatgcccagctaatttttgtatttttgcatttttagtagatggggtttcaccatattggtcaggctggtcttgaactcctgacctcaggtgatccacccgtctcaacctcccaaagtgttgggattacaggcgtaagccactgcacccacccttgtttgttttgttttaagagacagggttttgctctgttgcccaggcaggaatgcagtggtgcgatcatagctcgctgaggcctccaactactgggctcaaacgatcctccaacctcagcctcccaaatagctaggactaacactaccactagtagtaactatgcttaactaatttttttatttttattttttgtagcgacggggtctcactgtgttgcccaggctgatcttgaactccagggttcaagcaatcttcccatctcagcctcccaaagtgctgggattacaggtgtgagccaccaatgcccagccctaatttttgtatttttagtagagaaggggtttcaccatgttggccaggctggtctcgaactcctgactcaggtgatcgccccctcggcctcccaaagtgctgggattataggcgtgagccaccacgcctcgcctgtctcaaaaataaattaattaaattaaatatttcaaaatacagaaaagttggaagacaatacagcgaacacctgaacacccaccacatattatagatgctgctagtcacactgccccaaacttttttaaaacttgcatttccccagtgatgcttccctgacggggtgtggcttcacgggctctgcccgacgggccgtcctccctctgtctccccagtacctggtgctcatgctcatcgtctacatcttcgagtgcgcctcctgcatcacgtcctacacccaccgtgactacgtgagcccggcgaggcctggggaggggcctgacctgcatgggaggggcgagggtcccggcgcggcggggcggaggtcgtcctctctccccacccagccctgccggcccttgttcttccctgttctcctcagatggtgtccaacccatccctgatcaccaagcagatgctgaccttctacagcgcggacaccgaccagggccaggagctgacccgcctctgggaccgcgtcatgattgaggtgggcggggtggaccgggtgctgggagggccctgggctccgtccacagaggccgatagagctcccgatgtgccagcttttagaggagtgagtgccttaaagacatccgctcatgagatctctaggagagcagggctgcggtcatcaccgttctgcggatgagtaaacaggcccagaaagggaaagtcccttgcccgaggccacacagtcggtaagtggtgggagctgggattggaacccggcagcctagctcctgacctccctgctcttagcctacacatactacctcaacagaaatgttgataataacaatgatagtaacagcaccattcactgagctaggtttcacactgttcaaaggacttttatttttatattttgagatggggtcttgctctgttgcccaggctggagtgatcatagctcactgcaacctccaactcctgggctcaagtgatcctcccgcctcagcttcccgagtagctgggaatacaggtgcgccccaccacacccggctaagttttttaaattatcttttgtggagatgggggtcttgctctattgcccaggctggtctggaactcctgggctcaggattggagcgattctcccacctccgcctctcaaagtgccgagatcacaggcatgagccacgagtgcctggcctcaaagcacatttttttttttctttttatctttttttttttttttttttttttgagacagagtcttgctctgtcgcccaggctggaatgcagtggcgcgatctcggctcactgcaagctccgcctcccgggttcacgctattctcctgcctcagcctcccgaatagctgggactacaggcgcctgccaccgcgcccagctgattttttgtatttttagtagagatgggtgttagccaggatggtcttgatctcctgaccttgtgatccacctgcctcggcctcccaaagtgctgggattacaggcttgagccaccgtgcccagcctttcaaagcacttttaaagcttttttaatcctcacgaccactccataagggagatcggccttttagtgatgaggagaccaaagcaagaggttgaatatcttgcatgaggtcacacacctggtaggtcacagaactggaaggattcaaactcagacttccaggtttgaagagatacagtcttcctcaaatccaacatgatattgcactggaaaaggaagaaattggctgggtgcagtggctcaaacctataatcccaacactttgggaggcaaaggcgggcagatcacttgagttcaggggttcaagaccatcctggccaacatggtgaaaccctgtctctacaaaaaatacaaaaattagtcaggtgtagtagtgtgcgcctgtgattccagctacttgggaggctgaggcaggagaatcacttgaacccaggagggggaggttgcagtgagccaagatggcgccactgtactccagcctggacaacagagggagactccgtctcaaaaaaaaaaaaaaaaaagaagaagaaattgaggactcaaggaaaactgaggcgtcaatgtggcccaagtcctctagctagccaggatttgaacccatgtttgaagggtgcccaagcctatgttttcctcattcaggagccacaaattaaacacctggattccttaccaaggccaggaaaagccagaaatctgccctttttgtgttattttatcagcatagttgttgataaaaatattttattttattttattttttgagatggagtttcattcttgattcccaggctggagtgcagtggcacgatcttggctcactgcagtcgccacctcccggattcaagcaattctcctgccccagcctctcaagtagctgggattacaggcgcccaccaccacacccggcaaattttgtatttttagtagagacggggtttcatcatgttggtcaggctggtctcgaactcctgacctcaggtgatccatccacctcggcctcccagagagctgggattacaggcgtgagacaccgtgcccggcaaaaatattttaaaataagtcagaggtgcaggtttaatccaaatcccccatcagcctcctggtcctgggacaaatattgtctgcaccgtgctcacacacacagacacccaccggacacactcgcttggaggcccaggacatggggaagttgggcccagctgtgtcaaaggccaatcctgcccctccttgctgtgtgacctcaggcaagcaactgtcctctctgagcccgagcctgcctgaccccctgcttttcactctagcaagaatgctgtggcacatctggtcccatggactgggtgaacttcacgtcagccttccgggcggccactccggaggtggtgttcccctggcccccactgtgctgtcgccggacgggaaacttcatccccctcaacgaggagggctgccgcctggggcacatggactacctgttcaccaaggtgtggccgtctgccctgctccatctgtctatccatctgtctgtcttcctctggtctctgctccctctctgattctctctttctccctccctgtgtctgtccgtctagctttttccctctcctcttcccctctctgattttcttgttttctttttctttctttctttctttctttcttttttttttttcaagaccgagtcctgctctgtcacccaggctggagtacagtggcacaatctcagctcactgcagcgtctgcctcccgggttcaagggattctcccacctcagcttccagagcagctgggattacaggtgcgcaccaccctcttggctagtttttgtatttttagcagagacggggtttgaccatgttgtccaggctggtctcgaactcctgagctcaagtgatccacccacctcagcctcccaaagtgctcagattacaggcgtgagccaccacgctgggtcccctctctgattttctagtgctcccccaactctctctcaagtcagcaggatgcacccagggtctgtctgaaccagacctggcacctacaactttactcaggttgtccgagaataagagcaataatagggccgggcgcgatggctcatgcctgtaatctcagcactttgggaggctgaggagggcagatcacttgaggtcaagagttcgagaccagcctgaccaacatggcgaaaccccatctctactaaaaatgcaaaaattagcccagagcagtagcacgtgcctgtaatcccagctactcgggaggctgaggtaggagaatcacttgaactctggaggtgaaggttgcagtgagccgagattgtgccactgcaccccagcctgggcgacagagtgaaactccatctcaaacaaaaaaaaacaaaacaaaacatcaaacaaaacaatagagctaggcacgggggctcacgactgtaatcccagtactttgggaggccaaggcaggagcatcacttgaggtcagaagctcaagaccagcctgggcaacatatcaagaccccgtctctacaaaaaagtacagaaaattagccaggcgtggtggtgcgcgcctgtaatcccagctactggggaggctaaggcaggaggattgtttgagtctaggaggtcaaggctgcagagagctgtgatggtgccactgcactctagcctaggcaagagacttaaaaaaggcaagagactttaaaaaaaaaaaggccgggcgcgcacagtggctcatgcctgtaatcccagcactttgggagaccgagatgggaggatcacaagatcaggagttcgagaccagcctgaccaacatggtgaaaccccgtctctactaaaaatacaaaaattagccgggcgtagtggtgcacacctgtaatcccagctactcaggaggctgaggcaggagaattgcttgaacgcgggaggtaaaggtttcagtgagccgagatcatgccactgcactgtagcctgggtgacagagggagactgcgagactgtctccaaaaaaaaaaaaaagccagctgtaagatcaaaatcaccctcagattgtcatagccatcagcagggcggcacctacttgtgcagggcctgggttcaacatcagctccctggggccccgaaaccacccgaggaggtggacagtgccatggtccccattgcacaagtgagaaaaccaatgctcagggaaggtggtgactttcccaagggcgcacagtgactctcgctttcagcggctaccctcatgggcgtcttctcaaacttcccccatccccctgcccagggctgcttcgaacacatcggccacgccatcgacagctacacgtggggtatctcgtggtttgggtttgccatcctgatgtggacggtgagaggcggggagcccacaggctgggtgggctgggggtggggggcggagtgccctcatctcgctgcctcctcgccagctcccggtcatgctgatagccatgtatttctacaccatgctctgagggacaggaggggaaggcaacatacacaccccggactcctccgcatcctcctcctgcttcctccgctgggcctggatggctgcctcacctctcacctcccaacgtccctagcccttacgtccttccacttccaagatctttttccaggttcctgagccctactgtgtctcaggtgtgccctgaaaccccagggcttgtgtgcacatatccttagcccatctttcaagggacctctccatgatcccacctcccattcacagatacctctcttgtagctctctgacctcctccttcatggcaggcatcgccattcttgctgaaccgtttgtgattgccatttgagctctggaagcctctattgccatgagagttctgtcacggtcactttactgtccccatcatcacccagcacggggctaagcatatactagatagtcaataaataaataaataatgaatgaatgaatgagtttttttttttctgggtcacgggagagtgaacaagaactgttctaggccaggcgcagtggctcacgcctgtaatcccagcactttgggaggccgaggcgggcagatcacctgaggtcaggagttcaagaccagcctggccaaaatggtgagacccccatctctacaaaaatgcaaaaatcagccgggtatggtggcgcacatctgtaatcccagccactccggaggctgaggcagaagaatcacttgaacccgggaggtggaggttgcagtgagctgagatcgcaccattgtactccagcctcggcaacaaatcgaggccctgtctccaaaaacaaaaaaaactattctgatggaagtggtggaaacccaactgtcactgactgaagtgtaaaatggaatttatcagctcacgtaactgagtcaacggggctggcttcaggcatgtctggatccagatgttcaatctaagtttccaggaaacctgcttcattccctgacaggatttctctggcaactccagacttaatgtctttataactaagcaatgcaacagaaggaaagagcctctctcccaagggctgtagccaaggtccagagttgtagccaaggtccagagttgaatctcactgtctcggcttaggttctaggcccttcgttaggttgggaaagggagggcacctggcttggtaatcctgctaaggatgcatgcagtggtggtgttggaaggggagttgtttatcaaaggaaaatccagatacagggctgctgaggcttataggtgataaaaatccttctcctagggatatagcttccagcaagttctctaaggggtccatgacagcaaaccattacgaattgaattatggctgggcactgtggctcacacctgtaatcccagcacttgctgaggtgggcagatcacttgaggccaggaacttgagaccagcctggccaaaatggcgaaaccctatctctattaaaaatacaaaaaagtacctgggcatggtggtgtgcacctgtagacccagctactcaggaggctgaagcacaagaatcgcttgaacccggaaggtggaggttgcagtgagccaagattgcaccactgcactccagcctgggagacagaacaagattccgtctctaaaaaaaaaaaaaagaaccaaattatcactctttgttctccctgaagccacgactaggccttcccaagagggcctgggggcttccttccccatcaaataatttcttggggttcccatttactccagtggtctgcagatagtctttgattgctgaattcagatttcattttttaaaaatatgtaatggataaagaggtcattatttattagagtgaaaaatcggaaactacccaacaaccatcaccaaagggatgggttgtgtaaatcatgttatgcccttggactgaaatgctctgtggctgttgtgtgtgcgcctgtggtcccagctactgggaaggcttaggcgggaggaccgcttgagccctggagttcgaggttgcagtaagctatgttcacacctatgagtagccactgcactccagcctgggcgacacagcaaaattccatctctaaataataataataataggctgagcacggtggctcatgtctgtaatcccagcactttgggatgtccaggtgggaggatcgcttgagccccagagtttaagatcagcctgggcaacatagcaagaccttgtctctataaaaaattttaaaaagcaggacgcagtggctcaggcctgtaatcccagcactttgggaggctgaggtgggaggaccgcttgagctctcgagaccagcctgggcaacatggcaaaaccctgtctctacaaaaaatgcaaaaattatccaggtgtggtgatgcgtgcctgtggtcccagacactggggaggctgagatggaaggatggcttgagcccaggaggcagaggttgcagtgagccgagatcgcaccactgcactccagcctgggtgatagagccagactctgtctcaaaaaaaaaaaaaattaaaaaaattatctgggtgtagtagtgtgtgcctgtggtcctagcttcttaggaggctgagatggaaggactgtctgagcacaggaggtcgaggctgcagtgctccacaccaccacactccagcctggggaacagagcaagaacctgcttcaaataaataaatatatatatatataattataataataaatactttttaaaagagatagctgtatgtgagttgactataaaaagatctcataataactggaaagcccatatgaggatgttcattagtaaaataaatgactatcagcagggcactgggtaaattagctacgctatatccatcctctgcaataccacaaagaggtaaaaataaaaagaacaagaactctgctttaacatggaaaacgcgctaagaaatacatagtaggaaaaattgaaaactatatacagtactttttttttttttgagatggagtttcactcttttgcccaggctagagtgaagtggtgcgatcttggctcactgcaacctctgccccctgtgttcaagcgattctcttgcctcaggctctgagtagctaagattataggcacctgccaccatgcccggctaatttttgtatttttactggagacaggcttcgccatgttggccaggctggtctggaactcccgacctcaggtgatccactcacctcagtctcccaaaatgctaggattacaggtgtgagccatcacacctggcccatatagtactcttattcctgcagggttgatcaaacggagctttagtctttttcttccttaaaaaaatgagttaatgtttttataataatgtttagaagaatagaggaaaaactttgttgttttgcagaacacttttttgttgttgttgttgttgacggagtctcgctctgttgaccaggctgaagttcagtggcacaatcccggctcactgcaacctccgcctcctgggctcaagcaatcctcccctctcagcctcctgagtagct

SEQ ID NO: 2308 - DNA, 266 bp, Homo Sapiens
gcgtcgacaaagcacagtgtgaagttcggtgttaagagctagtttgcctgcgtttgaaccctgcctggctctgccatttcctaccacttaactgcactgtggctgagttttctgatctgtaaggtgggaataataatgatacctatctcataggggaatgaaaggatcaaatgagttcatatttgtaaagcaatttgaaagagtgcctagcccacagtaagtgctacataagagtttgttaaatgaatctgcaaaaaaaaaagtcg

SEQ ID NO: 2309 - DNA, 288 bp, Homo Sapiens
gttgtaacgtaacaacaggtataaaaggcacagttgcttattttgcattcactcatttattttttgtgtcttttattgatttttttcaaaagcactctatatatggagtggcaccagatttaacctatttaaaataaaagtcatacaaacacaaaatatatttctgtgtcatgccagctcattatataataaacatgttatgacagctaattctactagaattactgtgaatactacagtacactgaattttattctttcacatccattttagttgggcgtacgggga

SEQ ID NO: 2310 - DNA, 501 bp, Homo Sapiens
tttttttttttttttttttttttttttgtaattaaaactttatttcatatctattgttaaattacacaaaatcagggaatggtttggaaagctacaccaatggacagatgtttacaggtgaaatcatgggatttacataatggcaaaaatgtatatgtatatttataacatcctctatatacaataatcagtatagacagagaaaaggcacttaatctttgcaaatcatgcacaccacagcaataacacaaaatgttttttctggaacaagcttttccactggctcaggcttaatcctgctttccaacaatacctatcagttttaaaagcaaacattttcaattaaaactaaagaaaattgaaataccatagggatctactaactattttaaaaacacaattgtacacaaaatagttttactttaaaacactgcgacttcaaggggtggaaaaattcctttcagttttttagctctcaggattttcaagactgcaatactg

SEQ ID NO: 2311 - DNA, 448 bp, Homo Sapiens
aatttaggtgacactatagaagagctatgacgtcgcatgcacgcgtacgtaagcttgtatcctctagagcggccgcctactactactaaattcgcggccgcgtcgactaaaaatttatcaagggaataatttgagtttttagaggcttggtttagcaaggtaaaaaagacaaccaaattattaaaacactttataaattattttaaaacctaccaactggggcctaaatgaaataaaccccctattaccttaggaaagagacagctttcctaaatcacagaagttggtttccaagctacactcttacttctaatgccttggaaccctaaggagaactaaagctcaccagcgatggctgctctggaagtcaaggtgggaagaacaggcaatatcctgacacaggctagatacagactctgagccaaaagcagactctgtggtccacgcg

SEQ ID NO: 2312 - DNA, 3426 bp, Homo Sapiens
gtaggaatcgcagcgccaacggttgcaaggcccaagaagccatcctgggaaggaaaatgcattggggaaccctgtgcggattcttgtggctttggccctatcttttctatgtccaagctgtgcccatccaaaaagtccaagatgacaccaaaaccctcatcaagacaattgtcaccaggatcaatgacatttcacacacgcagtcagtctcctccaaacagaaagtcaccggtttggacttcattcctgggctccaccccatcctgaccttatccaagatggaccagacactggcagtctaccaacagatcctcaccagtatgccttccagaaacgtgatccaaatatccaacgacctggagaacctccgggatcttcttcacgtgctggccttctctaagagctgccacttgccctgggccagtggcctggagaccttggacagcctggggggtgtcctggaagcttcaggctactccacagaggtggtggccctgagcaggctgcaggggtctctgcaggacatgctgtggcagctggacctcagccctgggtgctgaggccttgaaggtcactcttcctgcaaggactacgttaagggaaggaactctggcttccaggtatctccaggattgaagagcattgcatggacaccccttatccaggactctgtcaatttccctgactcctctaagccactcttccaaaggcataagaccctaagcctccttttgcttgaaaccaaagatatatacacaggatcctattctcaccaggaagggggtccacccagcaaagagtgggctgcatctgggattcccaccaaggtcttcagccatcaacaagagttgtcttgtcccctcttgacccatctccccctcactgaatgcctcaatgtgaccaggggtgatttcagagagggcagaggggtaggcagagcctttggatgaccagaacaaggttccctctgagaattccaaggagttccatgaagaccacatccacacacgcaggaactcccagcaacacaagctggaagcacatgtttatttattctgcattttattctggatggatttgaagcaaagcaccagcttctccaggctctttggggtcagccagggccaggggtctccctggagtgcagtttccaatcccatagatgggtctggctgagctgaacccattttgagtgactcgagggttgggttcatctgagcaagagctggcaaaggtggctctccagttagttctctcgtaactggtttcatttctactgtgactgatgttacatcacagtgtttgcaatggtgttgccctgagtggatctccaaggaccaggttattttaaaaagatttgttttgtcaagtgtcatatgtaggtgtctgcacccaggggtggggaatgtttgggcagaagggagaaggatctagaatgtgttttctgaataacatttgtgtggtgggttctttggaaggagtgagatcattttcttatcttctgcaattgcttaggatgtttttcatgaaaatagctctttcaggggggttgtgaggcctggccaggcaccccctggagagaagtttctggccctggctgaccccaaagagcctggagaagctgatgctttgcttcaaatccatccagaataaaacgcaaagggctgaaagccatttgttggggcagtggtaagctctggctttctccgactgctagggagtggtctttcctatcatggagtgacggtcccacactggtgactgcgatcttcagagcaggggtccttggtgtgaccctctgaatgggtccagggttgatcacactctgggtttattacatggcagtgttcctatttggggcttgcatgccaaattgtagttcttgtctgattggctcacccaagcaaggccaaaattaccaaaaatcttggggggtttttactccagtggtgaagaaaactcctttagcaggtggtcctgagacctgacaagcactgctaggcgagtgccaggactccccaggccaggccaccaggatgcccttcccactggaggtcacattcaggaagatgaaagaggaggtttggggtctgccaccatcctgctgctgtgtttttgctatcacacagtgggtggtggatctgtccaaggaaacttgaatcaaagcagttaactttaagactgagcacctgcttcatgctcagccctgactggtgctataggctggagaagctcacccaataaacattaagattgaggcctgccctcagggatcttgcgttcccagtggtcaaaccgcactcacccatgtgccaaggtggggtatttaccacagcagctgaacagccaaatgcatggtgcagttgacagcaggtgggaaatggtatgagctgaggggggccgtgcccaggggcccacagggaaccctgcttgcactttgtaacatgtttacttttcagggcatcttagcttctattatagccacatccctttgaaacaagataactgagaatttaaaaataagaaaatacataagaccataacagccaacaggtggcaggaccaggactatagcccaggtcctctgatacccagagcattacgtgagccaggtaatgagggactggaaccagggagaccgagcgctttctggaaaagaggagtttcgaggtagagtttgaaggaggtgagggatgtgaattgcctgcagagagaagcctgttttgttggaaggtttggtgtgtggagatgcagaggtaaaagtgtgagcagtgagttacagcgagaggcagagaaagaagagacaggagggcaagggccatgctgaagggaccttgaagggtaaagaagtttgatattaaaggagttaagagtagcaagttctagagaagaggctggtgctgtggccagggtgagagctgctctggaaaatgtgacccagatcctcacaaccacctaatcaggctgaggtgtcttaagccttttgctcacaaaacctggcacaatggctaattcccagagtgtgaaacttcctaagtataaatggttgtctgtttttgtaacttaaaaaaaaaaaaaaaagtttggccgggtgcggtggctcacgcctgtaatcccagcactttgggaggccaaggtggggggatcacaaggtcactagatggcgagcatcctggccaacatggtgaaaccccgtctctactaaaaacacaaaagttagctgagcgtggtggcgggcgcctgtagtcccagccactcgggaggctgagacaggagaatcgcttaaacctgggaggcggagagtacagtgagccaagatcgcgccactgcactccggcctgatgacagagcgagattccgtcttaaaaaaaaaaaaaaaaaaagtttgtttttaaaaaaatctaaataaaataactttgccccctg

SEQ ID NO: 2313 - DNA, 3935 bp, Homo Sapiens
ggagagccgaaagcggagctcgaaactgactggaaacttcagtggcgcggagactcgccagtttcaaccccggaaacttttctttgcaggaggagaagagaaggggtgcaagcgcccccacttttgctctttttcctcccctcctcctcctctccaattcgcctccccccacttggagcgggcagctgtgaactggccaccccgcgccttcctaagtgctcgccgcggtagccggccgacgcgccagcttccccgggagccgcttgctccgcatccgggcagccgaggggagaggagcccgcgcctcgagtccccgagccgccgcggcttctcgcctttcccggccaccagccccctgccccgggcccgcgtatgaatctcctggaccccttcatgaagatgaccgacgagcaggagaagggcctgtccggcgcccccagccccaccatgtccgaggactccgcgggctcgccctgcccgtcgggctccggctcggacaccgagaacacgcggccccaggagaacacgttccccaagggcgagcccgatctgaagaaggagagcgaggaggacaagttccccgtgtgcatccgcgaggcggtcagccaggtgctcaaaggctacgactggacgctggtgcccatgccggtgcgcgtcaacggctccagcaagaacaagccgcacgtcaagcggcccatgaacgccttcatggtgtgggcgcaggcggcgcgcaggaagctcgcggaccagtacccgcacttgcacaacgccgagctcagcaagacgctgggcaagctctggagacttctgaacgagagcgagaagcggcccttcgtggaggaggcggagcggctgcgcgtgcagcacaagaaggaccacccggattacaagtaccagccgcggcggaggaagtcggtgaagaacgggcaggcggaggcagaggaggccacggagcagacgcacatctcccccaacgccatcttcaaggcgctgcaggccgactcgccacactcctcctccggcatgagcgaggtgcactcccccggcgagcactcggggcaatcccagggcccaccgaccccacccaccacccccaaaaccgacgtgcagccgggcaaggctgacctgaagcgagaggggcgccccttgccagaggggggcagacagccccctatcgacttccgcgacgtggacatcggcgagctgagcagcgacgtcatctccaacatcgagaccttcgatgtcaacgagtttgaccagtacctgccgcccaacggccacccgggggtgccggccacgcacggccaggtcacctacacgggcagctacggcatcagcagcaccgcggccaccccggcgagcgcgggccacgtgtggatgtccaagcagcaggcgccgccgccacccccgcagcagcccccacaggccccgccggccccgcaggcgcccccgcagccgcaggcggcgcccccacagcagccggcggcacccccgcagcagccacaggcgcacacgctgaccacgctgagcagcgagccgggccagtcccagcgaacgcacatcaagacggagcagctgagccccagccactacagcgagcagcagcagcactcgccccaacagatcgcctacagccccttcaacctcccacactacagcccctcctacccgcccatcacccgctcacagtacgactacaccgaccaccagaactccagctcctactacagccacgcggcaggccagggcaccggcctctactccaccttcacctacatgaaccccgctcagcgccccatgtacacccccatcgccgacacctctggggtcccttccatcccgcagacccacagcccccagcactgggaacaacccgtctacacacagctcactcgaccttgaggaggcctcccacgaagggcgaagatggccgagatgatcctaaaaataaccgaagaaagagaggaccaaccagaattccctttggacatttgtgtttttttgtttttttattttgttttgttttttcttcttcttcttcttccttaaagacatttaagctaaaggcaactcgtacccaaatttccaagacacaaacatgacctatccaagcgcattacccacttgtggccaatcagtggccaggccaaccttggctaaatggagcagcgaaatcaacgagaaactggactttttaaaccctcttcagagcaagcgtggaggatgatggagaatcgtgtgatcagtgtgctaaatctctctgcctgtttggactttgtaattatttttttagcagtaattaaagaaaaaagtcctctgtgaggaatattctctattttaaatatttttagtatgtactgtgtatgattcattaccattttgaggggatttatacatatttttagataaaattaaatgctcttatttttccaacagctaaactactcttagttgaacagtgtgccctagcttttcttgcaaccagagtatttttgtacagatttgctttctcttacaaaaagaaaaaaaaaatcctgttgtattaacatttaaaaacagaattgtgttatgtgatcagttttgggggttaactttgcttaattcctcaggctttgcgatttaaggaggagctgccttaaaaaaaaataaaggccttattttgcaattatgggagtaaacaatagtctagagaagcatttggtaagctttatcatatatatattttttaaagaagagaaaaacaccttgagccttaaaacggtgctgctgggaaacatttgcactcttttagtgcatttcctcctgcctttgcttgttcactgcagtcttaagaaagaggtaaaaggcaagcaaaggagatgaaatctgttctgggaatgtttcagcagccaataagtgcccgagcacactgcccccggttgcctgcctgggccccatgtggaaggcagatgcctgctcgctctgtcacctgtgcctctcagaacaccagcagttaaccttcaagacattccacttgctaaaattatttattttgtaaggagaggttttaattaaaacaaaaaaaaattcttttttttttttttttccaattttaccttctttaaaataggttgttggagctttcctcaaagggtatggtcatctgttgttaaattatgttcttaactgtaaccagtttttttttatttatctctttaatctttttttattattaaaagcaagtttctttgtattcctcaccctagatttgtataaatgcctttttgtccatcccttttttctttgttgtttttgttgaaaacaaactggaaacttgtttctttttttgtataaatgagagattgcaaatgtagtgtatcactgagtcatttgcagtgttttctgccacagacctttgggctgccttatattgtgtgtgtgtgtgggtgtgtgtgtgttttgacacaaaaacaatgcaagcatgtgtcatccatatttctctacatcttctcttggagtgagggaggctacctggaggggatcagcccactgacagaccttaatcttaattactgctgtggctagagagtttgaggattgctttttaaaaaagacagcaaacttttttttttatttaaaaaaagatatattaacagttttagaagtcagtagaataaaatcttaaagcactcataatatggcatccttcaatttctgtataaaagcagatctttttaaaaagatacttctgtaacttaagaaacctggcatttaaatcatattttgtctttaggtaaaagctttggtttgtgttcgtgttttgtttgtttcacttgtttccctcccagccccaaaccttttgttctctccgtgaaacttacctttccctttttctttctcttttttttttttgtatattattgtttacaataaatatacattgcattaaaaagaaa

SEQ ID NO: 2314 - DNA, 436 bp, Homo Sapiens
gcggacaattggggccaaacgaggaaggacacagacccaaaagccagacccaggtcccagcgcgcttctgggctctaacctgggagactcgcatccagcccggcggaagctacagtctctaccctgagctccgtggcgcagagcgctccacgcgtattcacgccccgtcctcgcctgacccccaccccgtctgggcctgccctcccggccggggagcctccaggcacacacccgcttctggacgtcggggacccagcggttgggctcaggccacaacggtctgagattgccccgggcaacccgtcggctcggcctgaggccgggtccccgatgtcgctggggccctaccccctcttgcgaagacggtgacttttttttccactaaaatattttaatgaacacaaaaaagaagaacaggagcacaaagagaaaccac

SEQ ID NO: 2315 - DNA, 394 bp, Homo Sapiens
ttttattttctttgttatacgtctatttattaatgaaaaagtatcaccaacatccatttaaaaataagcaaaagacattaataaacattcttccaaagaggatatacaggtggcaactagatacaagatgttcaaatgttcaataccataaaataccagaaaaatgcaataaaatcacagacagatgctattatacagctattaaaacaactaaaattaaaaagactaaccataccaagtatggcaagaatgtagagaaataagaaggttcacatactgttgatgagaatgcaaatggtacagttaggttatagtctggccttgtctttaaaagtgacgcattcacgtacactgtactactgacccaggagaaataaagcatttctgcatatta

SEQ ID NO: 2316 - DNA, 7932 bp, Homo Sapiens
ggctgctcctgcactgcgccggccctgagcggacctgtggctcggactatctattacatcgcagccgagctggtccggctggtggggtctgtggactccatgaagcccgtgctccagtccctctaccaccgagtgctgctctaccccccaccccagcaccgggtggaagccatcaaaataatgaaagagatacttgggagcccacagcgtctctgtgacttggcaggacccagctccactgaatcagagtccagaaaaagatcaatttcaaaaagaaagtctcatctggatctcctcaaactcatcatggatggcatgaccgaagcatgcatcaagggtggcatcgaagcttgctatgcagccgtgtcctgtgtctgcaccttgctgggtgccctggatgagctcagccaggggaagggcttgagcgaaggtcaggtgcaactgctgcttctgcgccttgaggagctgaaggatggggctgagtggagccgagattccatggagatcaatgaggctgacttccgctggcagcggcgagtgctgtcctcagaacacacgccgtgggagtcagggaacgagaggagccttgacatcagcatcagtgtcaccacagacacaggccagaccactctcgagggagagttgggtcagactacacccgaggaccattcgggaaaccacaagaacagtctcaagtcgccagccatcccagagggtaaggagacgctgagcaaagtattggaaacagaggcggtagaccagccagatgtcgtgcagagaagccacacggtcccttaccctgacataactaacttcctgtcagtagactgcaggacaaggtcctatggatctaggtatagtgagagcaattttagcgttgatgaccaagacctttctaggacagagtttgattcctgtgatcagtactctatggcagcagaaaaggactcgggcaggtccgacgtgtcagacattgggtcggacaactgttcactagccgatgaagagcagacaccccgggactgcctaggccaccggtccctgcgaactgccgccctgtctctaaaactgctgaagaaccaggaggcggatcagcacagcgccaggctgttcatacagtccctggaaggcctcctccctcggctcctgtctctctccaatgtagaggaggtggacaccgctctgcagaactttgcctctactttctgctcaggcatgatgcactctcctggctttgacgggaatagcagcctcagcttccagatgctgatgaacgcagacagcctctacacagctgcacactgcgccctgctcctcaacctgaagctctcccacggtgactactacaggaagcggccgaccctggcgccaggcgtgatgaaggacttcatgaagcaggtgcagaccagcggcgtgctgatggtcttctctcaggcctggattgaggagctctaccatcaggtgctcgacaggaacatgcttggagaggctggctattggggcagcccagaagataacagccttcccctcatcacaatgctgaccgatattgacggcttagagagcagtgccattggtggccagctgatggcctcggctgctacagagtctcctttcgcccagagcaggagaattgatgactccacagtggcaggcgtggcatttgctcgctatattctggtgggctgctggaagaacttgatcgatactttatcaaccccactgactggtcgaatggcggggagctccaaagggctggccttcattctgggagctgaaggcatcaaagagcagaaccagaaggagcgggacgccatctgcatgagcctcgacgggctgcggaaagccgcacggctgagctgcgctctaggcgttgctgctaactgcgcctcagcccttgcccagatggcagctgcctcctgtgtccaagaagaaaaagaagagagggaggcccaagaacccagtgatgccatcacacaagtgaaactaaaagtggagcagaaactggagcagattgggaaggtgcagggggtgtggctgcacactgcccacgtcttgtgcatggaggccatcctcagcgtaggcctggagatgggaagccacaacccggactgctggccacacgtgttcagggtgtgtgaatacgtgggcaccctggagcacaaccacttcagcgatggtgcctcgcagccccctctgaccatcagccagccccagaaggccactggaagcgctggcctccttggggaccccgagtgtgagggctcgccccccgagcacagcccggagcaggggcgctccctgagcacggcccctgtcgtccagcccctgtccatccaggacctcgtccgggaaggcagccggggtcgggcctccgacttccgcggcgggagcctcatgagcgggagcagcgcggccaaggtggtgctcaccctctccacgcaagccgacaggctctttgaagatgctacggataagttgaacctcatggccttgggaggttttctttaccagctgaagaaagcatcgcagtctcagcttttccattctgttacagatacagttgattactctctggcaatgccaggagaagttaaatccactcaagaccgaaaaagcgccctccacctgttccgcctggggaatgccatgctgaggattgtgcggagcaaagcacggcccctgctccacgtgatgcgctgctggagccttgtggccccacacctggtggaggctgcttgccataaggaaagacatgtgtctcagaaggctgtttccttcatccatgacatactgacagaagtcctcactgactggaatgagccacctcattttcacttcaatgaagcactcttccgacctttcgagcgcattatgcagctggaattgtgtgatgaggacgtccaagaccaggttgtcacatccattggtgagctggttgaagtgtgttccacgcagatccagtcgggatggagacccttgttcagtgccctggaaacagtgcatggcgggaacaagtcagagatgaaggagtacctggttggtgactactccatgggaaaaggccaagctccagtgtttgatgtatttgaagcttttctcaatactgacaacatccaggtctttgctaatgcagccactagctacatcatgtgccttatgaagtttgtcaaaggactgggggaggtggactgtaaagagattggagactgtgccccagcacccggagccccgtccacagacctgtgcctcccggccctggattacctcaggcgctgctctcagttattggccaaaatctacaaaatgcccttgaagccaatattccttagtgggagacttgccggcttgcctcgaagacttcaggaacagtcagccagcagtgaggatggaattgaatcagtcctgtctgattttgatgatgacaccggtctgatagaagtctggataatcctgctggagcagctgacagcggctgtgtccaattgtccacggcagcaccaaccaccaactctggatttactctttgagctgttgagagatgtgacgaaaacaccaggaccagggtttggtatctatgcagtggttcacctcctccttcctgtgatgtccgtttggctccgccggagccataaagaccattcctactgggatatggcctctgccaatttcaagcacgctattggtctgtcctgtgagctggtggtggagcacattcaaagctttctacattcagatatcaggtacgagagcatgatcaataccatgctgaaggacctctttgagttgctggtcgcctgtgtggccaagcccactgaaaccatctccagagtgggctgctcctgtattagatacgtccttgtgacagcgggccctgtgttcactgaggagatgtggaggcttgcctgctgtgccctgcaagatgcgttctctgccacactcaagccagtgaaggacctgctgggctgcttccacagcggcacggagagcttcagcggggaaggctgccaggtgcgagtggcggccccgtcctcctccccaagtgccgaggccgagtactggcgcatccgagccatggcccagcaggtgtttatgctggacacccagtgctcaccaaagacaccaaacaactttgaccacgctcagtcctgccagctcattattgagctgcctcctgatgaaaaaccaaatggacacaccaagaaaagcgtgtctttcagggaaattgtggtgagcctgctgtctcatcaggtgttactccagaacttatatgacatcttgttagaagagtttgtcaaaggcccctctcctggagaggaaaagacgatacaagtgccagaagccaagctggctggcttcctcagatacatctctatgcagaacttggcagtcatattcgacctgctgctggactcttataggactgccagggagtttgacaccagccccgggctgaagtgcctgctgaagaaagtgtctggcatcgggggcgccgccaacctctaccgccagtctgcgatgagctttaacatttatttccacgccctggtgtgtgctgttctcaccaatcaagaaaccatcacggccgagcaagtgaagaaggtcctttttgaggacgacgagagaagcacggattcttcccagcagtgttcatctgaggatgaagacatctttgaggaaaccgcccaggtcagccccccgagaggcaaggagaagagacagtggcgggcacggatgcccttgctcagcgtccagcctgtcagcaacgcagattgggtgtggctggtcaagaggctgcacaagctgtgcatggaactgtgcaacaactacatccagatgcacttggacctggagaactgtatggaggagcctcccatcttcaagggcgacccgttcttcatcctgccctccttccagtccgagtcatccaccccatccaccgggggcttctctgggaaagaaaccccttccgaggatgacagaagccagtcccgggagcacatgggcgagtccctgagcctgaaggccggtggtggggacctgctgctgccccccagccccaaagtggagaagaaggatcccagccggaagaaggagtggtgggagaatgcggggaacaaaatctacaccatggcagccgacaagaccatttcaaagttgatgaccgaatacaaaaagaggaaacagcagcacaacctgtccgcgttccccaaagaggtcaaagtggagaagaaaggagagccactgggtcccaggggccaggactccccgctgcttcagcgtccccagcacttgatggaccaagggcaaatgcggcattccttcagcgcaggccccgagctgctgcgacaggacaagaggccccgctcaggctccaccgggagctccctcagtgtctcggtgagagacgcagaagcacagatccaggcatggaccaacatggtgctaacagttctcaatcagattcagattctcccagaccagaccttcacggccctccagcccgcagtgttcccgtgcatcagtcagctgacctgtcacgtgaccgacatcagagttcgccaggctgtgagggagtggctgggcagggtgggccgtgtctatgacatcattgtgtagccgactcctgttctactctcccaccaaataacagtagtgagggttagagtcctgccaatacagctgttgcattttccccaccactagccccacttaaactactactactgtctcagagaacagtgtttcctaatgtaaaaagcctttccaaccactgatcagcattggggccatactaaggtttgtatctagatgacacaaacgatattctgattttgcacattattatagaagaatctataatccttgatatgtttctaactcttgaagtatatttcccagtgcttttgcttacagtgttgtccccaaatgggtcattttcaaggattactcatttgaaaacactatattgatccatttgatccatcatttaaaaaataaatacaattcctaaggcaatatctgctggtaagtcaagctgataaacactcagacatctagtaccagggattattaattggaggaagatttatggttatgggtctggctgggaagaagacaactataaatacatattcttgggtgtcataatcaagaaagaggtgacttctgttgtaaaataatccagaacacttcaaaattattcctaaatcattaagattttcaggtattcaccaatttccccatgtaaggtactgtgttgtacctttatttctgtatttctaaaagaagaaagttctttcctagcagggtttgaagtctgtggcttatcagcctgtgacacagagtacccagtgaaagtggctggtacgtagattgtcaagagacataagaccgaccagccaccctggctgttcttgtggtgtttgtttccatccccaaggcaaacaaggaaaggaaaggaaagaagaaaaggtgccttagtcctttgttgcacttccatttccatgccccacaattgtctgaacataaggtatagcatttggtttttaagaaaacaaaacattaagacgcaactcattttatatcaacacgcttggaggaaagggactcagggaagggagcagggagtgtggggtggggatggattatgatgaaatcattttcaatcttaaaatataatacaacaatcttgcaaaattatggtgtcagttacacaagctctagtctcaaaatgaaagtaatggagaaagacactgaaatttagaaaattttgtcgatttaaaatatttctcctatctaccaagtaaagttaccctatgtttgatgtctttgcattcagaccaatatttcaggtggatatttctaagtattactagaaaatacgtttgaaagctttatcttattatttacagtatttttatatttcttacattatcctaatgattgaaaactcctcaatcaagcttacttacacacattctacagagttatttaaggcatacattataatctcccagccccattcataatgaataagtcaccctttaaatataagacacaaattctacagtattgaaataaggatttaaaggggtatttgtaaactttgccctccttgagaaatatggaactaccttagaggttaagaggaaggcagtgttctgacttctttaggtgatctgaaaaaaacacccttatcatccagtgtaccatctagagatcaccacagaatccatttttttcccagttccacaaaacactctgtttgccttcagtttttactcactagacaataattcaagtttagaaacaggtaatcagctatttgatcttaaaaggcaatgaattgttgggatatcagtgaactatgttgtatacttttgaatttttacattttataaatggaattgaaagttggataactgctttttttaaattttccaacagaagtaacaccacagttgctttgtttctttttatagcttacctgaggttcagttcttctttgtgaacctgtgagtactccacagtttactgggggaaaaggcttcagtaaagcagaggctagaattacagtatttatacatagcaacttttcataaagtagaaaaattcaaaggaagctgtctcaatttgagaataccagctgggcacggtggctcacgcctgtaatcccagcacttactttgggaggccaaggtgggcagataacctgcggtcaggagtttgagaccaggctggacaacatggtgaaacctcgtctctactaaaaatacaaaaattagccaggtgtggtaggatgcacctgtaatcccagctacttaggaggccgagacaggagaatcgctcgaacccaggaggcggacgttgcagtgagccaagattgcaccattgcactccagactgggtgacaagagtgaaactccatct

SEQ ID NO: 2317 - DNA, 636 bp, Homo Sapiens
tttttttttttttttttgaatgactcagatgtttattttctcaaatacaatatttaaaatattgcaagaagacatctgtttagcattctcccctcatttgtcaattactttattatttgagaattaataccccacatgaagacaatatcacttgccaaagtccttcctctgacgtggttaagtcgtatcaaatccacaggctgacgtccaaataatacacagtttcatgcttcaggtgagccaagaacaaccttcccattgagcgccttgcaggggctgatatcaaagacaagactgaacttccttcattggcatggtgaccaccgtgggaggtgcagccctcagcctactcctcggctgtgccatccaggatgtgtttaaaggagaatggagaaaacttgtaaccatccccgacatagaacttgttctggaactcaacccagtgtagtcgcagggcgtgcaggaaagcagagaggccctccatgattagaaggatggctactgtcaggacagcaaatacggcaaaaattattaaaaccccgacgatttctcccagcctcgggtcttaaagccgctgttcatcaccatagttcagagcactttagacagtttttaatgagccaggcttgaggccca

SEQ ID NO: 2318 - DNA, 448 bp, Homo Sapiens
tttttttttttatcactgtattttttctataattaccttttcgtttactgtttcaatttattgaattatacatacaatgaagagcacaataataaatgtacatacagcttgatgaattctcacatagtgagcctgtgttacaagtaatctattattaacttttaagatgatacagtgctatgatcgaaggactaaaatgatcaacatcaccataaaaggcagagtcataaacaagaacaattaagtgtaattaaatcaggtgggaggcacacttacaaaaatgaaacaatttttggttcacattttacaccacacaggtattctgtatctttagaacatgagaaaatacatattctcagtctgataggtctctgacttgggggtttcttttactgtactttttttctctctagtagctgaacattttaaagcaatcagcagaaaaaat

SEQ ID NO: 2319 - DNA, 1433 bp, Homo Sapiens
tgtgtgtgtgtgtgtgtgagcgcgcgcgcgcgcgcgcgtgtgtactcgtgcgtgtgcctgtgtgtgcctgggagtgacctcacagctgccggaacataaagactcacaggtccgcctcccaggctcaaagctggctctgcaggggacatgagaggcacaccgaagacccacctcctggccttctccctcctctgcctcctctcaaaggtgcgtacccagctgtgcccgacaccatgtacctgcccctggccacctccccgatgcccgctgggagtacccctggtgctggatggctgtggctgctgccgggtatgtgcacggcggctgggggagccctgcgaccaactccacgtctgcgacgccagccagggcctggtctgccagcccggggcaggacccggtggccggggggccctgtgcctcttggcagaggacgacagcagctgtgaggtgaacggccgcctgtatcgggaaggggagaccttccagccccactgcagcatccgctgccgctgcgaggacggcggcttcacctgcgtgccgctgtgcagcgaggatgtgcggctgcccagctgggactgcccccaccccaggagggtcgaggtcctgggcaagtgctgccctgagtgggtgtgcggccaaggagggggactggggacccagccccttccagcccaaggaccccagttttctggccttgtctcttccctgccccctggtgtcccctgcccagaatggagcacggcctggggaccctgctcgaccacctgtgggctgggcatggccacccgggtgtccaaccagaaccgcttctgccgactggagacccagcgccgcctgtgcctgtccaggccctgcccaccctccaggggtcgcagtccacaaaacagtgccttctagagccgggctgggaatggggacacggtgtccaccatccccagctggtggccctgtgcctgggccctgggctgatggaagatggtccgtgcccaggcccttggctgcaggcaacactttagcttgggtccaccatgcagaacaccaatattaacacgctgcctggtctgtctggatcccgaggtatggcagaggtgcaagacctagtcccctttcctctaactcactgcctaggaggctggccaaggtgtccagggtcctctagcccactccctgcctacacacacagcctatatcaaacatgcacacgggcgagctttctctccgacttcccctgggcaagagatgggacaagcagtcccttaatattgaggctgcagcaggtgctgggctggactggccatttttctgggggtaggatgaagagaaggcacacagagattctggatctcctgctgccttttctggagtttgtaaaattgttcctgaatacaagcctatgcgtgaaaaaaaaaaaaaaaaaaaaaaaaaaaaaa

SEQ ID NO: 2320 - DNA, 1360 bp, Homo Sapiens
cagcctcgcaatgagctgccacaactgctccgacccccaggtcctttgcagctccgggcagctgttcctgcagcccctctgggaccacctgaggagctgggaggccctcctacagtcgcccttcttcccggtcatcttctccatcaccacatacgtgggcttttgcctgcccttcgtggtcctggatatcctgtgctcctgggtgcccgccctgcggcgctacaagatccaccctgacttctcgccatccgcgcagcagctgctaccttgcctggggcagaccctctaccagcatgtgatgtttgtgttccccgtgacgctgctgcattgggcccgcagcccggccctcctgccccacgaagctcccgagctgctcctgctgctgcaccacatcctgttctgcctgctactcttcgacatggagttcttcgtgtggcacctgctgcaccacaaggtgccctggctgtaccgcaccttccacaaggtgcaccaccagaactcgtcctcgttcgcgctggcaacgcagtatatgagcgtctgggaactgttttctttgggcttcttcgacatgatgaacgtcacactgctcgggtgccacccgctcaccaccctgaccttccacgtggtcaacatctggctttccgtggaggaccactccggctacaacttcccttggtccactcacagactggtgcccttcgggtggtacgggggtgtggtgcaccacgacctgcatcactctcactttaactgcaacttcgctccgtactttacacactgggacaaaatactgggaacgctgcggactgcatctgtcccagcgcggtgatgtggctgcggtgggtgcccctaagactcgggactgctgtgcctttcacacttgaatgaagagaaacacctgagctatatatttttttaaagcaactaacttattgctttatgtttatctatgaaaaccatagataaaatctgatgcatttttgtaatctgacaaagtaatttacatactgtttgtgtatcaatacaattttgtgttcttggtattcttagtctagctcacctcaatagccttgaatcctgcatatgaattagacattcatcactggcatatttagaatatctctaaaaggacttgtttgtagaataaggaattttctatgtttcaaagtgttctaaaacctggctaaaagaatgtatttttgtggatggtgttgacttctgactctaaaagcaatcaaacatgtttctgctggacagtgaccaagaattatagtaccttcttatatttttttatagaactgtatatttattttgaaagaaatgttattcgtgctttaaaaaggaaaaaaaaccataaaaa

SEQ ID NO: 2321 - DNA, 600 bp, Homo Sapiens
gcttcccatacggcagtggctgggggagagtgatggagagaaaggctaagctaaggtcaaagaaagtggaggaaggctggcttgtcccgctggacttgacggcggagctgctgcaatctcgcgggctgggcccttgccccgggtggacccgatgtgcctgcggggagtgcgggtgtggctcccccgggatggtgacagctggcggggcccgtaaggagctggtctgctcctggctcccctctctgtagccggcgccctgggaccatgcgcgtgagcactgtctcggagtgagtccgatgcgctgggcatgggcctgggtggtcacccccgcccagcttccagtgggtgactgtgcctctgacgtcagacggcttttgggtcattccctggcacggggactttattttcataacagcatgaagtgccgtggaactggaataggcgtgtcctctccctcgaccctccccctccttgtccctctgctcacccctcgctcgttccctccctccggcgagggccgctttataacaactgctcagagtgcgagggcgggatagctgtccaaggtctcccccagcactgagtgagctcgcctgctgc

SEQ ID NO: 2322 - DNA, 732 bp, Homo Sapiens
aactaggctagtacaggctggtttaatcggcacaggacgggcccctggtcacggcactgggacagtgctggggagtctgccacttccctctctcccctggcgcgcaaagttttggcggagccatcagctggggctgagcgcgcccccggggggagatcggggagcgcccgatgccgggcggacggagccattgacccgggacgccgccgtccgctgagcagccgaccaccccgccgcctccggtgcatggggactggctgaggagccaggcatgggcaactgcgtggggagacagcgccgggagaaggccggcgagccccgggacacccccgcaagcgagcaggacgcaatgagcccctgaagaaagagcggctttacgtggaagagcgactaccccatgactgacgggcagctgcggagcaaacgggatgagttctgggacacagcgcctgccttcgagggccgcaaggagctctgggatgccctcaaggctgccgcctatgctgctgaagccaacgaccacgagctggcccaggcatcctggatggagccagcatcaccctgactcatgggcaccctctgtgaatgctacgatgagctggcaatcgctaaccagctgcccatctacttgcctgtcaccgccggtaaactgctgcttgagcacacggaggaggagagctggagccccgaggctcaccagggtgcgccgtgattccgctaaggtgcctgtca

SEQ ID NO: 2323 - DNA, 1507 bp, Homo Sapiens
aatcctggaacaaggctacagcgtcgaagatccccagcgctgcgggctcggagagcagtcctaacggcgcctcgtacgctagtgtcctcccttttcagtccgcgtccctccctgggccgggctggcactcttgccttccccgtccctcatggcgctgctccgacgcccgacggtgtccagtgatttggagaatattgacacaggagttaattctaaagttaagagtcatgtgactattaggcgaactgttttagaagaaattggaaatagagttacaaccagagcagcacaagtagctaagaaagctcagaacaccaaagttccagttcaacccaccaaaacaacaaatgtcaacaaacaactgaaacctactgcttctgtcaaaccagtacagatggaaaagttggctccaaagggtccttctcccacacctgaggatgtctccatgaaggaagagaatctctgccaagctttttctgatgccttgctctgcaaaatcgaggacattgataacgaagattgggagaaccctcagctctgcagtgactacgttaaggatatctatcagtatctcaggcagctggaggttttgcagtccataaacccacatttcttagatggaagagatataaatggacgcatgcgtgccatcctagtggattggctggtacaagtccactccaagtttaggcttctgcaggagactctgtacatgtgcgttggcattatggatcgatttttacaggttcagccagtttcccggaagaagcttcaattagttgggattactgctctgctcttggcttccaagtatgaggagatgttttctccaaatattgaagactttgtttacatcacagacaatgcttataccagttcccaaatccgagaaatggaaactctaattttgaaagaattgaaatttgagttgggtcgacccttgccactacacttcttaaggcgagcatcaaaagccggggaggttgatgttgaacagcacactttagccaagtatttgatggagctgactctcatcgactatgatatggtgcattatcatccttctaaggtagcagcagctgcttcctgcttgtctcagaaggttctaggacaaggaaaatggaacttaaagcagcagtattacacaggatacacagagaatgaagtattggaagtcatgcagcacatggccaagaatgtggtgaaagtaaatgaaaacttaactaaattcatcgccatcaagaataagtatgcaagcagcaaactcctgaagatcagcatgatccctcagctgaactcaaaagccgtcaaagaccttgcctccccactgataggaaggtcctaggctgccgtggcccctggggatgtgtgcttcattgtgccctttttcttattggtttagaactcttgattttgtacatagtcctctggtctatctcatgaaacctcttctcagaccagttttctaaacatatattgaggaaaaataaagcgattggtttttctt

SEQ ID NO: 2324 - DNA, 2128 bp, Homo Sapiens
cttgagaatgtttctgcatgatttctctgggcttgctgtcttacctgagagcaggaagtcaaaaggagagtgatggagccacctgctgccctctactttgcagatattaaagaggagcctgaaactgttccttggacatcttatgaatgtcagaaaataccttttggagggttagaagatcaggggacatggttgttcacatttgctgccacggaacaccgccagtcttcacttggaaacagaatcacgccttgtgaagagatcatccctaagcaggagagaagctactaaaggattgtgtcctcctccaccttccctgtgctcggtctccacctgtctcccattctgtgacgatggttcaatggaagagactctgccagctgcattacttgtgggctctgggctgctatatgctgctggccactgtggctctgaaactttctttcaggttgaagtgtgactctgaccacttgggtctggagtccagggaatctcaaagccagtactgtaggaatatcttgtataatttcctgaaacttccagcaaagaggtctatcaactgttcaggggtcacccgaggggaccaagaggcagtgcttcaggctattctgaataacctggaggtcaagaagaagcgagagcctttcacagacacccactacctctccctcaccagagactgtgagcacttcaaggctgaaaggaagttcatacagttcccactgagcaaagaagaggtggagttccctattgcatactctatggtgattcatgagaagattgaaaactttgaaaggctactgcgagctgtgtatgcccctcagaacatatactgtgtccatgtggatgagaagtccccagaaactttcaaagaggcggtcaaagcaattatttcttgcttcccaaatgtcttcatagccagtaagctggttcgggtggtttatgcctcctggtccagggtgcaagctgacctcaactgcatggaagacttgctccagagctcagtgccgtggaaatacttcctgaatacatgtgggacggactttcctataaagagcaatgcagagatggtccaggctctcaagatgttgaatgggaggaatagcatggagtcagaggtacctcctaagcacaaagaaacccgctggaaatatcactttgaggtagtgagagacacattacacctaaccaacaagaagaaggatcctcccccttataatttaactatgtttacagggaatgcgtacattgtggcttcccgagatttcgtccaacatgttttgaagaaccctaaatcccaacaactgattgaatgggtaaaagacacttatagcccagatgaacacctctgggccacccttcagcgtgcacggtggatgcctggctctgttcccaaccaccccaagtacgacatctcagacatgacttctattgccaggctggtcaagtggcagggtcatgagggagacatcgataagggtgctccttatgctccctgctctggaatccaccagcgggctatctgcgtttatggggctggggacttgaattggatgcttcaaaaccatcacctgttggccaacaagtttgacccaaaggtagatgataatgctcttcagtgcttagaagaatacctacgttataaggccatctatgggactgaactttgagacacactatgagagcgttgctacctgtggggcaagagcatgtacaaacatgctcagaacttgctgggacagtgtgggtgggagaccagggctttgcaattcgtggcatcctttaggataagagggctgctattagattgtgggtaagtagatcttttgccttgcaaattgctgcctgggtgaatgctgcttgttctctcacccctaaccctagtagttcctccactaactttctcactaagtgagaatgagaactgctgtgatagggagagtgaaggagggatatgtggtagagcacttgatttcagttgaatgcctgctggtagcttttccattctgtggagctgccgttcctaataattccaggtttggtaacgtggaggagaactttgatggaaagagaacttccttctgtactgttaacttaaaaataaatactcctgatcaaaaaaaaaaaa

SEQ ID NO: 2325 - DNA, 1843 bp, Homo Sapiens
ctgcaggggggggggggggggggggctgtcatggcggcaggacggcgaacttgcagtatctccacgacccgcccctacaggtgccagtgcctccagaatgtggcagctcacaagcctcctgctgttcgtggccacctggggaatttccggcacaccagctcctcttgactcagtgttctccagcagcgagcgtgcccaccaggtgctgcggatccgcaaacgtgccaactccttcctggaggagctccgtcacagcagcctggagcgggagtgcatagaggagatctgtgacttcgaggaggccaaggaaattttccaaaatgtggatgacacactggccttctggtccaagcacgtcgacggtgaccagtgcttggtcttgcccttggagcacccgtgcgccagcctgtgctgcgggcacggcacgtgcatcgacggcatcggcagcttcagctgcgactgccgcagcggctgggagggccgcttctgccagcgcgaggtgagcttcctcaattgctcgctggacaacggcggctgcacgcattactgcctagaggaggtgggctggcggcgctgtagctgtgcgcctggctacaagctgggggacgacctcctgcagtgtcaccccgcagtgaagttcccttgtgggaggccctggaagcggatggagaagaagcgcagtcacctgaaacgagacacagaagaccaagaagaccaagtagatccgcggctcattgatgggaagatgaccaggcggggagacagcccctggcaggtggtcctgctggactcaaagaagaagctggcctgcggggcagtgctcatccacccctcctgggtgctgacagcggcccactgcatggatgagtccaagaagctccttgtcaggcttggagagtatgacctgcggcgctgggagaagtgggagctggacctggacatcaaggaggtcttcgtccaccccaactacagcaagagcaccaccgacaatgacatcgcactgctgcacctggcccagcccgccaccctctcgcagaccatagtgcccatctgcctcccggacagcggccttgcagagcgcgagctcaatcaggccggccaggagaccctcgtgacgggctggggctaccacagcagccgagagaaggaggccaagagaaaccgcaccttcgtcctcaacttcatcaagattcccgtggtcccgcacaatgagtgcagcgaggtcatgagcaacatggtgtctgagaacatgctgtgtgcgggcatcctcggggaccggcaggatgcctgcgagggcgacagtggggggcccatggtcgcctccttccacggcacctggttcctggtgggcctggtgagctggggtgagggctgtgggctccttcacaactacggcgtttacaccaaagtcagccgctacctcgactggatccatgggcacatcagagacaaggaagccccccagaagagctgggcaccttagcgaccctccctgcagggctgggcttttgcatggcaatggatgggacattaaagggacatgtaacaagcacaccggcctgctgttctgtccttccatccctcttttgggctcttctggagggaagtaacatttactgagcacctgttgtatgtcacatgccttatgaatagaatcttaactcctagagcaactctgtggggtggggaggagcagatccaagttttgcggggtctaaagctgtgtgtgttgagggggatactctgtttatgaaaaagaataaaaaacacaaccacgaaaaaaaaaaaaaaaaaaaaaaaaaaaaaaaaaaaaaaaacccccccccgccccccccccctgcag

SEQ ID NO: 2326 - DNA, 539 bp, Homo Sapiens
ctgggctttccttcgctgcgcgtgcccgctttccggtttattggcagagtccaggcgcgcccggaggccgtggcgctcgcgcgggactttcgagcctcgggcccggcctggcatgcacgcccctggccctcccgggctcttctctggcccggggctcacagtagctccgaggccccgaggcccggcggggcggcgggggcgaggtcggggtacaccaggaagccggagaaggtgatgtacttgccgtggttgctgtaggcgccgtagccgtcgtggtcgtggctgagcagccagacggcgtcgccgcgccgcagggccagcatcacgctctggctctgcatctcgcggcgccgcgacgcgccgtcgtcgtaaatcatggcctgcacctcgtcgcggttcttcatcagcttaaccgacagcgtcttacgcggcagcttgcccagcgtgaaggagaagaagtaggcgccgggcagacggcagcggaacacgccggccgccgcgtcgaagtcgccgccaatgttgacgaactcggtgtcgaa

SEQ ID NO: 2327 - DNA, 115863 bp, Homo Sapiens
gatctttgcaattctagtgatgtcccctctacctcacgtgtgaaaccccccattgcttttgacagagcatctaaatcctgcaacatggacagctaagattatcgttggccatctctcagatcaaggattccagtcacaaaacttggtgttagcaacacaaagagtaaactcagggtcattccaattctggaatcttggcagattctgaggctgcatttgctagggcaagcactgcctgggaggatgtgaatatttggtaactgtgagagttctgaggttgacaacagagcacaggctttgtcagggccctctctggtcagaggcacatggatcaggaaaagcttctgccccgatcttgtcactttgtagctgtgtgacctttggcaaatcacttaacctctctgagcttcagttctgtttattatgcaaatacaaatgaggaagatggatgaaacaagctgtatgacttccagaatttaatgccaaaatgggtcattagatagaacccatgaaattatcaaaatttgacctttttaaagtttacctattaaaatacatggtaatatcatatgtttatacttctctaaaggaacagacatttgccagggctggcaaactttttctctaaagggccaaatagtaaatattttatgctttgatggttatttagtctctggggcatctattcaactctgcatgaaagcatccttagacaatacataaaaagaaaaagcaggaccatgttccagtgaaacttaatttacaaaaacaggaggaaagccaaatttggccagtgggctgtagtttgccaatgcctgctttaaacccatggattttctgttatcacaggaaggggaaatgattgggatgtgaagtttggagttttaatggagcttctgcaagtgcttagcaagcagcaaatatgagtttatttcctcccttccttgtatcttcttccaagaaaagcaacttagagacaataatatggggatattctgcaggctacggtgcattcatattgcactagatgtgttttaggggtggaggaagtttacagacaggaccacctatcattgatctctccccctcttagcccccactcttaatgacattttgaacagtgtagcaggatcctatatgccccactctctggaagctcctccctgtggctgggcatcatgaaaacttatcctgggaggaggtagggatggcatagctggggcaagtttccttacaccaccctgtgcacctcccttgtcaacctgaattgccttagcttatgctctgtcctcttctggtaacccggaaaagtcctctgagcctgataggaattcagatctgccttgtgtgaacagaacctcccgcacgcaagttctgagctgagaaaaaaaatgaatgcttccatcaaattaggccaagtaatatccatctactctagggggaaattatttaaatagcatcaaaatcaatttccatgccattaaatattctggtctgtgttttaattgagacgattacatattccccaaaaagagaagagctatttgaagaatcgtgtcttttctctcttcctctcactggaactgacaaggaaagcacctcagagagctgcaaaccgcctgttagcctgccttcgttcctatccatcttctttagagctaacctggtttattatttttctttaagaaataaaaatggagctctaagaggcacccagggcactgggaactctgagttcttcaaatagaataaaccaggtcattctctcttcttcttcttaagggcttgggtttgtggtcggtggcaagaggcagacatgcctttgatgtcctaggagcagatagggaggtgaggatcattcccaacctctgctgctcccaggccttcttcctattcagtaaatattttgggtgcatcttccatggtccaagaactcactgtggctccctggaggagctcccagtctgatggggggatgttcctgaaaacaagtcattataatgcaacatacaaggctctccacctgatcactgcctcgctgccatcatggacatgagctgtgtgcatcctgtcaagctagtcaaggccaccaaggttctgggtaggaccagctcacaaggacagtgcacacgggtgtgtgtggaatttatggtgagtcagagcaagaggctgcggaggctgtgctgcactcgattgctgagtcctcaatggcagagttgactgcttggcccacagagatgatctgtgactattaaatgaagcatttatgttgtgtgttaaaaaaatcaaaataaaaagcagctgggcacggtggcttacgcctgtaatcccagcactttgggaggccaaggcgggtggatcacgaggtcaggagatcgagaccatcctggctaacacagtgaaaccccgtctctactaaaaaaaaaaaaaaaaaatacaaaaatttagccgggcgtggtggtgggcgcctgtagtcccagctactcgggaggctgaggcaggagaatggcgtgaacccgggagacggagcttgcaatgagccgagatcgcaccactgcactcccgcctgggcaaaagagcgagactccgtctcaaaaataaataaataaataaataaataaataaataaataaataaatagcaacatattaggagcaagaataaaaaccaaggccccagtaagtgtccccatagctctcatcctggttgcaggtcattatctttgccatgctttattcaagtctgactttctttctagacttagggcagagaccaggtcagttctgtttctattgtgttcccaatacctataaagtggcaagcagagtagaggctcaatcagaattaaatgcataaagcaacaaatgaatgaatgaatgcaaggtgaaagcaatgaatgaatgaatgcaaagtgctgctggaatatgggggaagaagcacctatttctatcaaagggatgtaaagaaggctttgcaaagaaatgatgttagagctgagatgaataaaggctcatcttcaccagatggccaattagagggaaggtattttgagcagaggaaatcgtgtgtacagagtcaaaataatataattaaaccaagagctaacatttattatttactatgttctaggctctttacttgcatctgctcatttaattctcacaactaccatatgaggtggtgctctcatacccatttcacagatgaggagattgaggtcacgatggctaactctctaagctcacacttctaggaaatgacaaaaatgtgcctcagtggctttactaatcctgtgataccaagcttggctgtcactgccaggttttcctgcctgcccttccaaaacgtgggttttcaaaacacaggaaagtatccaggggtttgatatggctgtaaaatgagtgctggaaagtaggacatgaggctggtaatataaccaaggacctttttgtagagagctttgaatgctaggctaaagatcttgtggtcaatatttcccaaactggaattctgcaaaacactattttacaagatgtaaataagtgagctctgggtaaagagggagtaggggggaaattcattaagcaaattatttgggaaacatagcttcaaccaagctaaacacattttctgtttgctgcaggatttgtcagagcctctaccatgaaagtaggcattttaattgtgcaagagacagaaaaggcacttcgaacttaatttttgaggcgtatttctcaataacccacagaatagtgaatttgggcattgctagcatagatgatggagatccatggagggaatttaaggatttaaggtcagatgagaggggtcaccaggactgcagggaaggtgactgaaattaagaggcaggagttagagggtttgctgaattcaagaccctcccagtcaggatgtgctgaagaccaacaggaagaggaagtctggctgcatctggaccattggcatcaaagacaggtttctactcacagtgggtccagtggggaagaaactgaattcatacacatggcactattcaaacaaagccatgctgcctctctatagaacaatgggctggcttttcagggcaatttaatgactgtggcaaatagcccaggccatcaattaaataccaatccaatttccttccaatgcattctctgcctcaggagtttcctttgtaacgtggaacaaatctggctgatgaggtgggaagatggattggccaacatgcacaatgactttgtcctctgcctgggccagcttctcagatcttgtctctctttctgaaggagatcacccggtatgaacagaaaagtagatagaattagatcacaggacatttttaaagtgataagaggcatcttgtttagcctagcccctccacccctgctttacctaaggggaaactgaggctcagcaaggaggggcaacatgaccaaggtcacacaactgttaaattagcttcctaaactggtctcccagtttgagtctttctccagtccagcacactccctcttcagtagccagggggatctagcaccttaatctgatcatatgaccccttaagccaagaattccccggaggcatcccaatgaattcagaataaaatctgataagatggagcagagggcacataggccagggtctctccatctccgcacaactgacattcgggatgtttaattatttgttatgggaaaggtgcctgtcccgtgcattgtaggatgtttagcaataccctcggcttccatccactatataccagtagtaccactgccctagctgtgacaactaaaatttctcccgacattgccaaatgtcctctggaggaccaaattaccgtcagttgagaaccagtggcctatggaaaatttcagaaagcaagatgtgtctgaagaagggttagggaataaatactgcctggtttatttacccaacgtgagggcttttgcccagccctttagtctctctgagcctcaattcttttatctataaggtgagaaggataatttctcccctgcaaggtttttgctctaggatcaaacaggacaatggatgtgactgtgcacttgacatgaaaaggtgcttaaaagtcacatgattaactgtgatgctgttcaatgctgtgctggtataatggcatggttgggggatattatgggatgtaattgtctccatgtccagaactcctgaaggcagtggttcttaaatgttaataggcttgtgactcacctggagtccttggtaagtgtgcgaacaccttgctcccacctacatcagtgggtcagaatgaggcctagaaatctgccttttaaaaatcatccctggagattctgctgcaagtggtcttttacgcgtgtaggagaaggcttcctcagagcttgaactagcagtacccactgctctctggcagggggtcaggaacttaaatggatgcataaacctagagcaggagtgggagaaggtattgctaacaccaccccaggtcaagattggaaccctaacctcgttgtttgctgatctgagcatttattgcattttctgtgtccctctggaaatttgaggttaatcccaatcttcgacgcaccagctcccgtccttgcctttatttttcatttgctaattatgcagcgtgactgcctcccaaacatattttgctgctaacgtctcccagtctctgatcaaaaattgtggtaaaacattgtcttgtcatgaggctaataaagcgtgttatcctgcctgtcacagaagctgccttacagatgctgtttgctatctgccagggcctggcattaatctcccttccactcggctacaaggaatagagtctactgtgggaagatcaatattgtattatctcggccaccagtgttgttccagctatggccaatgagttgtcattctcgtgttacaagtcaagtgcacaaaggaaaaggaccagaaaaaagagggaagagaagccagcccagaaggggacaagaaagacagtatcagggaaaagaccccggagaaagactcagagaagcaaggacatgaaaagtggttaaggacacttgccccagccttggacagacccagggacactgctaagcctgccttcagaagcttcatgttgacaatttcattcttctgaacctcagttttcatatctataaaatggaccccccaaaaatagaacctggcacagaaggattgaataagatgatgcgtggtagaatgtttagcccagttaacgcacacagggagggctcagtgattattatggagatattattgctgttgttcttgttgtcatctttgtttcttcctgggtaacactagacaagtcacctttcctccctgggcctcaatttccccaactctaaaataagaattcctttgcatctatgaaacaaaaacaaaacaccaaacaggaggcttaacttgaaatagaattatcagagatttggggaacagagatgttggtgctgacaattgtgaggggtgtgtgtgtgtgtgtgtgtgtgtgtgtgtgtgtttcagagagtgaagcactcctggaggaagaaacagcatagatatgatggacaaaaattaagaggcaaatgtatggaataggagctatagacaccttcagtgctctgcagggagaggacccttagagatttacattttggattattgaagatttgagcaattttatctttataccccttctttatctcttcctcatcaagaggggatcaggtggaacagtggaggaggcattgcctcaagcttaaagcctgattgcctaaggctggctgtcaaggaaaacccctcgctggtgtctgctaggacactcatctttcctcctcctgcctggacaacctgctccccagcctcgagcttccaaccctcataagtgggcagccaccttgaaacttcattaaaggcaagcccagcccctgcattcatttcatgcttagttaaagaggaagctgtgagaagcaatccccattcaagggcgtaatgagatgtccactaatgatccagatacaaaaataaggatgaagcgtggccagtcgaccctcagaagatgacaatttgtcttagaataataatgtctgattgtcctctttgggtgcacatgtgtctgggtttttattcaaaccattcattcggtgcttagcatatcccttcattcccaagtccttgaaggataggaactatagaacagcaataaaatcgtaattattcgtagtatgtatataaacaacattaggtttctgttgctctgctggttacagcatcataggaaagcagctgtctagattcttcatcaaaatcagaacatttgcactaagtctttgttagtatctattaaatacaaaagtaccatatcctgcaaccagcattctgttgggaatattcctaacagaaatgaatatacacatacaccaaaaacatggaatggagttgatattgtttggatatgtgtcccctccaaatctcatgttgaaatgtgatccccagtgttggaggtggagcctggtggcaggtgttggatcatgggagcggatcccccctcatgatcataaatggcttggcgtctttcccttggtgatgaatgagttctcactcagtcagttcctgtgagatctggttgtttacaagtatctgggacctcccccttctctctcttgtttctgttcttgccgtgtgatgtgattgctcccgcttcatcttctgccgtgattaaaagctccctgatgcctccccagaagcccagcagatgctggcaccatgctttctgtacagcctgtggaaccgtgagccaattaaacctctttttttctaaactacccagccttgggcatttcttcatggcagtgcaagagcagactaacagagaaatgtctacagttgtactattcgtaataataactgtgaagcaactcatattgcccatcagcactaaaatggataaactgtgatgtagacagaagatgaataaattgtggtgttgtcctaaaatgaaatactacatagtgagaaacaaggaatgaactaccactgcatgcagcaacatagataaatcttgcaaatataatgttgactgaaagaagccggatacaaaagagaacacgttgcataattagccaatgaattctcagtagtcagaattggtccttggccatagaaggcaaaatacaggttacccttgaagagagcaaacctaaaaattcagaatgtgatggaaatgttttgcatatttatctggtagctatttatctaggtcctatttgaggaatttcatcaagctgtgttcttacaattggggggagttttctatgtccgagttacattcaataaaagtttatgaaaaacatgaaaagatatgcttaggaccatgtgactctaaataggttctgcatgacatccctcactttggatgttggaccccaaacacttggtttgtgtttgggccacaaaaaaaccgaatttttacccacggttatcaccactgggccaggctgcagctggtcatcttatgcccaggggaaaactcagactgcataggcaggggtgaaggataaactttgggatgtcccttgctcctggttccacagcctcagaaaggtgggggtgccttagagaggaaaaagcagggactctggagtattttatattcccttccatgttccttagcaaagcacctggcagccactgggtttgtagtgagtgtttgttgaatgactatatgagggtatggatgaatgaatgaattcatgagtgaattcattttattttgtgaaagttaaataatgtatttagaatgctcttaacatcacctaaaataaaatagagctagtagttaatggggctcatatcagacagacctgggtttgaatcccagacccatcaacctctctcagtgtgtttgtgggtatgtgtacttccatctctgagcctcattttccccatctgcaaaatgtagaaagcaacagtccccacatgacagagtagttctgaggattaaatgagacaatgcatgtaaaacacttagcacattgtaaggctgaaaaagtggtagccatggttgtcattatgaaagagttgctatcatcatgtgaatgaagttgtagctattgttcatgggtggggggaattggcatctttccttctccatctctctgcctctctcttcctccctttctctgtgtcacaagccccacgtgtgcttagccaaccttggcagagttgctgctgagtgaataaaagggcatctttcccccaccccaggacaatggcctagtgccaccgcatgcaggcatcatgcctgtgaagggggccaggtgggtgccagggcactgaggcgctctgtgtagcccctgccgggtggggagctgacaatggccactctgaggaccattaaatttgcctcctcctatgcttccccaagccccaaacccagcacctgcccactgggcaagcctgcaagtgaagggaggctctgtgcgccgcctcggcctcaggcccacacacatccgaggcattgttcttgttggctgcgagagctcgttaggctctgggcagaggctggctggactccaggaggcagacatcaagccccacaactcaaagaatggaggagcctggggcttggcattagatgatgccagtccactcctccgcatgcactggggctctgatgcccagtgagaacgttgactctggaggaagagggtagagatgatgtgttatgcatccctgtgtccccctagctcaaagtggtgctccatacaggattacaggatgactgggagctgggctgccgtggggtgagatggtgcaggatgggatagattggggtggggtaggatgggatagaatagaatagaatagactctggacattttcttcttttgttggagatccaaattcttcctcaagtggactgagaagtcagcaggtgtagacctggcgtggacagagtcacctgagagagcaggggcgataagcagacactatttctccctccaagtcctgcaattctcagccatggccccaaaagagaaattgtaccttaggatcacccatccatagaacacgagatctggaagggttattagagaactttctgtccagtgcttttcagattatgttcaagtcccagaactgccatctataatctatattgctttgagcaagtgactaaagtgatctaagcttcagtttcctcttttgtaaaatgtgggtaataacattatctacctcccagagatgttgagaggagcaaatgaaatgatccataagtttaagaccatggatataggaccttgaatataggaccatggatataggaccttggatataggaccttgcatatagaaccttggatataggaccttgaatgtaggaccttggatataggaccatgaatataggacctgacatgtaacaagcacttatcaccattggccttcatcatcaccaccatcatcatcaaagatgattcgagtaagggaaaaacttagggagctgctctcagactcctgcccccacttctgattaaatccatgtgctcctattttttacttattattagggttcagtggtcccctggactacttcagcttcaataattcactagaaggactcagaacttagaaaagccatcatacccagccataaccataaggtttattacagggagaggacacagactgaaatcagcaaagggaagaggtacatgaggcagagtcctagaaaccaggcacagcttccagctttcctctccgtgtggggccccatggacagcacttctgccagcaatggtgttgtggcgacacccacagagtattgcaaactagggaaactcacccgaccttcagtgcccagggttttatctggggttggtcacacaggcatgattgaccactcatgtggctaccgttagtctccagcctctccagaggtcaagctaataccaaggccaaggcccccaccatcaatcacaatgttagcatggagtatcttgctaacactggcattgcccaaggaccccaggtacacgaagactctaatcaagcaggatattccaaggacttagcggttacctctctggagccaagctcaagggccaaaccttttttcagactgtgcagggtgtggacaacccagacctgctgagttaatcctttactgcacagcagtatacagatggtccccaacttacgatggtttgacttttttttattttgaatttacaacgttgcaaaagagatacgtattcagtacttctaactttgaattttgattcaaaattctttatagcaatttcattataaaataggatttgtgttagatgattttgcctaactgtaggcctatgtaagtgttctgagtatgtttaaggtaggctaggctaagctaggatgttcagtaggttaggtgtattaaatgcattttcaacttaagatgttttcaatttacagtgggttagtcaggatgtaaccccatcataagtcaaagagcacctatattgtcattcctcttaaggttttatttgaaggaatgattccattatacagagggtaagttgaggcccagaaatgacaagggacttcccaaaggctgcagagtgagttaataaggctttctgactgtcctagcccagagctttctctgtcataccacaggcctcagtttgcccatctgtaaaatgacggtgctaggccagcacccccacctcctaggtgccttttggttctgcctttacagaagttattctcccacctttttctgcagtctagtcctcagttggagcatctggctgtcagctacctttggggccacgaagtgtcctccttcatccccaggactcctaccctgaggagtcactggggaccttttagctggagcagatcccctgctgatttgtttgtaataggtggtgctcactctggacacagccaggccaggattcagaggctggctggaggagagacatggagcaaatacagccccttccctcacctcactggggcataagtgtgtggtcaaccagcccggcttcaaatcctggccttgccacttaccagctgtgacacctctctctcagagccccagtttgctcaccattaaaacgaagttaacaatcacaaagtcactgctgtccctgttgtgtctaaagagagtacagttcccgcctcttaaatgagaccaattaagccttgcatttgtaaaactgctttcaacatctaaaacccaacccttgctttaccccagtgtttctttaaggttaaccagtcaaagatcactgtccaaactttacaaagcaggaaacttgaggttttgagagatggaatttgctcaaggtcacatggcaacttgggggcaaagccagtgctagaacccaggtctcctgatttcctggatcttttctacctccaagcacatccttgtaagtacctgggaaggtcaagctactctttattcttgtctgggaatctgagcaaacaggtggagagaaattgttaacttactcatgatggcttttaaactcacttggcaaactggattcatttccaagtattataattctctacataggtaattgaagtatagcatataggtaattgaatgcagatcgatttcccaccctgagcttcctctctgtgctgactggtgtgtctgtctccctccctcaatgactcactgattttttgtgtgtgtacacacataaatcacactgcattcctctcccccttgctggctacctgcaagaattcacaaagccgtaccatgagatgcgaaagcagtgggggttcatggggtgtgaggggaggtggttatgaaggagggaaggaagaggagtgtttaaatgctaatcagttggcattgatgtcagccacagttaatcagattgctaaagatacaagggtaagatcgtgcgcctgtgccagactctctgggctcattcacgaggaagatggatgcagggcccagccaacgctctaatgagatgtaactggacataaaagaatgttcaaggctttctgaacccaacatgaattacaaaggaggcccattcgtgggggagaagccagctcacagaagacgattatccgataattactcttgtagccgaaacactgagtctttttttttttttttaatatagcctctctctcagccaggctggagtacagtggtgggatcatgtctcactgcagcctctatctcctgggctcaagcaatcctcccaccttggtctcccaaagcactaggattacaggtgtgagccactgcacccagactgaaagaatcttttcttgcctgcacaagctttcccacttaacacctgctacaagtcccccaaaggcccctaggtttctgcagcagactcaggaggtatccagggtgtgagttcacgtgtgcagtttggtgtgttgtttagggtggcaaaaatccctgctccatctgtacgaccgtggcatatgccagaaaatgaagagaacagcaagaaattaatcagttgggcttctgtttgacctcctaatgctaaagcaaaccatgcgagttatgtggatgagttgccttcatgttctttgcttgtaagtcaaagcacgtttatctaggattaattttaccaaggattaacctttgtgataaccagtagcatacaccatctacaaatctacaatccgtcacttaaagagattgactttgtcatacacaccaagtcttgttctcagcactgcaggcacacttgtgattcattaaatagatgctgactgggggcctactatgtgtcagaaccatggccacagaatgggctctggggagacagtgatgaatagggtacacatgatctctgtcctcgagaaacttcctcctagtagggaagacaggaaagaagccaggtaattatgagtgtgtgattaatgctttggcttatttctttggtggagttaagaattaaggaaaggagagtaaatccaagtaacgataatagcctatgaaaatgctgggtatcttagaagagagggaaagagagaggcattgattgattgaactcaggagaactgaaataatttagttgccatgaggcaggcagtgagaaatgaggatggggaaatttgctgggacagatcaccaggaaccttccagggaaaggtaaggagtttgaagtttaccaggcagggaaggggcggtttagaacgatctctctggctgctgcggaggccagcaaggaggttgtggagtgagggccacgcaagaagcagggctttcctaacagttgctctgggaataataggatatctaaaaagaaatatctttctttaaaaatttaattttagattcagggggtccaggtgcaatgtgttacatgaatatattgcataacgatgaagtttgggcttctagtgtacccattaccaaaatagtaaacatggtgcctgataggtaagttttcaaccctcacccgtcttccaccctccccacctttggagtctccagtgtctactatttccatctttatgtccatgtgtgcccattgtttagcttccacttctaagtgagaacatgcagtatttggttttgtgtttctgagttagttcacttaggatatgcctccagctccattcatgttgctgcaaaggacatgatttcattcctaaaaatgtctttttaagagacagtttgctctcctggcttctcttgtggtgggacccaggttctttggtgtattgtaacaatgaaatgtgttccatcattaaaaggaatgaattttttaaaaaagaaaagaaggggaaagaaagaaggaaagaaggaaggaaggaagggagggaggaaggaaggaatgaaggagagaaagaaacagaaaaagaaaaggaaagaaagaagaaaagaaaagaaagagaaagaaagaaaaggaagaaagaaagaaggagaggaaggaaggagagaggaagggaagaagaagaaagaaagaaagaaaaagaaagaaagaggagagaggaagggagggagggagggaggaaggaaggaaggaaggaagggaaggaaggaaagaaggaaaaaatgaaaagtggagctcatccaacttcccccccaaccacgttgaatgactccccagtgcctcgacttcccatggaaagttaggcattccccttgggcatttcccatgctctgtctgtgactgcacaacaccactgcaagtaatcaccttaggcaagttttttgagtgttgagcagaacctaagggatgaccattggatggcttcctggtttaggcagacccagtattgagattttctttgtctctcctcccacggagggtgaactgcctgtgggagaatgtgatgggtttgcttccagcctcgttttcccacccagccaccgactctgagaggaagaggagggctggggatcttgggattttcctgtgccgtgacattggaggtgttgaatcacagagagtcaatctgtgaccccatcctccttctcttctttcctgcctttcctgtctcactgccaataaattcatctccagttagaggaagaacatggaatagagatctgtccatgttcatcctgaggaaaaaattgggcgaaaagaaaggaagttagaacaactgatctttgagaaggccaaggaccaggccgtagcagtttccatcaggatggggccagggcacttggtcttgtgtgagtaatgtctacaccccgcttcctgtcacccttgcacagctacgttcagaattatagaacttctggaaacgtcatcagctcctcagcatttgctaaacgcccccaaacatccctcctccccctggagaggtagaatacaagtgtcttttcttggggactccctgcaggagagaagctgatttccctgctccccacggaaatgtgagagcagttagaaaacctgagaaggctggggtttgttctctgccctcctctgaaattgaggtgacaaagggagttaattatttcgtttttaattattgctataaaaatagcatgcatgtggcaaaacaacccaactgtatacaatgatatacaataaaaaaaataaaaagtgattctctctttgagcccaaacctcatttctactctgctgaggtaaagcccattacctggttcaaatgttacacatgtgagggctgggatgcacacccgcctaccttgattgttcttgcttcacactgagttgtgttgacatacagctgtgccattctttttattatttttcaatttgttacatagtttttgaataagtaagtctccctataaatacatacgtacatttatacacatatatatatacatatatatgcatgtaaaaaaaggtctataatgaaaattctcctttccatctttattcctcatcattctacttccaatgccccacctcccctgtaaccaacatagttcatttcttgtgtattctttcaaagttcctttatgcacaggtaaacaaatgcaaatatatgtagccttgttttatctccctgtttttgcacgaaaggtagcatactctgcacatcattctgcaccttggtttttgttttctttttagaaggaagaagacttctttattgctagtaggactaagcagccaatttgtctatacagtctgaaaacattcctaaaactgcaccctacacctccacctctccccaccccacccttatgagcaaagagctatcatagttcaattctgagctgctcacctcccctgaatctatattgacatagggttgaacccaagggaaacctggtgttcagagaactcatttttcaaaatttatctatttttaattgactaataaaattgtatgtatttatcacatacaacatgatgttttgaaatatgcaggcatcgtggaatggctaagtcaagctaattaacacatgccctacttcacacatttattaattttggggtaagaacacttataatctaatctcttagccatttttaaggatataatacattgttattcactgtagtcatcatgtcatacaatagatcccttgaacttatctctcctatgctttggcttaaattattgtcccttctaagactcatgttggaatttaatccccagggtgacagtattgagaggtggtgactcaaaaaggctgttggataaggagggctctgccctcacaaatggattaactactcctgaattaatggattaatggattaatgggttatcatgggagtacaattagtggctttataagaagcaggagagagatatgagcatattagtatgctccgccctgcagccacgtaatgcactgcgtcactatgagaccctgtagatagtccccaccaggaggaaggcctgaattctcagcctccagaattgtaagaaataagtttcttttcttttctttctttctttcttttttttttttttttttgagacggagtctcactctgccgcccaggctggagtgcagtggcgccatctcggctcactgcaagctccgcctcccgggttcacgccattctcctgcctcaacctcccgagtagctgggaatacaggcgcccgccaccatggccggctactttttttaaattttttttagtagagacggggtttcaccgtgttagccaggatggtcttgatctcctgacctcgtggtccgcccacctcggccttccaaagtgctgggattacaggcgtgagccaccgcacctggccttcttttctttagaaattacccagttccgatgttctgtgataagcagtggaaaacaaactaagaaatcctaatttaaattatgtatcctttgaccaacatctccttaatccttacctacccctgcccacccctctggtaaacaccattctaccctctgcttctgtgagttcaaccttttggattccaccacatcttactttttaacattacggaatccttggtcatctctcctcttccgtgcatagatagcttcatcattctcttctctcagctgcatggcattccacctggatattctgtaattgatttaaccttattgatgtattcttgatttatcttctagccttttgctgctacaaatggggccgcattgcttaactcgtctgcatagcattttgcacatgggcaaacatctctctgtaggataaattcccagaagcagactcatgagtcaaagggaagatgtacaaataattctgaaagctcttgccgtgttacactctatgttattcaccagtgacttcatctcattcctttaaaccctgcagatattttactgtgttctacaatcacgtaactagtcccctatggatgggtatgtatgttgtttccagatttttgctactataaacaatgctttgtattgtgaacactttgcaacaccctagtacgtgtcaatgaccacaaaggtctctcagctttgggacatgaccaggcagcctgtttacctaaaaatctattgctgtttcagtgaagcctcttttgttctcaggccattgaacccagactgtcttcctagccctcatttaccatggatctccagtctgacctgttacataaactctggttgatgtggagcatgtctgcaaagcaccctagaataggctccctggatgctcttgagaaaaaagtgtggtgaggcaggtgaaaggttgggaccaaccgtaggcacagcttcaggtagaaagcggcatctagagaaagctcgagagtacctcaaaaatcatcaagggggctttttagaagcctaccgtgccagtatccagctgccccagattccattttagatggtctagttaaaatcttcagaaaagaaatgctgacttcactgctgaagagcagcagcactctcaaatagagttggtggcagggtaaataggttcagattattctgaaggtgattttttttctatgtcaatcaaaatttaaaatgtgtaaatcttttggctgagcaatgagcaatgcaatttctttttttttgagttggagtctctccctgtcgcccaggctggagtacagtggcgcgattttggctcactgcaacctccacctcccgggttcaagcgattcttctgcctcagcctcctgagtagctgggactactacaggtgtgccgccacacctggctaatttttgtatttttagtagagatggggtttcaccatattggccaggctggtcttcaactcctgacctcatgatctacccacctcagcctcccaaagtgctgggattacaggcgtgagccactgcatccggctgcaatacgacttctagtatgccctccttaagaaattatgtgaatgtaatccccaaagatgcgtattaattgcagtactaattggaggaaggtaggggaatggcaataatttgaatattaatcaataggagactggttcagtgaggtatatgtttatattttaatgtaatcatttaaaaagagtaaagtgactatgtgtgttctagtcgaaagcccacggcttctaagtacaaagttggtggtagaatactaatgtaatggaatactatacagcagtgaaaaatgaatccatcacagctgcacttatcaacatggatgaattctataaagtgttgatcaacaacaacaataaaaacagagaaaaaagcagttttcaggataattcctatggtatgacagcatttatataatatttttaaatgtgccatacaatgccatacattgttcacagatatttatatctgtaacaaataagtgcatacaataaataatagcagtaaaataagaacaagtgcacataataaacgagaatgctaaatgccacattcagggcagtagttcattccagggggtggagaaggagatggagaatattatgggggaggaaaggcaggggtttcaactatactaggagtattctattctttaagatgaaggtgcacatatgtgggtatttactgcgttagcctttaactctttttgattgactgaaatatttcaaaatgtgttactcagtaagttacagaacaatatatgccatgtgataactttgtaaatgttcagacagatagaaaatgacaactgtgttcatgatggctggcaggctgctgtgtgagctctgcattttactggcatgatttcattttactctctaaaactccaaaagacaaggctgatgaaaccccaccatacagatgagaacagtgagccccagaggaggggaatggctgtccagtgtcttaccggcagtaacagtgagctaagtccagaacacaaacagttctgactcccaatctcacactcctaggtgctattttgccttttaaagtgaaaatatgtaagtgtttttatatcaatacattttatttagagatgaaacaagacttggccgggtgcggtggctcatgcctataatcccagcactttgggaggccaaggcacatggatcacttgagttcagaagttcaaggccagcctggccaacatggtacaaccctgtctctactaaaaatataaaaaatattagccgggcatgttggctcatgcctgtaaccctaactattctggagattgaaatgggaggatcgctttaacccaggaggcggaggttgcagtgagctgagattgcaccgctgcactccagccttgatgacagatcaggactccaaaaaaaaaaaaaaaaaaaaaaaaaaaaccctaatgacggtttaaacaagattacaattaacactgataccctgtagaaagcaggattggtgaacagaacgtaggagagaagtgcttgtacttttgatttcttacctctcaggtgttctttaattttttgaataaactatttcacaggaaataattatttgaagatgtgggaaagaggaaaagtgcacaggaaacaaagtcagaaagtgtctaactctaccccagttttctctctatgatcttgaacaagtcacttcccccataggagtctttattttttttttcacctataaaatgggaaaaacaaaatgtcaactttacagtattgtttggagatcggaatgagatcctaagagggaatgaactctatggagtataaatcgccacttgaatatcagtattgttagcatgggcatacaggcagagggttgcaactgactgatagggaagacccctgctgcccccaaggccaccaccacctctgccttttgttccagaaggtcttctcaaagtgcaaatgggatcaatactatgaatctatccttccaagtggaccacagggggccggcagctgttgcctgggccagtgacgagcatgtaataagtgcagaatgaatgaatgaatgaacgataaatggataaatgaagtgatgatcaaatgtgcccgagacggaaactcggctcttgctaaatccaacttctttatttataaaatagacattaaactaagaccttctccaaccctcaaattcaatgatacaagcaacacaaagctgatcagttccaggaattgggaaggaagtctttctcagtcctgagggcagtgccagatcacctctgtgttgtgttcactgtgattaatccagtggtcttcaaccagaggcaatcttgccacccaggaaacatctggcagtgtttggaatcatttttggttgtcacaactgggcaggtgatgggagggtagggcatgcaggttgggggaggtttgctgctggcatctagtgggtagaagctagggatgctgctccgtttcctacaacgcatagagcagcttctgtcacccagcaaaaatgatccagcctagatgtcaaaggcataaaagtaactggcagtacagttggttctatgccttcaactatccagatgttcctggctttgtttttaattttgtgtgatgtgctctgctgtggtttttcaagcctcaaacagccttgttctttcactgctgctgatatgctgtgttgactctggacaaccgcttcccctctttgaacctcacactcctttactgggcagtttgtaaccgtgatctccaggagccttttgatctttaagatgtgatatttattttcagttttgtccccagtggggccaaacaatcaaggcaggttgggcgagtctttatagtggagtctgaagtataagaaataaccactggaatgggtattaatgaggattagaatagtgactaacagttttgcagtaccttttaccaaaagtacatccattgattcacctgtcagtcctgcgtcctaaaggtagttactgtaaatagtgccatgagggaataatgatcatcatctctaccaggaaactgcattccaaagaggctcaatgattccatctgtgaagtgcttctgtgattacaaccttgtgtgtgcattcctagacctctcaatcaccaggggctagagacagcatcttaaaatcagctcgttctgtaaatatttatttcatttaagaaagtcttttacgtacttattatacgtattttggaaaatgccaaaaagtaggaaggagaaaatacacccagaggccaccagggcctccatcttagtgccattcttcaagtcaaaacatgattctctgcattgcaatttgttttacttcgttgcttctagccattttcatacataccatagaattttatgtctcattcttttcactgaacattatagcagtagcatctcccagctctcgtttcttcactcacatcaccttgtacctgcatgatgatatgttacgctactgcttggaattccgtgcctctcccaggcattctgctgcggctggggatttaagatacaaaccttcagcttcagagcttgtgctttttttttttttttttttgagatggaatttttgctctgttgcccaggctggtgtgcagtggcacaatctcggctcactgccacctccaccttctgggtttgagtgattctcccgcctcagcttcccaagtagctgggattacaggcccctgccaccatgcctgactaatttttgtatttttagtagagacaggatttcacaatattggccaagctggtttccaactcctgacctcaagtgatctgcccacctcagcctcccaaagtgctgggattacaggtgtgatccaccatgcccggtcgagcttgtgctttttttttttttttcactttaataggatgttcccagtctaatctcccatctccccatcaaagttagaaaaatgggagagaaagagagatacgctgctgccccaacttggatggcagaacaaatgttcaattgccttctacgtggcatggctctgtcctttgggggaagagcaacatcagcgtgcatttaaggaaagctccatctcttctgtttgatctctgtagttgattatcagtgtgtgtgtgttttcctaactccttgagggcaggggccaaatcttagaatgttcactctcttgtgtcgggtgtcaaccataggagaaagtgaacacccaacactttgattgattgaccgcttttgagtagagcaccgactgtacgtgataaaggaagaatcagataaatgtgactatcatgatagaaaattttaaatgttctgaaaaaaaatgagttaatttaactcagcggtcatcggacaccaagaaaaacaaggctattggggcaagttataaagttgctggataagcagttttgtccccatgatgtaagtcttctctatctggacatcatcatggggatattctgattgctccagtttcctgctgaggccctgaagtacaattttcgctaattcccagtgggacttggttttgcatggcactaatctggccaacatcctggctaagaatgaggcctgtgggctgcctatgttgcagaccacagatgcatatcatctgtgttggacttggccttaagtttggagccagctggcaagatccaagcttgtgtatgattaaggaaaaggggatagtagggactgagagatgaatttatctggtggatacaaaactctccttgatggtcaggttttcagtgggaaagggctgactctgaacccagctgggtttccttcttagagtggtttatagctgctgcggttagcacccttgtaccctgggggacccagagagtaagaacagcagctgtgaagaggaagccagttggggaatctgttttcttgcatttccttctgttcttttgactgtatttgggtcttggaggactgggattgctaggggagatcacaagccttggaaagagtcaaagagtcaccatctgctgcacaaacccacactttgttttctgccaactgcatccttaggcacttggaagacaaaacagatgaggaacacatagtaagtcaggtgggttcacgtgttcccaaacttccctggcaactctgataataaaagtcaccagaggagtttttcaatcatcagcttcccaagacccacccctggagattcagatgtgatgggtctgaattctgtggagttggggttggagattagaaaaacactctagcccacccagcagagacaaacaaaatgagagggaaagggaagaggctgattcaagctgaggaggaggatgccaagtgacatcaataccccatatttcttaaaagagctagtagcatgatctttggggtcataaaaaccaagatttgaaacccagctttgctgtgtgacctcaaaaagtgatttaacatcccaaaacttcactttgatcattcataaaataggaacaataatttctgcctgatacggttgagaaggaattaaaaaggaggcaatggatgcaaagccctcttcattactcaacaaagcaatcacaattaaaacattataaatatcactgttattttggccaaggtgaattgatgtgctttttgtcacctccttgtgtgcagatgacacaacttgtttttccaatcttgctctctctctcctctctctcatccccacttataattaaggggtaatgtttgcaaaggagctggctggccagataacccaaaaaaaaacccccaacatccgccagtgttgggatttagcagtcaccttttccaatttagcagggttaacaaatggctctaagaataattgtcaattccctggtcatttcaaaaacccaacaatgtctgagctagaaaggcccttctttcatatgcagtctggctgcccatttgacacatagagaagatgcagagaagaggagacccatgcaaagtcatgctagtgaatagtggccaagatgggacaccacccagatccctcagctcctggttgtatccaagtactttgtgttgtaccacagctgggtcttggaagctgggtgtcctgacccctcccccctgctctttttgtccctatgccctcttttcactccacagtctacaaagatggtcaacatcaatcattttagaaaagcgacagtgagcataaaagccattgttttgaggcagatccacgtctggtctaatccaacaaggtagatagaatacctccattatacaaaagaggctgctgaacctcagcaaggttcaaggacttgcccagactcactcagctcataactgtaacaggcaggatttgaaccctaactctgaagcttcactactccccaccttggactaggaaatctgcctgatgcctgaatgaccttgacctgccctcatgccatccactcacgctgctcccagatacccattcctggcccagcatcactggcggcctggaaggaacactggctggtaatcaatgttacacaacaggaacatttgttgatgccagttgcaaactgttgcagtctatatagattaagccaccgccgccaactccatgaaagtaaatgagcctctccaacgactgctgaaataaatttaaatgacagcactggagggcctggagactgtagctgagtgagtgtctccctgcagaaaatcgacaaggacagctatcagtccgagggcctttgtccccgtgatgtaattcctctctatctagacatcttcacggggatgttctgattgctccagtttcctgccgaggggctgtgattgcaatgacaagagtaaaaaccatgacggcagctggcatttgctaagcactcactacgggtgaggcgctgtcctaagtgctttgcatacatcaactcgctgaatgatggcaaccccaggaaataggaaataatagccccatttgacagctgagggaactgaggcttggagagtgaagtcattaaccagcaattggcagaactgggtctttaaaaagcaaacaaagctggtttccagcaccattctgccagacagctgcctgggccagcccttctttaaaatgactattgggccgggcgcggtggctcacgcctgtaatcccagcactttgggaggccgaggcgggtggatcacgaggtcaggagatcgagaccatcctggctaacatggtgaaaccctgtctctactaaaaaatacaaaaaattagctgggcatggtggcacgcacctgtggtcccagctgctcaggaggctgaggcaggagaatggcgtgaacccgggaggcggagcttgcagtgagccgagatcgcgccactgcactccagcctgggcgacagagtgagactccgtctcaaaaaaataaataaaataaaataaaataaaatgactaaatggttttaccttccagacaaaaataaatcgcaaggatggggaccaaggtgggaggatcacttgatcccaggagtttgcaaccagccatagtgagatccgtctcaagaaaaaacaaaatgaattacaagaagttagcaaggtatacaaggccctccagggcctggcccctgcctccctaccttaccagctttatcccccgtactctccacttgtgctccaaaaccccttgcaattcttttgtgcccacctctgcccagcctccaagcctccatgggtcttcacacagtcctctgttctgaatctgcctcgtgactctgaatcctaaaacatttctgtgtctcccacaaggtcactcttacattccttcagtttaaaatgtacctcccccaaccctgcttttacactgttggtgggaatgtaaattaattcaaccattgtggaagatggtgctgagattcctcaaagatctggaaccagaaatagcatttgactcagcaatcccattactgggtcccattacatatatacccaaaggaatataaatcattctgttacaaagatacatgcatgcacatgttcattgctgcactattcacaatagcaaagacgtggaatcaacctaatgcccatcaatgatagactggataaagaaaatgtggtacatgtacaccatggaatactatgcagccataaagacaaacaaaatcatgtcctttgcagggacatagatggagctggaagacattatccctagcaaactaaggcaggaacagaaaaccaaacaccacatgttctcacttataagtgggagttgaacaatgagaacacatggacacagggaggggagtaacacacactggggcctgttgcggggtggagttgggggaggggagagcattaggaaaaataggtaatgcatgctgggcttaatacctagcgtgggttgataggtgcagcaaaccaccatggcacatgtttacctacataacaaacctgcacatcctgcacataggccccagaacttaaaattaaaatttaaatttaaaaaaactctcctcccccatcccccaagcccagccagagcacacagcttagaaaagagagtgtggcctggtgtccatccccactcatcctcttagctgcatgtctttgtacagggaacaatctgcccaactgtacatggcatgcctgtcctgcagacggggttagggcccgtcctctctgctctcttagcacacaagcttttctctttccaagcattcatcatatcaaatatgattgtgtctactttcccatcccccttcccagtacatatacaaccaggcagtgaggcccctgtgctttttgtttctatactcctaatgcttagctcagtcctggcatgatcaagcccaagtcttcaggaaaaggaaggaaggaaggaaggaaggaaggaaggaaggaaggaaggaaggaaggaaggaaggatggatggaaggaaagaaggaaggaaatgaaggaagaaaatgaaggaggaaggaagaaagaaaaaaatggaaggggaaaggaaggagggagggaggaaagaaagaaagaaaggaaggaaggaaggaaggaggaaggaaagaaggaaggagggagggtgggaggaaaagaaggaagaaaagagaaagagggagagagggaaggaggagaaaaaagaaaggaagggagggagggagaaaggagaagttggtttagaggccagccggacgagctttgggcaccgcccttaggagggccaccctcagagtctgacagcaggtgaaggtcctaaatctccccaaactaactggtgtcttttctcctcttccaagatgctcttcccgagggagatgctagccctttgggtccttacctcctgccctcaggagccccggagagaggcagtcctggcaaagagcaccctgaagagagagtggtaacagcgccccccagttcctcacagtcggcggaagtgctgggcgagctggtgctggatgggaccgcaccctctgcacatcacgacatcccagccctgtcaccgctgcttccagaggaggcccgccccaagcacgccttgccccccaagaagaaactgccttcgctcaagcaggtgaactctgccaggaagcagctgaggcccaaggccacctccgcagccactgtccaaagggcagggtcccagccagcgtcccagggcctagatctcctctcctcctccacggagaagcctggcccaccgggggacccggaccccatcgtggcctccgaggaggcatcagaagtgcccctttggctggaccgaaaggagagtgcggtccctacaacacccgcacccctgcaaatctcccccttcacttcgcagccctatgtggcccacacactcccccagaggccagaacccggggagcctgggcctgacatggcccaggaggccccccaggaggacaccagccccatggccctgatggacaaaggtgagaatgagctgactgggtcagcctcagaggagagccaggagaccactacctccaccattatcaccaccacggtcatcaccaccgagcaggcaccaggtatgcagcccccaactcctgaagccatcctgaaacagccatgaggcactcactatgttcagggcatgtgggtagaggaatctcaagaagccccggccccaccatcagttaccgtccattgagcactgactatgagcttcgccctgtggctcagaattaatagcctcatttcatttgtttgttgttttggggggttgttttagcaaaggggtcttgatctttcgcccaggctggagtgccatggcacgatcatagctcactgcagcctcaaactcctgtgctcaagtgatcctcttgcctcagcctcttgagtagctgggactacaagcatgcactatgatgtccagctaatttttttgttttttgtagaaagggggtcttgcttattgtccaggctggggaactcctgggctcaagcaatcctcccacctcagcctcccaaagcactgggattacaggcatgagccaggacactcagccaacatccccattttaaagatgagacaactgaaaccctgagacccccaagcaacctgccaaaggtcacacagctaatgagcaagattcaaaaccttttcatcttggaacggaattcttcatttaacctgcttcaaagccactagccttttcaaagcacatttgcttttagcattacatgtattttctagacttgataaaatgctcttctgtgttccagtcttctctaccatctttaaaatgggagaaggacccccaattgtcaagcatacatggattttggacaagtgcaatgtggccacccttcaaagcacgtgagctctgggtccaaatcctgcttgctgtttgagctcggcccctctctgagcttttgtttacttccctctaaactggggatgaaatattatcagtccctatgagaataagtggggtcacccctgttgactagctaaaatggtgcctagcaggatatagtaagtgatcattctgtgtcaattattgctatttttattatcatgtcaattctggagctgaggaattaacagcagaaggacagatgggaacagcaaaatgcaggttcccctaaagcccccattccaccccacagcccatggttgagcttacatccaagttgtctttggtgtcctaattaaagtccttccttccagctctctgcagtgtgagcttctccaatcctgaggggtacattgactccagcgactacccactgctgcccctcaacaactttctggagtgcacatacaacgtgacagtctacactggctatggggtggagctccaggtaaccccaggagagtacctcacagaggctgcctcgtctagcaggaagtctcaggaggattgtctgagtcaggcttactgttatgctaactagtttggttctgtctttgcccaaccaggccaactttagctgggttttggcgaatgagtaggagttcttaactcaatgctttgctaaaatagcttgtggggatagagggaacatgctgacaaattctgaggtatttcccagaaggaaaatcccttgatactctgcttatctcacacacacatacacacacgcatgcacgtgcataaacacacacacacacacacacacacacacacacacacggaagctccacctgattcatttgattctttcttgcttgcttgcttccttatttctctttctctttctttcttgcttgcttgcttgcttcctgctttcttgcttctttctctttctctttctttctttctttcttgcttgcttgcttgcttcctgctttcttgcttctttctctttctctttctttctttctttctttctttcttgcttgcttgcttgctttccttcattttctggttattaggacattttattcttaaacttttgcccatacagtaagaaaggaaaagcagggtggcataatgctcaaacatctgggttttaagtcctacctcttccagttaaaactgcgtgactttgaacaaggaacttcacctctctgagcctcagtttcccgatcaataaaataggaataatgttactgctttgtaaagtttgggggagcagtaaatatgacaatgcagagatcatttggccacagcccagcagagagagagggaggagagagagagaaatcatttggtcagagcccagcagaaatcgcgaccatgcagtgcatgttatccattatcttcagtatgctaatcaccctgaatgtgttcctttttctcatgggaaataaagagccatcaaaagtttctgagctggggcaggtgtatgaccttaccttaggaaggttttttgtttttgtttttgttttacttgtataagagagacaaaaggtaagcccctcagcagtagaacctgtagtctttgcagtccccagagctttgcacaagtgtgtggcacattgtaggtccttaataattgttcatggaattaaaataaactggagaaaacctgcagtccagattattatagtgcttaagaaccctttcctccatgtcatgaagagtattggacccagtatgtgtccagtactgtgtggagccttttaccaggcacagtagagttcattcattgagcaattagaatgcaccaggcaaagctgttgacacaggagaatatgttgatgtaaaaaactgatgcaatgcctgccctaaaagagaaatacgtaggatgccatttagtagggactctaattggtgttttagaggttgttgtagaatcgcagcaaaggaacaggcaaactccttggcaatcagggaaggtctcatagaggagggcaattttaatggggctttggtgaatgagtaggagttcatcaaagagaaaagaggataagatatagggcctgaaggaagaagagcttgtgggtaaggcctgccctgtttagaggagaggcagagaaactaaagttccaagccctactcataaaagcgtaagtcttcaaattaggcattgagacctgactaaattctcccttacacacacacgcgcacataccatttgttcagcctccctgcgtacaactaaagtatctcgcttctttcttctcaaatcccacagagtgtaaatggcaaagcaagtgtctgattctttgagataggggttgattgtcctgcagttgtagccaccactggggagaataagagaatgggccagagagtgccctagaaatgaggcccccacccctcacttaccaatttatgcagaaaatggaagaatatattcaatcttttttaaatattttctgagcacttaatatgtgccaggtactattctaggcactggaaacattgaacagcatggagaaatccctaaccttgcagagtatacattctggtagaatgcttctcccggctccctggagattggatctcaagcacaagctgatccaactgctgcctccactcaccagctccaggataatctatcccacccactagcatccagggcctgtgccaaaggcccctcttacaggacacagcaatgggggcctcacattgcaagtcccttgcaatgcctctgccttgcagtttggtttcactctatccccttggcttttggggaaattagggggaccttgatattcccagggctcctgtgggctcggcatggggcccaggggtcccgttgaccaggggctagcagtacctgggccacttttcactgacttctttgcaaccttagaaggctctgtctcaaacacaactcagagttcctctctgtctgcttctgcctgttcccaggtgaagagtgtgaacctgtccgatggggaactgctctccatccgcggggtggacggccctaccctgaccgtcctggccaaccagacactcctggtggaggggcaggtaatccgaagccccaccaacaccatctccgtctacttccggaccttccaggacgacggccttgggaccttccagcttcactaccagggtagggtcaggccaaggctgatgaaacataggcgtttgcctcagtttccctctggagaaaaggattttaaaactttttgtgccagggacctctctgacagtttggtaaaacctacaaaccccttctcagaataatgtttttaaaagtataaaataaaatatatacaattttaaagaaaacggtattactgagctgcagttatcaaaatactgttataatctatgatgccttaatctatgtgctttttattaattcattaaacaatgtcttctagtagttcttataattgctgacatttcaaagtactaaggagcataagaaataggttgagatatccattatgatatgaaaaatatctgtggtttctcttggtgtcaaagtcacaggttctactacaatgtttcagtttgttgccaggaaaatagcacagctaaggtagaggttaatgaaaataagcaagcagctttccttcattcaagttcacaggccctgaattcaatatatagatccactgtgcgtccacagactcctgataaagagccttaacagggtacttctctcttttcttcttcctctactggttttcctttttgtctgttcctgtcttctctgttttgctctctgttcattcctctcttctcttacttcctttctccttccttctcttctcctccctctttgcttgcttgttttatttcttcatttcctcctctctttctcttcctttccaccctctattttccctcccttctctctctctctcctttcctagtcccccttttcttcccctctcctccaccccgatttcctcctatgcagctcccatgacctcaggtctcctttgcctcacccaggaactttcccttggatacttaccaactgctgaaacatctgaatggaaagtggattcgtgaaccatgcaaccagatattgagagccatcatgtgttatatcaaattgtccagacatttgaaaacaacaacaactcattttcaacttttctctcacctgtttctgaaacaggtggatgactgcaaaggggagtgtccacttcatcacaacttttcattgtgggatactgccctttgctgttgttgtgaatttaaaagcaacaacaaaaaagaatgtgaatcatgaacttgaatgtattcctcctcatcagtactgagaataaagatattctgtgctgcaggagaggtcagaccatggtctagggtgaagaagctaggatgaatttgacatcctcttatgaaaactgaggaattcagtatgtccccatgcacccttttactacccccatctactgactgcgaaggaggctctttctctgtattatctcatttaatccccaccaccacctgtaaggtggaggcactgagtccttgtctcaaggtgacatcgttttgtaaactcacattagttttctttctaaagcccaagctcctgtctcgcaggccagtagttctcgagctttcatatccttgggcaattcccaaagacctggttcaagcatctgcatttttaacaagcactcaagatgtgcacgcaggtgggactaaacttcctgggtggtcttgcccctcccagtcccagagagaaggccaatctgtctctacatagatagagataggctcaaaggaggtatggaaactcatttttcatcccaaacctgctgtctctgtttaggcagggtggcgatttttaagtcccaagaaagtgctaacctggcagtttcagcctgatatgatcaaagagagtcacaaaaataccattctccagagctctggagtccccaggggcctcatcttctctccccagcacaaactggctcccaggatgtgggtcaggttcttgatctgccactccaagtgatgactgagtctgcctctgcatttcttcccagccttcatgctgagctgcaactttccccgccggcctgactctggggatgtcacggtgatggacctgcactcaggtggggtggcccactttcactgccacctgggctatgagctccagggcgctaagatgctgacatgcatcaatgcctccaagccgcactggagcagccaggagcccatctgctcaggtatgctccagcctcagccggaccaaacctgatggtccaactaagaggggaaagaccaacctgtaggacaccgagagtgacctcagggaatggctttcagcccaggggaagaaactgctccaaatatggatgactattgttatttatgtttttattggagtaaaatacacataatatgaaatttaccattggagacattttagtatgttcacgctattgtgcaaccatcaccactacctagctccaaaacatctttaacaccccaaatggaaacactgtacagaaagcagtcactccccatccctccctcctccccacactcgctggcaaccatccggctgcattctgtctctgtggatttatctattgtggatattttatgtaaatggaatcatataatatgtgactttcatgtctgacttctttcacttagcgcttggcactgtgttttcaaagttcgtgtatgttgtagcatgtatcagtacttcatttctttttacagctgaataatattccattgtatggatgtcccacattttgttgacctgtttattcgttagtagacatttgagttgtttctacttttcagctattatgaacaatgctgctgtgaacatttgtatgccagttttttgtgtggatatggctttcatttctcttagatatatactcaagagtggaattgctgggtcatagggtcattgtatgtataactttttgaggaaccatcaaacgattttccacagcagctgcaccattttactttcccctcagcaatgtgacagtaccagtgtctccacatccttgcccacatatgttcttttccatgttgttgtttttattgtagccatccttatgggtatgaaggtatctcatggttttagtttccatttccctgatgattaatgatgtcaagcatcttttcatgtatgtgttggccatttgtagatcttctttggggagatgtctagtcaggtcctttgcccatttttttttaattatactttaagttttagggtacatgtgcacaacgtgcaggtttgttacatatgtatacatgtgccatgttggtgtgctgcacccattaactcatcatttaacattaggtatatctcctgatgctatccctcccccctctccccaccccacaacaggccccggtgtgtgatgttccccttcctgtgtccatgtgttctcattgttcaattcccacctatgagtgagaacatgcggtgtttggttttttgtccttgcgacagtttgctgagaatgatggtttccagcttcatccatatccctacaaaggacatgaactcatcattttttatggctgcatagtattccatggtgtatatgtgccacattttcttaaaccagtctatcattgttggacatttggcttggttccaagtctttgctattgtgaatagtgctgcagtaaacatacgtgtgcatgtgtctttatagcagcatgatttataatcctttgggtatatacccagtaatgggattgctgggtcaaatggtatttctagttctagatccctgaggaatcgccacactgacttccacaatggttgaactagtttacagtcccaccaacagtgtaaaagtgttcttatttccattttttaatcaggttgtttgtctttttgttattgagttgtaagcaatcattatatattctgatcactagacccttatcagataagtggtttgcaaatattttctcccatttcatgggttgtcttttcacttactgacagtgttatttgatgcacaaagcttttacatttggcaaaattaaatatttttttcttttctttcttgtgctctgagtgtaactactgccatttttcaagccaagccaatatgtgttgcacaccgtgccagaggctgcatttaatcctcacagcaatgccataggatgggagccattatccccattttgcagatgaggctcatgtaggtgaagtcacttactcaaagcctccatgtagaaattgttggaggtagcctgctgacacagtctggtgccctctagtaaaaagaagtgggctttctgagccagcagacagaatctgagacttcgaggacagaaggaattttaagcacctgttgggcgttgtttgtcattcagagcctttcctatctaggtactcattcgacaaacatccgccgagcgcccactgtgtggtaggcattgcacctgttgctagagctattgcagggaccctgacccagttcctgctctcacagagtttccagtcaaggtgaggctgtagtatgtaaatgagtaaacaaggatgcaaacatgctggtaacagattgtgttaaggaccaggaaagaaattcacatggtggaatgatgcagagtgaggatggagaggacatcagttattgtgagaggcgttgcaatgcagaaaaggtatacaggaagaagctgtgatagaggacctcacctgggaggaggacagtgatgagcgaagggtcagggaaggattacctgataacactccaagatttggaagttgagtaggaaatagactgagggtggaaaatgggggggagaagggggaaacattccaggcagatgcactagcacatgctaaggttcagaggtcagaaggaactcgatgagtttgagaaagcaaataaataaataagatcaatctgactaaactgcagagaaaatatcaggacaggaggctggggcagtggtcagaaactgtattgctcaaggtcatgagaagacaggtggactaggtaggagatatctggaaaaatttaagcataagggtgatcattctgacttctatttggcaaaaatgattgaggatggtcagagtggatccatggaaatcaaggtggacaatatctactatttcacttgaactcagggagataagattaccactttcataggcaaagagaatgaggcttagagagatgaagtaacatacttgaagtggcgaacttagtccagatcccttctctcctgagctcctccccttacagcttccttactcaaagtgtggtcctcggactagcaaaattattagaaatgcataatcctgagccccatgcaaaaccaaatgaatcaaaattttcactttaacatggcccttgggtgactcatatgcacattacacctggagaagcactggtttgtaacgcactgtccctgcaccagtgggcacagccttggccatcttcagctatcaagagagcaaaacccttttagaattctcaaaagtcctgatggtggttgagagagtataggttgccctgccacctactatgtgccaggctatgagccatgtgtgaagagaatattggaactaatgagacataattcctgccctccagttattcatagccaagtggagctcaaaaaggaaatgagagctaatgataaattctgagattcaattgttacagtattgttcccccaaggcccttcagaatttttctttcttttttttaaacaaagataaaattccaaaccatagggcagttggtcttcacgcctctctcacattaatttttatctatgtgtgaaatcagggaggaattaagcttccatttgtgctaagaaagatggatggggagccacggctggcaaattgaagccaaacagagccatcagttggcttaatcaggcaaagaagggaagcagagaagccgcaaacgatcagcagcttgggaggacagatggccagagccccccaccagggacagtgtcctccatttctcagctcctgagccacagggcaatagagctggctatgttttgagtgcccactctgtgccagggatggcatgaagctccccatgcccatcgtttcattgatttctcactactgtcctataaggagggtggacttatcaccattttacagtgggtaaacatgtgacttgtcttagatccacagcagatgactggcaaggtttcaacctagggctggcttatttcacagaacaatctctcctctaggacagaagggcagcctggagagagaaatgaacctagctttctgtctgtggtcctgaaagaagtatggagcttcttggcaatgtctttgctgtaggtcacaacacagtctggagcagagataagagttatccaccgttctctgctactgcaagccccattcagtcatactgtcattcaacaaacatttaatgggtacctgctatgtatcaagctttgagctgatattagagatacaaaaaggaaaaaatatttattctttcattcaacaaacattttataaagcaactactatatgccatatacctttctggattagcaggttatcataaataagacagacagtggagtagtgacttcgataagagatactggagtgaggcagcctgagcttgagtctcaactgctccacttattatgtgtatgtccttgaggaagtggcgtaatacctttgaacttcttttttcctcttttgcaaaattaatcgtggttattcagtaaatatttactgagcacattctacataccaggagctcttctggttgctggtagtgtgactgaaagcaaacaaacaaaaagtagtcctagcttttgtggaacctacaaaccccttagccatctgtgagatggttccaaataacctgtcccacttttgcttcctctcctatatctctgaaaatgaagggggaaccaagcgtcctgtgcttgggaaggaaatatttttcaagctcctttgatcctcataaaagatagaaatggctcccaagacttgaaaccctggtcatggtgtagggctttactcaatcgtggccctgggctattcttcacatcccttcctcctggactgactgccacgctctgtgagaagcatctgctacccaccatctctcctcagaaaattcaaaactggctgagtgctgtggctgatgcctctaatccttacattttgggaggccaaggcaggtggatcacgaggtcaggagttcgagaccagcctggccaagatggtgaaaccccatctctactaaaaatacaaaaattagctgggcgcggtggtgggcacctgtaatcccagctactcaggaggctgaggcaggagaatcacttgaacctgggaggcagaggttgcagtgagctgagatcgtgccattgcactctagcctgggtgacagagcaagagtttgtctcaaaaaaaaaaaaagaaagaagaaagaaagaaagaaagaaagaaagaaagaaagaaagaaagaaagaaagaaagaaagaaaaagaaaggaaagaaaattcaaaactgttctctcatatagtacgtgagaaaacaatttcctaagaaccaaatatctcctaagaattagagtaaaaataagaataccttctcgcttgagaactggaaagtgttctttccagtgcacaaatcactttttaatatttttcattagatttttatgataaaagtaatagatgattctggtaagaaatttttcaagaaatagtgaagtgtaagaaataggaacaaatcacttttatattcatggtctcaattgattcttgaaaatagcttattaaaataggtatggcacactattttctaacttgctttttttttcacttaaaaaatagtgagcatcttcctatatgctgaagtattctttgagaacatggtatttagtttctgaatgggtggagtgtatttacagttatgcatcacttaacaatggggatatgttctaggaaatgcatctttagatgatgtcatcattgcgtgaacatcatagagtgtatgtacacgagccttgatggtatagcctactacatacccaggctatatggtacagcctattgcttctccgctacaaacctgtacagcatgttactgtgctgaacacattgtaacacaaaggtatttgtttatctaaacatagaaaagatacaataaaaatataatattaaaatcttatgggaccactgccatatatacactctgttgtaaattgaaacactgttatgtggcacatgatgtatttcactaaacatctgtgagtggacattcatcttggtgttttttttatttttcattcctagaaacaagatagccatgaatatcctcattcctaactcttggtgcaaatctctaaatcttttcttattataattatccagaaccgcatttggcggatcaaagtgtttgagcacgttttctaggcttttcactaaattgccctcccgaaaggtcataacagtttgcattctaaccagtcatgatgaaagtgagcatttcccatcacccttaccatctccagattttattgctgctttttatcttggccgattaggtggatgaaagtagaatacagcttagatttgcatttcatttgttattagtgaggctgaatttttagtgcttactgagtactagaaatatatttcttcttttgtgaactgcctgtttatatccttcttgattgccattttgtaattaaaagtcagggcacagccagcaccacagaactgtcgttaaattgcagtcattccctaccatgaaatacacatgttgatggttccaattgtagggtgaaatctcctgtcaaacaggattccctcccaggagaagtcccttccaagctttctctccctgcccggtttcctcccgctccaggtctctgatgtttcatcctgggcaaggggcaggggtggggatcaggggagaatgaaacactcacttccttctctctctctctctctttctctctgtctctctcctctctctctccctctctgctctctcccattgcccacccacccctttctggatcagctccttgtggaggggcagtgcacaatgccaccatcggccgcgtcctctccccaagttaccctgaaaacacaaatgggagccaattctgcatctggacgattgaagctccagagggccagaagctgcacctgcactttgagaggctgttgctgcatgacaaggacaggtaaagctctgaaggtccacacccaaccccgtttcttcccagaatattagaacatggcttgaggacttggagtcttgaaatggctgaagctttgaccctcggaattcaagaaaagaagagctggggtggatggcaaagatcttagacaccatcagcttcaatctcttccttttacagataaggaaaccagggtatgcagaaggaaatggacctgccccagctcaatcagcaggctaggggaagaggcaaaaagggaactgccctattctttctcttgcacacccctttttgcagttgaacaaaaagagagtatgtattgatcatctgctcagtacccagccatatattaggctccatggagaacatgaaagaagtagaaaatattagtttctgacatgataggaaattgagatggaaaaactagacgtatgcacatgaaagaatgaaggagaagttaccaggcaatatctaagcaagagtgtgtctgtagactcttaataatatgcatagaatccagaatatgcatagaatccagaattataaaactttaatattctgcagtattattctagaatatttggggatcttattctagaaattatggaatcttattctagaatgttctgaaatattctggtatcttattctgggatattctggcgtcttattctagaatattatggggtcttgttctagaatattctggattattctgagatcttattctaagatagtctagaaaactaggactttagctgctttgacttgctgtcttgagttgggtttccttggaatcagacatggtgataaagatgtgagaggaagtagttcactggggagctgatcctagtaagcactaggaggcacatgggaaagtgagattgtgaataccagctgcgttaataagcgggtgactgctgggaaaaccgggattctgtccactggaaacctctgggcaatgtgttgagcatacctcagagtggtcctgttggaagggtgagggagctagggtacttatgcaccagctcccattcatcactggatgagagatgtgatgaggagcactaactatccccaacatcagctgccaccctttgagctggttgagttgactgattctcagagacttgtggtcagaagccagcagaaaatgtgggagcagttgactgctgaggggtaggagagggtagggcactggcagtgtttactgcacttccagaatgcccccaccttagaattttggagtccaagaaactttgatctaagaattctaatgttttggcttctttgatggatcaaacctagactatgaggtctttagtttggaaagacttaaaaaaaaaaaaaagacaactgaataattttcccatacctcttgagtccacttccctctaggcagttcagctttatccagaacaactctatatcgataaattgctgctgtaaagtgtaaggtatcaagcaggggctcccgaacgtggctttttagcagcaccagaataataacctggggaattctttaaaaatcagattccctatcctttcttctggagactctgaaaatctgggcatgggaacccttggtgaaggaccatttccaaatcttaaacctcagatctgcctcttctgaggggtgcttgagatgagccaggcttaagtttatactagacaacaagaattagcagagacaaaagaatgcatcaaaatgagtattttcttattttctgcaagttgtttaagtcctgacaaatgggccccccactggcactggtcactagtagtttctctggggtcctgcaaagatctgcatgagctgacacttaccaggaaaaaaccagctttcaagtgtatcagtaggaagagaagtttgtagagttcatcaaggttaaaggtcaacacacacacaaaaatgatgaagacactactctctgggccaagaagaaaagagaaatcaattatgtctgtcccatgtactttattgagggggaaatggctaaaataccacaatatgtcagttgcaagaactcagagctagataagactctacataagaaatgggactttgacctaaagtcaaaatggaaggagattggataatggatccaaaaatacagagggaggggtattccaagcatggagaattggaggatgagcacaaagatggaggggaaagaattagcaaatttgttggggggctgcagcagaagctctcatgagaacaggaggaaagagatctgggaagctagattggggttatatcctgaaggattttgaatgccaggctacttttataggcaatagagagcctataaaagtctttttagtcgaggagggacatgaataaagattttaagatgattttcctcaaaatgaaccctttctaaactccagtctcataatatgcccccaaaaaagtgagttctctggtcaaacatgtttgggagacactgcgcccaccctatccttgccttgaaaggtcgtaatatgtactagctaacaaaggcactgataagtcctgcagggaaaaaaaagtttaatttttatttaattcagcattttgcaaatccatttgaccatagactattaagaatttgagagaaaatgtattactattgcagacattctagaaaatatggttagaaaattgttggttttaaaagattaatagactacagagattttgagatcttgaagctttcctccagagcaaccctctttgccaaaggcttctgttctttgaaagaggtgtcccaacacacagcccctaagatataacagagtcatcaggaatcagaagactatgtagatgccccttcccactcctggaatgccccctggactctaccacagcccccatccttgcctcagccatactggacacatggcaaaataaacaaactgtggctgcaacatttatacatcttagtgacattagaaattcatctgggcagcataaaataaactatttttatgagtcagtaaaaacctcaaaggcttaaaaatgtgtgtttatgactccataaaagaagcttatctaatttgtatatggttttcttcaccatttttgcataatttctttaaaaaaccaaggctagcaagaagtcaacttcaaatagctttaataacaataaaaataaatacccaacattttgtttaacacattttatttttcagggcactttttattttgcaatattctcaaagcccacctgtaagatgggtcagaacgacgttatggttgggtctctcctttcacagttgaggacactgaggctgaaaggtgttttaagacttaatgtaaatccagatggggaattgagaaatgggaattatgactcttgacttcccacacagtgctcttagaaaatggggatcagagacagagcctggtgggagtcaaatgcttaataaacaaaacttacctaccgtgtcctgttaactattttttttttaagaccgagtcttgctctgtcacccaagctggagtgcagtggctcgatctcggctcactgcaatctctggcttccaggttcaagcaattctcctgcctcagcctccagagtagcagggactataggcacgcgccaccatatctgtctgatttttgtatttttagtagagacggggtttcaccatgttggccaggctactatctaactcctgacctcaggtgatccacccaccttggcctcccaaactgctgagattatagacttgagccaccatgccccacactctgatataggtgcaattgtacccattttacagatgagaaaacagaggctcagagaagtgaagtgttcttgtgcaaagtcacacagctgagaagtgacagagtcaggactcacacccaggtctgcctgactttacaaaagccaccatttaggcaatgagattagtccattatttccaacttctcagttaataataatagtcaacatcaattcattagttcgtcgtttggtttattacatcatatacattactctccctacaacctcagaataaatccataaggaagccaggacaggcatttagtcccattgtacagaagaggaaacaggttcgataaggtgatgcttgtctgagcacataagaggtaaagtcaggactgggcgtggtggctcacgcctgtaatcccagcactttgggaggccaaggcgggtggatcacctgaggtcaggagttcgagaccagcctggccaacatggtgaaaccccatctctactaaaagtacaaaaatgtgctgggcatggtgggacacacctgtaatctcagctactcgggaggctgaggcaggagaatcacttgaacctgggaggcggaggttgcagtgagccaagatcgcaccattgaactccaggctgggcaacaagagtgaaactctgtcaaaaaaaaagaggcagagttaggtttgggatccggtaatgaggctccagaggcagtcgtagcacatcccttcctctgccatgtcagtgacccaggaagatctgtcagtgtccctcctctctgctcccactgccaggatgacggttcacagcgggcagaccaacaagtcagctcttctctacgactcccttcaaaccgagagtgtcccttttgagggcctgctgagcgaaggcaacaccatccgcatcgagttcacgtccgaccaggcccgggcggcctccaccttcaacatccgatttgaaggtgagggtccctgggagcttccctttctcttgtggggctgggggtagcctgggagcagggaaagcatggggagatagaaatctgggctgcgaaggatgtgggaaatcccatggccatgtggatcctttggtttccaaagacaggctcttggtttcattaataataacaatgcctatcattaactgtgcacttactacgtgctcagtgccttctgtgcactgtctgattggatttcagcttctgcatcatgtttgatcctcatcacactgaaacattagaactgttattctatctgatttttggtgaggaaactgaggtttaagacacttgggtgaccggcccaagaccaccagtgaacaagggtggagttaagatttctgtccatcctgtgctggggagccctgaagctctgctccactccacctagtagacctcttagaatttagccacttcttcctccaagaagaatttagcaagagcctctcctgctgagaccctgactcttgaagaaggggttcgctgggcatttcatgtacgctgggggactttctgttctggctttgccaagaaaagctggcttttatcatagacagccctacagtttccagtggcaaaaagtcagggctctgaagttacgggccatgggaaggatccatataggatgtggaaaggcattaaaacacaacaactccacagggtggagaagacagagattcttactcctattttagatttttttaaatgaggtcccaaggagtcaactgggtggccccagggttctcaacacgtcagctggaaccaggacacgtaatttggtacctgttttctttggggcttttctaaacagcacaggggacccatcttctgaaatatagcaccgtggggtagtccctgcatcatctgaactgctgcctctctttcccttcctcagcgtttgagaaaggccactgctatgagccctacatccagaatgggaacttcactacatccgacccgacctataacattgggactatagtggagttcacctgcgaccccggccactccctggagcagggcccggccatcatcgaatgcatcaatgtgcgggacccatactggaatgacacagagcccctgtgcagaggtgagcggatccacaacgctcttcccacggcaccccagggatctccaccctttggatgagaagaccaaggccccagcttagaggcctgtccccagttttcataccaactttaggattagaaccctttccagggttcactgtcctttggttcagggttgctgctggtcttgagaaaattacaaaatgggtgaattttagaaggtgcaccttcttccaggcataggtcccacagtgcacagcttagtgagctgaatactgcatggatttcagctcctaaatactccctctgctacgcatgcttgtgcagtgcacaacccacgcaataacctcattaataagaacaataatagttcttaattggtgtgtaataattatgctaccagcactttgctaagagtgtgtgtgcattatctgatttcaacctcaccatagccttataaagtagattgtatcggccccatttgtaggtgagaaactaatgctgtgaagtgacctgcctaagaacacacaaggggaattggcagggacaggaatggaactcatgtctctttgttctcagagcactgtgctctgagccccactggacagtgttgtagaaccctcatctacacaggctgcagtggactgtcctgccagtttccccatattctttttgttgttgagacagagactcgctcggctcactgcagcctccgcttcccgggttcaagcgattctcctgtctcagcctcctgagtagctgggactacaggcgtgtgccaccacagccggctaattttgtatttttagtagaaacggggtttcaccatatcagccaggctggtctcgaactcctgacctcaagtgatccacccaccttggcctcccaaagtgctggcattacaggcatgagccatcgcacctggcccgtttccccatattcaaggctgctgagccaccctgagcctgggtctcctgctggcatgtggagtaatgaaaggtgccctcactcctggcagccaccgcctcaatggcagttggtgtgaaatcacagccttgccatggtgagggattgatccctatattaaatgtgccgatttaacagagcggaatttattggtgctttggcctctgccatgttgagacctttccaaagtggtaaacacagagtagaatttaaagggcacctgccgcagccacatctctgcttccagttcagggccgggacctgtcatagcaacattatctaaattatcgagcagctaccatgtgccagacactgtgcagcatgtttgacattcatgagcttaagcctcaaaataacccaatgaggttggcagtggtattgcccccattttgtagagaaagggagctgaggctctgggaaattacatacctcctcctacagcctgttagcagcagaggcaagattgggaccccgggaccacctaacttgagtgggcggtctcttagccactactcaccccgcaaaagagcagaggctgttgaggagtcattctgaccactgagctctgtccttggtcttgaaagagcaatagcacctcttagcccaacttttaccaaccctcaggtgcaaggtaggcagctggccagctctcatttaatcattacacacacacacacacacacacacacacacacgcacacacacacacgtgctggctgcccgaggtgaagacacctgtccacagtacacagagattcacggctgtctgacttcatagcccacatggttagccgctatgccacattgacttctttacaaataaagtccgtcttcttgcctgtctgtcttttacagccatgtgtggtggggagctctctgctgtggctggggtggtattgtccccaaactggcccgagccctacgtggaaggtgaagattgtatctggaagatccacgtgggagaagagaaacggatcttcttagatatccagttgtgagtgtttaaaatgggtggccctctaatttggcaaaatttgggagattgagaaagaaattgctcctgctttattctttcaaccaatattaactaagcatctactatgtgccgggactatgcagagaacaggcattcccatagtgagaccaagaacagcatcacaaatacacacacacacacacacacacacagagagagagagagaggagagagagagagagtccctatctttgggaaattcagcctaggaaacaaatatgaaatgaggacatacacaaataattgcatactctaacttcaatatgtgatgtaaggagaggttaatggtgctatgagattctttaactggaatttgatataaaaaggaaggtcagagaagtcttccccgaggatctgatactaaagctcagaactaaaagatgagttggagtgatgcatcccaaatgaacagaatgtgcaaaggccctgtggcaagcatctcattttcaaaggaccaaatggccagtgtggccagcaagaagggggcactgtaacacccatttactggactacagttgtttattttcctgtttgtctccctcaactagaccagaaggtcctctcctctggggctgggtctgactaccctctgtttccacagtctaacgcagagtctgatacacagtagatgctcaggaaatgattgctgaatgaaaaaaaatgtttttaatgaacggacttacttagctgtgcggctgggtttcctgtattcacagggggtaaccattagattctccatccagaatgttccccgctagctccccaagagggtgacacttgcagggaagcagctactctgggccagatgcaaaagtgactgctctaagcatttctatcttaggtaattctcacagagaaccccccctgggaggtcattaaccccactgtctgagaaggcagcagaggtgcagggaggccacccagaaagccagcgagcagcggggctgaaattcaggcttctgtggcttctcagtcatgctctttccactgccccatgtgagatgggggtgagaagtggacaaagacagacggtggtgcctggagaaagcagaatacagggttcctgacagacccaggtggcagacgggagggtggttgggggcggagagagtgctgaaacccagcagcctggggaagcagcactcacagttctctggctctacagaggaaccttgcaagagaaagagaaattattttcaaattattagtgaccggcttttgaggctgttccttagacacagcaagtgtccttagtctgggtgcggtggctcatgcctacaaccccaacacttcgggaggttgaggcaggaggattgcttgagaccaggagtttgagaccagtcccaacaacatagaggcatcctgtctcttcaaaaaaataaaaattagctggatgtggtggcacacgcctgtggtaccagctacttgggaggctgagatgggaggatctcttgagcctgggaaattgaggctgcagtgagccatgatcatgccactgcactccagcctgggtgacagagtaagaccttgtctcaaaaaaaaaagaagtgtccccagaggctgtcccagaacctccttctccagtggagtcagagacttacacagcttgaatagctgccccttgtggacttggggccaggccaatctaagaaagaattccacctccttcccatgtgactttgggctgggctcacctgttctcgcctctctctggacctcaatttttctctcctgtaatgggggtcttggaacatcagtgctttgtggctgctggaggcagattttacgcgttcctagcccattgcctcactcctcaataaagctcatcctcatctgggcacggtagctcacacctgtaatctcaacactttgggaggctgaggtaggagaatcacttggggccaggagttcgagaccagcctaggcaacatagtgagaccccatctttacaaacaattaaaaaaactagccaggcatggtggcacctgtagtcccagctacttgggaggctcaggtgggacaattacttgagccctggagttccaggctgcagtgagccatgattgcaccactacttcagcctgggcaacagagtaagactctgtctcaaaaaaaaataaaaattcaaattgaattaaatagacctcatcctcttccccccattcctttctctctgacttctagagtctggaataagatgcttattcattcattccaaccgaactgtttgagtgtctactatcaaccaagcacaattttatgtgctggaaaggttctaatggttgttccttcagtggtaaaattcatattggaaagaatggaatggattgtctctcttaactctagggaaaaaattattgtgtacctaccgtgtgccagcagtaggcttagcactgaagatacagttgtgagaaaaacagggcagtcctcaccctgcatgcctagcaggtgaggcaggtaagaaagtaaatgcagtgtgaaaggagcagtgacaggcaggtgagggcacctgagtgaaatcaggagggcttccaggaggaagtagcttctataatagcatgaaagagaaggtaggcaggtgacgaggggaaaagaagaatgtcctggccaggcatggtggctcaggcttgtaatcccagcactttgggaggctgaggtgggtggatcatttgaggtcaggagttcaagaccagcccagccaacatggtgaaacaccgcctctactaaaaatacaaaaattagccaggcgtggtggtgggtgcctgtaatctcagctatttgggaggctgaggcaagagaatcacctgaacccgggaggtggagattgcagtaagccaagatcatgcctctacacttaagcctgggtgacagagtgagactctgaaaaaagaaagaaagaaaagaaagagagagagagaaagaagaaggaaagaaagaaagaaagaaagagaaagaaagaagaaagaaagaaagaaagaaaaagaaagaaagaaaagaaagaaaggaagaaagaaggagggagggagggaggacaggacaggaaaggaagaagaatgtcctacctacatgatgagaacatctgcaaaacatctacaaagcctggaaatgaaagagtgtgacccacttaatgacataaagtttaatgtggctggagcaaagcatggcaggtgggtagagactacagagggaatggatcaaagggaagctctggggtcttcttagctgaagcttcacatagaaaactttattctaaggctgcatcctttaggaagccttctgtgtcgcccccttgtccttgtccataaaaataaatttatggttccagcttatgaattccttcccccagaagttaccaggaaaactacctgtcttcagccaagagaaggtacgacctactcctgagttcttggcttctctggcagaagatcccacccagccccaggccccatgaagtcatctataatcccctctcttctgcttggcttgcctcttctggcctcacagggagcctcccagatgggtggttttgcttaaataagacgggcccacatctccctttggtgccagaggtctagaggaggaaacaagaaaatgggaatctttactttcatcatctctaggcatcaaatattcaattaaccttcagcctgacaccagattgggttttatttctaccactaagcatgcatgcaatggagcagccgatccgggaacctcatgcaattaaagcttccccaaagccaagccactggcattagcatcaggaagggagcccttgcagcgggggcaggctttctctcttctgaacattttcacaatcgtagattgagcattgaccaggagagagggccctcagtttccttcctccctgccctgatactccatgccctcagcagccctggacccagcacctagcatctctgggcctcagattcctcctctgcaagatgatgggctaccttgaatcaagggtagttgcaaatccaaaatcatgaagggccaggcaacacaaataccggaattagagctgttgtgagattatatggaggggaggggtctgcgatgaattaggaagtacataccctatctaaaatcatttaaattcaatttccattttattttattttattttattttattttattttttgtgatagagtctcactgtcacccaggctggagtgcagtggtgccatctcagctcactgcaacctccgattcctgggttcaagcgattctcctgcctcagcctcatgagtagttgggattgcaggcgtgtgccaccacacccagctaatttttgtatttttaatagagatggggtttcaccatgttggccaggctagtctcaaactcttgacctcaagtgatctgcctgcctcagcctcccaaagtggtgggattacaggtgtgagccactgccccgggccataatttcaatttttaaaaatagcatcccctcctccaaaaaaaaaaaagtgcctactggctgaatccaaactgaggaccaccagtttgcaacccttgcaaatgattaaggtgattgagggtttaagctcccttctcattgcagcaatgaagaaattcatgtttttaagcacttactatttgtaaggtctttactaacattaatttttacttcatataagttaaaaataaattgtattatttgttctttggattaatcccatgaagtagttgcaactattacatttaattatatcctcttgcttcctcaccacttcacttggatgtctaagaggcatctcaaatgaaatgtattcaaagacaaactcctgattctccctccctatatctacttatagggagatatttatttatctatttatctattatacttattttacccccatctttctcatatgtgtaaggtatgatctattccatcagttgcttgggggaaagaatcaaacaacgacaaaacagaaaccttggcgttattctggcccagtggagtgctggctttcttaacaagttggcggcacagtgggccacaccctgatttgtagcatctgtcaatttccacggtgtaaatactcccaccatgacccattttaatataccaacataatgacaacaggctctccaaatgcctggaccattagctcttacaagcccgtatgagcctgcccccagcccagcacactcactgtgaactggacctttctctttctcccacaccctgtagccaaatcctcaggaaattccattgcttctactcaaaagtcaaagtcttcccagagtccaagcagttctgacacctccactgccacctgcagggtccacgccaccactgcgtcttcccagggttattgcaacggcctttgagatatccttgttcccacttctgccccctctttttaaccaacactcagtgatcctgttacaaccgaagtcatagcacccatgctctgctcaaagttctgcaatagctccctgttttatttggacttaaagccagtattcttacaaaaggccctatgggatctagctctggttacatctccagcatcgctttattcctctcttctcctttctgtatggtacatttgaccatattagccttcttgccattccacacgcatacctcagggcctttgcactgctgtctcccctgccattgggatgctctgccccaaatatctgcagagcttgctccccatctctccatcctctgactttgcttcacttccatagcccttgccaccacctaacacactacgcattgtggtgtatcttgaagtatttcaactcccacacctccacctggaatgtcacctccaggagaagagcaggagtttattttttgtcttattcactgccgtaaccctaatatatagaccagtgcatggcccatagtaggtgcttaataaataaaaggcaaggaagtaaatgtagcttgtcaggatcatacagacatgaggcttcaaagcgagaatttgaacccaaatttatgttcagctggctatgatgcacgtggagggaaaaaagagggtcagaaaaatatggaaagaccttctggggacatggcctccattttttagtaagtacaggtttattacatgacagggaacctggttgataagaaataacatttggctaaaaattatcaggtaaagtattaaataatagaagtaggaggtctccccaagagaatattttatagggttatagtttcaaaggatgtgtcatcatggaccttagaatcagaatatctagcgggagggggacttcaaggtcccccaatccagtgatgctgagatatgctggcagagttcagggccaagtgccgtggggcttggggagcctgtatcattctcccgggtgttctgagcactggacactaagccaagcagaaagtgatgacggaaccacagacaggctcagaatggggccaataagggggggcatcgccctccccaaggcagctgtcacgacttgcgttaggacaagcagccagtgtcatcccggggccttaggatttgcagtgacatcaaaatcaattcagtcccagttttaatcatcatggacatgtgaggactgtcatttttgtcactgagcaagtttaaatcgattccacatatatttattgagcatccactatgtagcaggcattgaggctgggccctggcagtgagcaagacagatgcagccccgcccccggggagccatgttgtaggctgatacagcaccagcaagaggaaatacagcactctgggggcccagagcgagggaaggtgagcctggctgagaatgtgagggagaagctttcctgagaacagtaaagtctaagtcagtttttctcaaccagggtctatcttgccccaggggacacttgccaatgtttggaggcatttctagttgggacaatgggagggtgcgggggagagcacccccagcatctagtggggacaggccagggatgctgctatgcatcctacaatgcacaggacagtccccaccacaaagaatgagctgacccaaaatatcaacggtgttgaagcagagaaaccctgatctatgctaagacctgaaagacagagagaagatgggcagagatggaggggaacagtgttccagccaaaaggaacagcatgtgctaaggtccagaggcaggaaagcacagctcccttcttaattgtccatgatatttaatatttgctgagcacttaggacatcccaagcagttacatcctagacatcttcacgacaagcacatgccttgggttctgttattatctccattttccagatgagtaaactgaggctcggggtggtgggagagtgcctgtgatcgcacagctagaagctggcggagcttggactttaaccccacttgccatgtctccaggaccctgtgtgtctggagttcaagggtgcgtccatgaagtaggacagcctggcggtgaatgcgactcagcagcgccttgaaggccacattagggagtctgggcttccccaaattgggcagcaggaaaagggtttaagcacttaaagagattaaagctttgcagaagggagctgagtcctctggtcaccagcccgaggctcacgccgacaagcttggcacacacttggcagagtggcatctggacttggcacctcctccctcccacagagggagtgaaaatagcatctcaacagccagggttacgtgaggcccaagagctgctgggtttaatttatcttgcttggttttccactgacagttttagtaaaccaatttgggtttgatagtaaaaataattccatcctccgggcccctcagccctcctaagtgtttgcaattgttatttttcacatcgacgatggggagggagtgtgcactgcagaccgagctgggtaggtggcccatagtaggcgcatgacttagctgtctgctgagtcatgaatgaggacgtaagccacatttcccaggcgagaggggatctctctccctcttcgtctactgggcagtctgttgataccgtggccatggcggttctaattagttaccatttattaaaaacctactatgtgctaggcaggccctgagctgcatcgtttaggtccgtgagcaataataaatgtgaacattattatgcagagataataattacataaatgagagctaatgtgggtagagataattacagaagggtaattacccaaattagagataatgtatgccaagcacattgcatggtatctggcacatagttggtgcttcataaatggagactactattatcaggaatcctcagataaggcagatattatcattaccactttatgggttgggtatgacagcacagagaggttacgtggtttcctcaggtcacacagctagtaaagacggagcacacaccgtagcctccacttccactgacttgaacagctttcggggcaccagctgtgtgtctcggcaatgtagcagcgacacgggaaggctcccaggcctgtagggactcaaagttcaggaagggacacatagccataaacagacagcctggcaaaatgtaagcaaagtcctgtggcttggagggtgagttgaggaggtagaggggaactagatttatctccgtgaattatggaaatatccctgagaaggtgacatccagaaggaatcttgaagagtgccagttgcccggagttaatgggagaaaagtgtcgtgagcaaaggattcaagcagtgatgacagtgaccattaggcatgaaatgaatgctctgaatcacagcatcaattacaaccatctgccccacattgttggtgttggaggaaagaaggaggttgcaccaacttgggatgagtcaggagccctcaggctaaaccttcttcacaccccaaatgcctccctaacccaccacgtatccctcccagctccatcagaaatctgcctcttcctctaaaaacacaactgaacagaaacttttaaaccctaagggccttttcatattgctctcctctcactctctctcattcattctctctccacaccccttccccaactctcaaaataaattacggaaaggagaataagggaactaacattggtgaaggcatcgtagaatagaagatccgagaggggccccaagtgggcaggtaacttagcaagtatcacacagcaagagaggaccagaaagacaacttgcttgtggccacaagagctcagcacgggggccacaaccttgaagatgccttgcagccaaggagacataaaagcgcctagagtcaaaaagaggtgcatgtaagtgcatcctgatgttcaccagctctgtggcctcaggcagattattgaaggtgctggtgcctgcacccacaatgggatattttgttcactttatccccagtgtctggcacaaagaaagtgcttgataaatatctgttgaatgaaagagacggtaaggctgggcacagtggctcatgcgtgtaatcccagcacttttggaagccaagatgggaggatcgcttgagcccaggagttcaagaccagcctgggcaacaaagcaagaccccgtctctacaaataatttaaaaattagccaggcatggtggcttgcagctgtggtcccagctacttgagaggctgaggtgggagaatcacctgagctcaggtgttgagaccagcttgggcaacatagtgagaccctgtttctaaaaagagagagacagagaaggtgggtgtgtaaattaattaaataatgtaaaaattaaaataacagataacataaggtttctgacacaagataggcagataaccatagctaacactacttttacccctactatatcccagactttatgctaaatactggcacacattatctcattgatgatgatgatgatgatgatgataaagaccaacagctgacattcattgagtacttacaatgtgccagtctttacatgctttttttacctatagtaactcatttcactctccaatgcaatatcagtaccctatgcaatatctacatcacgtcagtgtgactactcctttgtacagatgaagaaactgaggctgagagagatgaaactgcttgcccaaggtcacacaattaggatgtggccaagtcaggacttgaacccaggtctctaagaccaaagccagtttttaaccacacacacacacacacacacacacacacacacacacaaacacacacacacacacaaacggtagggaagtgctccacatgagagaaattccgagctccatcttacagaagaagaaactgaggctcaaagtgtttcctgctccccgtttcctggacatctactgcgaacatacatccatctctgcagggaaaaagtctcaatcaggctccagcgtgccttcctttgctcctctgcagagttcccaacattgctccctgtttatgagccccagcacagttctctaaccaggaaataaaagggcctaataacaaacccaggtaaccatatgattgatagctgcagaacagtcctcttcagctgctgccaacctgttctgtgctaagttaattccaagccctaaaaattaagtgccttgtccagaggcacttcagttcttcaaacagagatatagctgctttggactgtaagaattctacctgagagccaggaaaggaggagagagattcaggagttgaggacaacgttagccctgggagaatagatttccagatatcagcaaaaatcacaggagaaatggccacgacaaaaataaaactggctgaactcagatcttctggcccattagcaagaggagacaggatttccctggagccaaaagttcgaaggaattagagaaggagcagaaaatttcatagagcccaaattccattatgttgcaaatgaggaaactgaggcccagagatgggaagagattgccccaagaccactctatcagtcagctattgctgtataacaaaccaccccaaattcactggcataaaacagcaggcatgtatttctgttcacgagtctagagatcagcgttgtgcttctggtcttagctgggctcgcaggtgggtctatgggcagccactggccttcttcatgtatttggggatgggttggctgtcgtggtctaggtgggcatagactgggattgacatagacacgcatctctgctccatgtgcctctcatcctccaattgctagcttgggcttgttcccatggtgattggccagagtttcaagaaaggaagaagatgcattcaaggcctcttgagcccacactaggaagtggcacagccgcacgtctgccatatcctatggcaagctacaaagcaagggccaacccagaggtatggtgtggatacagagaggggccaagctttgggatcatttttgccctcaagctaccatgaccatagaagagtggagattagaactcaggtctcctggtcccagcccaaagctccaaatgatattactgtgtacaatgatcctatgagatctgagcatcattatccccattttacagacgaggaaaccgaggctcagagagctgaaggaacttgtgtaaaatctcacagctaggaagaataagagacaagatttgcacctagggcttggtgcctggcatatagaagactcagaaaatgtttctttccctacatgatgctttcagcatgtgggagacactctggaaagatcttgaattccttcagggacaggaaaaagccttcacctacagtaagaagtcttgggttctagtctcaattctttcactgagtggctgtgtgaccttggataaagtcaccccacttctctggacctcggtttctttcatctttcaaatgaaaataacaatggtacccatctcttcgagttctgagatgatgaaatcataccatgtgcagaagcacttggcaagggcttagtacattacacacactcaacaatttaattggcagctgtgatgacgattaatcccttccatggcccatggtcctgtgtacaaactgagctcctttgcacgatcacacacaccacacacacacacacacacacacacacattgatccctctgagcttgcagtttgagtgttacagtaggaatgaagagaatccatacacaggtcctacccaggtatcccacctgactgattagcttcctctcccccacgatttgcaggggattgtggtggtaacttggaaacacaagcaccagggttaggtcctccaccaacacatgcccatgttctgctccttggccacgccacgctcttctcgccttggtgactgcaagagcctacttgggaggggacctgctgtctgtctgagctggacattgccttgtcggtgcacccctacaagctcaaggcattcgaatgcaattagacctgacatcttagggagacacgactgcttgttttacgagtccctgacatgcgctgtcctcctgaacttactattcgacaagtgtttattgagcgcataccatgtggctagagttgcatccaattatcagaggtctggagatgacaatcatcactcacatggattactgtggtgccaaaatactcacgtgcccttacctttgtgccaagctctgttctgagcacgttacctcttagttaattctcaaagcaacctaggagagtcacacgatttgttctccatgtaatagatgaggacagtgatcctcctccgaggggtgaaatggcttgccacttagacccaggagtgccagcctcacacccctcatcacccctcaaccctgcttcacagagtagaatcgacttcatcctgaaggcagccagcctcccttgagagctgagcaggcaagcagtgtagtcagacctgctgtttagacagcacccctgggaggaaggcagaggtgggccgaggtggcaggaagccaggcaggaggcagaggggcagcagcattggcttggcatggtcctgtgatggccgaggcctggggaagcccctgcaaacccctctggggccttccggggagaagctgggacaagccctccaggtttcaaagttcgtttttcttggaggagttcccacgccaggcggggacggcccctgtgtggagtttcctgggggtgttctggccgctcggattggccacgccagggctttcgccaggggaggccttcgagaatatgtgcacgatgcggacgcagaatggcaggaagcggcgaccccagccactgccagcttctgctgggagaagctctgtcaactcttcctccagcaatgcagagccccggcccaccgccctctgcacacgtgcgtgtctgtgtgtgtgtggcagtatataccacacaccacacacacaccacacacgctatacacaccacacaccctcacacacaccacacacacacaccaccccacacataccacacacacatgacactacacacaccacacacacccccacacacacaccacacacatgccacacatgccacaccacatgacactacacacaccatacacacaccacatacacaccacacacacacacgcacaaaccacacatatgacactacacacaccacacaccatacacacacacccctcacacacaccacatgacactacacacaccacacacgccacacaccccacgacactacacacacacaccacacaccatacacacaccccacacacacaccacatgacacgacacatgccacacatgccacacacaccacatgacactaaacacacaccacacgcaccacatgacacaccacgcccacaccacatgacactacacacaccacacacacccacacacaccacacgcacatgcgccacacactacacaaacacacatactgccacatacacatccgacctcaccagctgatcaagcttccctcaaggtgagctctcgcaccctgacttagatgtcccggaatgtagaaggccctgggttccactccgtgttttataaacctggggaagcttacatccagaaaaaggaagcaatgtgggcagtgccacagaggaaattcatggaagggccacagatgccatctggggtcacccctaagtctggaaaactcaggcctcagcagcctatttctaaagccttgtattccccagatcaaccccttccttgctattgagtggggaaatggggaaagtgtgtgggtccaaccttctccacagagggaagcatgcagtggcttggtcatggccattgttaatggacttttttacaatttgtggattctgcgatttgcatctggggaaactgagacccgggttgggaagcctcttgtccagtcacaggtcagaaaggtggcagcataagtgccctttactgaggtctcgtcacaccaggatttgttgccacgccgcccttgcccctcagcagggtgcctagttccttataaatagtttttgtaatagaggaaaaatgctcttgtagtggaattcctggcattaattgttatttacagctgtcaacaatattatccccattttacaggtgggaacactgaggctcagagaggctaatctgcttcaaggtcctgcagctagaatttgaacctgttctcttaatgctgcctcttgtgctggaggtgaaacaccagggtagttaaggacagccgtctttgtaggcaaagcagccggggagctgttgggttttcctggtcatggtgctaggtgtaaaacgttatcggtgaccttgccagagcctcgcccactgccttcggaaatggctcagtccagagatgtggaaatgagaaactgcttgagctgcccgtggggcaggcccagggggacggcaggccgagagcaggaatctctttcctactctttttctctttgggaataagagggaaattgagaaaagggagaaaggaggaggagatggagaaaaggaagaaaagaagaaaggccatggaaactgggagcctctctgaagtcagggctgggtctcattcaggctgcaaactccaggtctgtggctctcagtcctggctgcccaggagaaccccctgggaatgggagttttaagtgacactaattcccagtctccacccccagggtttctgatggcctgatttgtctggagtacaacctgggatcaggagtttttaaacctccgcggggattctgaggtgcggccaggattgagaaccacggggcagtgggttcacagcctggagtggacaagcgttttggtgaatatttttggagagaaacagagaggaagagagggtggaaggaaaggaagagagaaggaacaaagaagagactaaggaaacaggctgggcacggtggctcaaacctgtaatcccagcactctgggaggccaaggcaggtggatcatctgaggtcaagagttcaagaccaacctggtcaacatggtgaaacccggtctctactaaaactgcaaaaattagctgggcttggtggtgggtgcctgtagttccagctactctggaggctaaggcaggagaatagcttgaacccaggaggcggaggttgcagtgagccaagatcatgccattgcactccagcctggatgacagagtgaaacaccatctttaaaaaaaaagaaaaagaaaactcatcatttttgtgtgttttaaggtgtcctattagggagccaaagatactggttttctgtgtcctccctggagctgacatggtttcttggcctgtctgccattttatcaaattaaattgaaagcaaatttaattgggtttcactgggccaaaggcccctcgacaattctgtgttgctgagaggtgcctggcaaggttgtgctgcatctgaaatgagcacagaggccttaggacctgggtctttggggctcagtttactcctctatgggattcataatgttttttctctgaccacctgactgtgtgggtgaggggatcagatgagaaaatagatacaaaacaactttaaacatgtcccttctaaggccttcaaaaaaaactataaatattttatcaaagttttattgcatacaacggaatttacaggttttgattcttgtttttcctttctttagatcctatgatttatttcatcactatctctactgttccataaagatcttgcctgaagggcaagatagtgttttcttaggaaagtcacttaattcctctgagcctcagtttcctcatctggaaaatggacataaatttgccgtcattccttcatttaagtgaactttatttcacctgtgccaagccctgggtgggctccagggattggggtgaagacatgtgccttcagggagccgacacaggcagatgaaggttgctggtctgttgctcaggctttgtcttccaacgacgtctgtttggattccggctctgctatataaccagctgcttgagcttaagcgtgtttcctcacctctgggcacctcagttggcttatctgtgaaatgggtgtgaagagtcgtacttacagggttagtccgaggataagatgaaatggtgcatgtaaagtgccttgaaaagccacttgaaaaccttagctagttattacatagctgtaaatgcagggtggacagagggatcctgaggaattagcaaggtgttttctagcagagaagagaggagagggctttccaggtagagagactagcatgagctaaggcatgaaagatggaggctttaagggtctaggagctgcaaggggcttggtgtactggatgtttgagacagcaagagatgggctgagacccagctgtggacttcctgggaggtcaggctgagaaactggactttagtctgtgggctaatttttgcggtttccacagtccaattctattaccagctacttctttttgtgttaccgtttttgttttcccgaaactgcgtgtaaattggcttgcctttttcacttggcttactccagccaaaataatgtccatgaaattagaagtttaatgtgcaaaccatatatttatatatttttctaatttgcatttaaagaaatgcataaacattagacatttcaaagtatgtttgcctacctaaaattgtcctgtgaatgaggctcgaaaaagccttttaaaggcaagatttctaagccaagggtcaaatgtttgtttagaaaggaataaggaaaagaaaggtggcttgctcatcatgtctttctatgccctctccggaatattgactctagctcaatagttaccaacctcacctaccacctgctccccacatccaggctcctgattggttggggtaaaaagggcacctgctggggaagtcagcccattccatgcttaggcatacactgccctctgcaggtgagcagcaggattacataaccagagatgggttcgctggtctgtgtcagattctaatttgcattctatcctcacctcttccactctctagaccccagtgaaagcaatgagggtcccttaggctgtttttatcctttttgaagaggtactacattcatacgattcaaaattcaaaagtacaaaaaggtctactgtgaaaattgagtttcccatccttccccagcaaacagccccctctctggctctcctccctagaggcaattactttcttatgtatcttacatatccttccccagatctttctaaatatttcaaaaaccataacagaaagcttttatctatcaaaattaagccacccagactaagtaactagattaacactgattttattgcaaactctgttatacctgatcgataataaccatgaacaaaacacaaagaacattcgttaccaagaaatgtaaaatgttagggagacaaaatctttttaaaacaagaagtctgggccaggcgtggtggctcaagcctgtatcccagaactttgggaggccaaggcaggtggatcacctgaggtcaggagtttgagaacagcccagccaacatggtgaaatgctgtctccactaaaaacacaaaaattagccaggcatggtggcacgtgcctgtaatcccagttacttgggaggctgaggcaggagaatggcttaaacccggggagggtggaggttgcaacgagctgagatcgtgccactgcactccagcccgggcaacagagcaagactgtgtctcaaaaaagaatttaatttaatttttaaaaaacgatgtctgtaatacaaaaatcacagctatataggaggaatagcttctagtgttctataacactgtagggtgacgatagttaacaataatttgttgttcattttcaaacagctggaagagaggattttcaatgttttttttttttttttttttgagacagggtctcgctctgttgcccaggctggagtgcagtggcgcgatctcggctcactgcaacctccttctctcaggttcaagcaattctcctacctcagcctcccgagtagctgggactacaagtgcatgccaccatgcccagcttatttttgtactttttgtagagatgggatttcaccatattggccaagctggtcttgaactcctgacctcaggttattcactcacctcggcctcccaaagtgctgggattaaaggtgtgagccactgcacccagtccagattttttttttttagacagcatctcactgtgtcacccatgctggagtacagtggtgcaatcaaagcttactgcagcctcaacctccagtgctcaagtgatcttcccacctcagcctcctgagtagctgggaccacaggcatgtgccaccgtgcccggctaatgtttttattttttatagagatgggggtttcactatattgcccaggcaggtcttgaactcctgaactcaagtgatcctccagccttggcctcccaaaatgctgggattacaagcatgaaccatcatgcccagctgttctgaatatttaatttgtgtttttttattcatgttttctgacacaagactcaatcggaacacacttcttgaaaacgtgtgtatgtggctttcatgggctgttgtataaaatggtggttcagatctcaagctttggcatcaaaagacgtaggtttgaatcttgaccttcctggttgagcctcagtttccttatctgtataatggagcaagtcttactttgtgaggttgtttgaatgcttgatacttggcggacagcactgttgttattcaaaagctaaatgtgggtcctgtgaaatgctttcccattcaaaagctatccaatgggaccagtgtttccactgccctgagaaagggaggatttaaagaagcagccagaagtggtaacactaaatggcatgtccacaaatggctgctcaggcccttgaaggggctgcagaatgtgcccagagcagggtcaaggtggggaaggagaggaggctagacaagctggacaagccagcgggttggctttggagtggcctctcaggcatgcagggtgtcaggtggcattggacttgactctagtgacctacatatccaagaaggatcaaggcatggccaacaagaagccctagaggcaggcggggcagaaatcccttgaggcagcctccctctgataccaaagttttcaacttaaccctggggagcatgctgaaagcagccagggcactggctgagaggagtccccttcccaaggttggagcagggaagagtccagtcggggttagggtcctaggtaggaattggggtcaaagccacagtctactctgtgcaagatctgagcccgaaacctggccctatgccctgagctggcactgattcacccgagacacacactcagcatggtgctgagcactagggatacagccagcagtgagtgagacatgggagggcctcagggagctcctgatctgcagcagatgagcatccccagaccaatggggccccaagtaatgactgagctccataaggagggtgagcacaagggctgcaggccagaccaggaggggatgctgggggctctgtgcaatagtgaatcatggaaggctgaaactaaggggtgggtaggagtttcccaggtggagaattcagagcacagggaagggaatgtgaaaagtcccagaggtcaccaagagcatcgtgctttggaaagactgatgagcaatgcagtctggttggaggtaaaacaatggcttggaagagagagagtcagaaatgaggcggcagggacggggcaggcggcaatgcaaaagatagacctatagagccttgagactagggttaaaagttggcactctatcctaagatgtttcttttttttaattgaggtgaaattcatacaacatacaattagtcattttaacatatacaatatatatatctacatatgtgatacatttacaatattgtgcaaccaacacttgtatctagtgccaaaacatttccatcaccccaaaaacaaattccataccgattaagcaattgttccgcattcttctcctcaccccctaacccttgataaccacccatctgccttctttctctgtggatttccctattctggatattccttataaatggagtgattcaacaggtggcttttcgtggctggcttctttcactgcatgtcatgtttccgaggttcacctgtgctgcggcgtgggccagtgctgcattcctttttatggctgaataataactccgctgcacaaatagaccgtattttgcttattcattgatctgttgagggagcagatctgatttaccttctggaaagattcatctggctgctaaggggaggagtatcagggccaggtgaggatgaagtcaggaaaccaccgaggtgctgtccaactgcccaagagaaaggtgatgatggtctgaggatagcctgcgacagtgaccaagaagaaagaggtggatgtagagggggagatgggagctgagatcttctgccaggagctcacactttgtgcctgtggaaagcctttcactctggcacctgagaagggccagagtgggcagggtctggtcttgggaagctttgtggtcctacaggatcctcccagaagggatcctgccactcccagtcacagtcagaccaagcctgcctgcctgccagcatctctccatctccccttcatcctggagtcaaactgccatcccgttttcctagcgcctccttggatcgtatctagctgacatctcaattcagacctcagcggaaaaccacactctgccctgtggctctccctgcagtgaactcaacacattttcatctcggttgcttacaaaggtccgattccagggatgctagatgcacttggtaaatacatggatgagcaagtgaaaatgtaagctcctctttgcattgaggggaaaaaactaaattgccaaactctgtgtacataattggaaccagtctgtcaaaaaagattcagaagaatgaggcagagagtaacttgattatttctcccagtgacccttcaggcacatcctatattatttttttcctctgggtgaaagctgcgttttcataggtcttctggtcacaataagtgcagtccagtctgaaaatcttataaccctaagtatcattcattttgaaacttcatccctccctcaactgtgctcctctggctgggaattttgcaaagggcatgggaggtaagggaataggagactctaacttggctacactgttatgttatagaatatatagaatgctgattttttttctgtctttaataggatattaaatgtgtgaaagtctcctgagcacagctgctcttaactttcccttttgctggggttctatcaccctttcagtaggaagccacttttaaggagacctatagttggcttctgcctgcaaggttcacaactagacccaggaaacatagatcatatccctactgtcatcagtgatgggatgctcactgtcaatatctgcttttattctccttgctctgaccagaggcaggcaggcatccccagtctgattttatcatttcttttggtgagcatcaaatccagctactgttatccaagccacaaaagaaagacacctgccaagtcaccaagagttcccttgaagccctcctcactaggcttaatgtgagggtgatacacattcgaccctccctcctatgatgccccacagtgaccactcccctcaaggcagtccttcctgccagcctcctcaatggccagtgccttcttttccttctcttatataagctagaggtgggaagaagggctcagactggaatagctgcatcgatgttagtagatgatgccattggtactctgtctaagccgtgcaatacttgccaccatgtgcccataatgacttcctactgcaaggcccttcccacttctccagcatttctctgatgccatgtggtcacatgggcaagccagaagttctagggactcaacacatccaggagcatccctcagtcaataaaggatggaaactggaggataaataccccagctccttctccctatggatgtgttctgcaccatctctaaaattcctgcaggactgaacccaaaatgcacagtgaaacctgctcatcaatcccctcttcgttgagtccttcccttcttcttgtctcatttccccaccagtgctgcctaggatggcctcccagacaagccagacttcaaaaggcatttgtatgtttgcttgatctctgcatctggagaatccaaatgcaatcaacagccaagtatctctctttggaaagtggaaatccactgcacctattgtcttgttcttagcttagggagacactgctaaaatttcagaacaacagaagaaattgcatttaatggtctgttgcacaccgtttacaatgtgcatttatataagtcatggtttctcgagtttagccctgttgacattttggactagatacttttttgggttgaggggctgtcttgtgcactgtagtatgtttaacagcatccctggcctccactcacccatggtacccacctagttaggaaaaatatgtttccagacattgccaaatgtcacctgtgaggaaaactgcccctagttgaaaaccactgacataaatcatctgatgtcatttggcataaacagaaatccaaagaaggatgatggtggtgatgatgatgatgacgatagtgatgatggtgatggtaacgatgatgatgccaaaaatgaaagtggaatataacaacataacattcaaatgacatcaccgagcttgcccaggtgctaatgctgaagctggaatttgaatccagaccttctgcctgcctcacctcatccccagagctcatgacatagacgaggaatattaaggctgattcacagacaagaaatttcagaaaaatcacatgccttccatgaaagtgacaaagctgagaatcaaaccaaagctttctgatttccaagccagtgtgctcttccctgcacattgctccatcctattttatggagaacaaagagttgccgtatggttttaaaatgaaagctattttcacccttgaagatgctgctactgcgttttggccatttaagtgaaagaataaagccaagatgtgcattgtctgtaaactactgttaccagcggatcagctgtgaagtcggcttaaggaatatatctgccatctaccatgtttcacactagtctaatccggcactttcatgaacaattgatgttttcatggtacgtagagctaaagaggccctcccctactacaggtccaaagctgacatcagtcccactatttttgctgtcaagtagactctctgggaggctctttcataccttagcatttattgagcacctactgtgtgcaagaacaagtggcaactccagaatttcaatacagcaggggtttaggggcttcaatctggttaaaaactgtcaggggggtaggaggagtctggggattttgtcttgaagacatgtgtgcaaagcaagcaggtagcttttatttgaagatgttttgggagtagcataggggaaactggtgaaaattatggcggcaatcaaaatcttcctaagccaccccttggagcaactttacatgaggaactacgagaggtatggtggaaggtattggggtgaataaaatacaatccctgccctcccagaagcaaactttcaatacctttctttgtgtttctgttgttttgttctgaccacctgaaacaccaacatgggtagttgccacctcacctcccaactcccggactagcagcaaacaccactgttggccattggatgaagctatcagcagggagggccactgtcagtctgcatcagtttcaggaactctgctcagggccatttcccagaacacctctcctctggcattgaattgctcagtcatacagttcccgtataaaacccttcagtgtctccccgtctcctgcaagatgatgtccaaaagttgaagcttggctctttaagcccttcatgatctaatccctgcagaactctgcaggcttctatgcctatccccataccccaggcacactgaccactggaaaaattctttcaggaaccatggtcttactcctttcttccctctgccttctccccatcattcattgttttcttttgttttgttttgttttgtgagatgagttcttgctctattgcccaggctggagtacagtggcacaatcatagctcactgtagcctcaaacttctgggctcaagcaatcctcctgcctcagcctcctgagaagctaggactacagaggtgcaccaccacaccaaaaaaaaaaaattttttttgagacagggtctcgcttctttgcccaggctggagtgcagtggcacaatctcagctcacttcaacctccacctcccaggttcaagcaattctcctgcctcagcctcccgagtagctggaactacaggcatctgccaccacgcccagctaatttctttttttagtagagacggggtttcaccatgttggccagaatggtttcgatttcttgacctcgtgatcctcctgcctcggcctcccaaagtgctgggattataggcgtgagccaccacgcccggactttttttttttctttttttttttttttttgtagagacagggtctctctttgttgcccagaatggtcttgaactcctggcctcaagcaatcctcccacctcagcctccaaaagtgctgggattacaggtgtaagccactgcacctggactccctactctgtgtttatctgcctcgaggtctcctactctttcttgaggtttcagagcaagaagcatcacctactgcaggaatgcttccatgatgcccctaatctgagtttgtccttactttctctgtccttactttggttataactcctgccacaatccctggcttacaaatctaaatagatcactactctgtgacccttctgagctcagcacagtgcctggctcatagtagatgctcaaaaaaacaaacaaaaaagaacattaaggagaaggagacaagaaaaggagaaagacatgagagagaaagaagacagagagagggaaagaagaaaggaaagaaagaaatgtgagtttgtatctgtccatgattgatgaagccaaaggtgaattatctggcattctttcaattagagatcaattttatctagcatgtctgagatggcacatgtttctgtggtatagtgaagtgatttctggattattaactatccactgtggtttaattatttagtgtcaaggtactttcttgcattggagtctttgaaaatgtgtcatcctttaacagtatgaatggtgacaggtttgagcatatctcataagtaaggtgcctccatcccacctctgccctaccccttaaacataatggatcattcagttgactctgaggaatttgccccgtgataaatggaaagatcatttcaccttatataaaaatgcaagttgtaattagcaagctgtcagcatgttctgcactgaagaagaatgaaagatgcaggtcatagccccagcctgtagcctggtgcctaacacagagatgtcacctaagaaatggttgccaataatgggagttttgaaggtgattcttcttacaatgcagcatttgactttgcaatgagtcccatgcagccaagaccattgcatcaatgtgtcttcaaaaacccaactgacggccgggcacagtgactcacgcctgtaatcctagcacattgggaggccgaggtgggcagattgcctgagctcaggatttggagaccagcctgggcaacacggtgaaaccccatctctactaaatacaaaaaaaattagccagacatagcagcatgcacctgtagtcccagctactcgggaggctgagacaggagaattgcttgaacctggaaggcagagattgcagcgagctgagagtgccactgcactctagcctgggtgacagagtgagactctgtctcaaaaaaaaaatgacttacaaatctttgtgtcacatttgcagtctatgtcaatcttaccctcagcttggggttaagacacatagcctggagcctgacacatacacacttaacaaattttgtattgcctgaaaaagttaatcaagggtttattgaatgcccattctctatttcacatgactctccctcttctctgccctccaagcctgaatctgagcaacagtgacatcttgaccatctacgatggcgacgaggtcatgccccacatcttggggcagtaccttgggaacagtggcccccagaaactgtactcctccacgccagacttaaccatccagttccattcggaccctgctggcctcatctttggaaagggccagggatttatcatgaactacataggtaggtgtctcatctggtcaatttattttttctttgtgtttagatacaggttaaggtggtttcctctaggttatttggcagttttgtactacagcgatttttcattgtattgtattgaaatgtactcatttcatttttaaaagcctgggctctctagtcatgaggaccagggtttgagccctagcacggtcatcgatgtctgtgtggctttgggaaagttactgaacctctctgagccttctttttgtcatctgtaagatgggcatagtgatacctattccacaaggttgatatcaggatgtagtagacaatgcctcataacttatgtttcatgtgtggtcagctgagaacctgttgtccccatgtttcatttgtggtcagctgagatcttacatcaacatacttcctaatttcttcccaatttgtgcaacttctcaaacatcgtcttcaccttcttgcccgaactgaagctcagctctcctctaaggcctcttcttttcctgtagcctcgttgaacaaggacagccttcctttcgcacttcttgtactttaggagctatagatgcaaaagatgtctttcctcatcctcaatgtggcctccaaaccatgtctctcctgctcctcctaaaacaaacaaaacaaaaaaaaaacctgctatcaaattcaagctaagctcacacactcctatgacccctcgtgtgctttcatccaatcacactcttcccttctcattccccaccctgtaactctccctcattcattactagctctacgacccaccccttttcaacctttaaaccctggagggtcccaggctccatcctggactgtatcctctcttccagctagactcacgccctccatgccttcattagttcccatggatttaaacagtaccaatatccgttgaccggttcatacttacaaccttgaccttaaactccaaatccatctatccaactccctgccaactcctcccttgcctccatccagtagacatctcagatttaacatggccaaacagaatgatttcttttcctacccaccaccaccactacccaacagcatcccctgctatctgccaatcctaggaaatgagacaacaactctcctggtttctcaggctgcttcctccttccttgcccccatatccaatccatcctctcaactccacttttcaatatgtctcaaatccaaacacatgtccccgtctttctacggccaccactctagtccgaactaccaacattcccagatgtcagaggactgggacaccatgaagtcccactgattccagtcccagaagagacttgcactaacagaggaactggtccagccctgtcgtgttccagcagaagaaaccctggacaagcaaggatgaagggttgctcatcggggcagagccgagctccaatccatgcttcctcatccctagctccaaagcttcctccacccccaatattttgggcagcagcggagaacctgggagacacagagggtaattaagacctaacatcctttgacatctagaagaatgggtgagtggttgcaccccaagaatttcaatgggcaggattcggccagtgattaggaaacgtgcttgcacttcccaggaattagactggcatcttgatttccaggatggagcagagaaaaggagaattcatcctacccagccctctgccaccaccactaccacaaaagaccctgtggttggagcaagattccatgtctttggttctttctccccgttcacttaaagaattgtccatctcggccgggcgcagtggctcatgcctgtaatcctagcactttgggaggctgaggcgggcagattacgaggtcaggagatcgagaccatcctggctaacacagtgaaaccccgtctctactaaaaatacaaaaaaaaaaacattagctgggtgtggtggcaggcacctgtagtcccagctactcgggaggctgaggcaggagaattgcttgagcccaggaagcagaggttgcagtgagccaagattgcgccactgactccagcctgggtgatagagcgagactccgtctcaaagaaaaaagaaaaaagaaaagaattgtccatctctaactaggttggtgcagaagtaattatgatttttggagttttaatttgcaaaaactgcaattacttctgcgccaacctaataatatgaattgtcctctctgtaccagcacttgcacctaaaaacaagctacccccttgaccatgggctgtttcaagaagcctcatgcgtgccaaagtacattcctggcatttttatttccagatggtgaacatttttcatccctgcctgctacatgtccacctctcagagaggctaacacgagtattgatcttcttttttatgtttcccaggggccttttacctttgattgtgctgctaaatattttcagagtgttattgctacaatttcttgtgggttccccgctcttttctgggcagtgccctgggcttcaggggataactcatgttggctgtccaggcaatgtaccctccagactcagctgcctttggaggaagtctctggtctcctggctcctgtctctctccttagacgtcctctccctctccactgaaagatgaggtcatggtttttgctcatttatctcccctagcgcccaagtcagtattccaaacctgcattcagcttgatggccaaaaaaaaaaaaaaaaaactgactgactctatccaaggctggtcaaggttaaccagaaagtctggccagtgttcagtttggcaatatcttgaagaagaagtgtttttgttcattgaagttgaaactttttgtgatttgtgtgacaacttacagttggcaagcactttaacatatattattttatttcacatcttcaaatgcattatctccatttccagaggatttggttcataaaaaatcccttgacacctcctatatgctaggctctgcacaccaggatatagagatgaatagaatattctccctacccttaagacattagtggaaatgcgaaaggcagtcccattaatagacaataccaggatcacaagctgatgctgtgggagaggcagaaaaaggattgcagagaatgtttttcagggatacacagcttggctagtttgggtaacaaaaaagagagaacagttcctgattgttattcctgttaaagaaacacacagttaatttcacaagaatggcaaatagaccgttctagctaattgcgataccactcagttgcttactacttatgttgaagaccatgttgaaaagaactccaaggaggtcatgcctaaagtctatggcaaagaatgccatgattgattagtgatgcctgccatgggcatgagaagggtatttgttattctggctctagattttaccatacatgggagttacacagatgtaactcccattcaatggatgcatcagatagtaggtcaggggttcctgtggtcactagggaattctgaagatcctatattgacctaaatgcctaagcccagctctggaaggtggccaaagtttatctgctatgattgcaattagagccttccacaggaagactctgggcctacgtggttctagaatgtgaattctactcccagaattcacctttgaacagagagatgcaaagacccattcactgtttcctgttctttgcccactgtctatggccaaaggcatgggatggaagggaataagaaacagagataagtaagcagtgctttttgagaagacgttggttatttgtcgtgtgtttattcctccaagtctaggataataactaagctccatattgtaagtcaactccaatcaaatgacagtggctccctggagtgctgttttgaggactgggaggtttcctcttgattcaaacaaatagatggctgtgcttgattagagatgtctgccatgagcatgaaatggtagatggtggtgtgcattcagtgcatttgtgcatttcttttgtgcaaaaattgaaccttggtgctaatcttgtccatgagaccgaaaccatgacttcagatccctacatttctagagtctaataagatgctcataatatctcagtcaaacaaacaaacgaatccatctaactcatcttagtgttcacacaacatcgtcatatcctgcatgttatttaactttcacattgccttttggaatagacaatgtaataattcttgactccactctgcaaatgagaacaatgaggcttagagcagttaattggcatgactggaatcacaccatttatttaaaaaagaaagaagagtagaaaagaagtcttccaactcctaggacagttttctaattcttagtaaagttaacaagggcccatgggaacagaccattccagagcctccacttagggtgcttggtaaaaaaatacatgttcctgagtcagggtttctggggtacaagccctggaatctgaagaacaggaaggttatagggtggttttctaattattagcaaagttaacaagggcccatggggacggaccattctagaaacctctacttagggtgcttggtaaaaatgcatgttcctgaatcagggtccctggggtacaggccctgggatctgaagaacaggaaggttaagtgacttagccaaggccacccagttagtaaacagtggggacaagatttaagccaagcttctacatcgtggcagcaactgagaaattacaaatgcagtgggtgccaccaaggagacaggaggtcccacgggagcgtgcagccatggtggcccatattgaagtcagacaagcaaacctttctccgtctcaaagcatttggctcaaggcagaccacatttctggtgtctgctcccatttctcccctttcatccatagtctgagcatctgcagctgtgtcccaaatccagggcttggctgatttttcagaggcctaaaaatagaggctcctgtccccccaccaagcaattctcgaagctatttttttacccttcttcttgcagacacccatgagatctcctttccccaaataaaatcatgatgaaatcccgggaaaagccattgcttagttctcagaatgactttcctgcagacagcggaggtgctctcctttccccagaagcacataagaactgcaaattaattatacaacataattagcttgctcctccaaatctgtgcagtgggcactttgaagcaagaatagtaatagtttgccatgcattgctaccttagtaacaagagtttgtaggagaaaaacagaacaattacagagaaagacacagtaataagctgtgggtagcattttctggagtatggttcattttcactaatgatatgcaattggatttgaagaatataccaacagtttatttttatttatttctgttcaaattgttttttttttcttttcttttgagacagggtctctctctgtcaccgagcctggagtgcagtgaagccttcatggctcgctgcagtctcgaactcccagactcaagcaatcctcccacctcagcctcctgagcagctgggactacaaacacgtgccatcatacctggctcatttttttggttttattattgtttttgtagagatggggaggtctccctacattgtccaagctgatctccaactcctgggctcaagcaatcctcctaccttggcttcccaaagtgctgagattataggcatgagccactgtgcccaccttctttttattttgatagctaattatttctcttaatgcatattaaaaatgcatatattacttattcaccaaactcatggatttacagatattcttaggatgaagctgagcatattagtcacctattgctgtgtcatagattataccccaaattagcagtaaacatttatcatcttgcagtttctctgggttaaaaattcaggagcagcatgagttggatggctttgtcttggggtctctcatgaggctctggtcaggatgccagccagagctgcagtcacctgaaggcttgataagcactggatgatgaacttccaaatggctcacacatgtggctggcaagtcaatgccaactgttgacaggaggcctcagtttctcttcccatgggtctctctggagggctgcttgagcatcctcacaatatggcagctgcttcctctgaagcaagtgattcaatagagagcaagaagagaaactcaatgttgttatgacctaacctcggaagccacccagggccacttttgcaacctcctattcagtgttggtagggactacacaagagtgtaaattctgctgggcacagtggctcatgcctgcaatctcaacactttgggaggcccaggcggtaggattgcttgagcctaagacttcaagactggcccaggcaacatacaagagctcatctctacagaaaaaaaaaaaaaattagccaggccatggtggtacatgactgtggtcccagctacttgagaggctgaagtgggaggatcacttgagcccaggagtttgaggctgtggagagctatgatcatactcttgcactccagcctgagcaacagagaccctgcctgtaaaaataatgatgatgatgatgatgatgatgatgataagaataataataataaatgaaaagcaaaagtaaaataaaaaacaaaaatacaaaaatttttaaaagagtgtaaaccctcggaggtgagagtcatccagtgacatctggtaagcagcggccacagtgagacaggtgccgttgtaattattccctcatgaaaggtcaaggaacctgagctgcagagtcaaaaagtgattgtccccccgtcacaccgttaataagtggcagagataggattctgtctgactcgaaatcctaaactggttttatcaaaccaagagaatgttcagtgagttcaggggcccacagagagaggtaaccataaagcttcactatagacgagctcttgccagttaagcgattttggaagcgtgttgctcatttctagaggcttttttttctcttcgctcatccctctagccgtcataaaaggaggccccgacaacaagactgcttcccccatctaagactgacgtttctcttttaaagaggtatcaaggaatgactcctgctcggatttacccgagatccagaatggctggaaaaccacttctcacacggagttggtgcggggagccagaatcacctaccagtgtgaccccggctatgacatcgtggggagtgacaccctcacctgccagtgggacctcagctggagcagcgaccccccattttgtgagaaaagtaagagtggtcttgtttccttcctctaggtccctgggtggcaaatcccttctagggatctttttttggtgggtgcagtggagctgtttaatgtagaatctggactccccctccaccaccaattcacgagcattgctcacaaatgtcattttatagctgtcagtggaattacagactcaggtgccttcagaaacctggaccataatgtaaacgagtgagataagctgggtgtgagacattagggagtggtgtgaactccagtgaatgggagcgtatgtagcctggtgaaaaagaacatttggctgggtgtagtggctcatgcctgtaatcctagtgctttgggaggctgaggtgggaggatcacttgagcccatgagtttgatagcagcctgggcaatacagtgagaccctatctctaaaaaataataataagcataaaaattagctgggtgtggtgggacacacctgtagtcctagctactcaggaggctgagacagaaggattgctggaacgcaggtgtttgagctatgattatgcctctgccctttagcctgggtgacagagcaaaaccctgttgagaggggtggctgggagagagagaaggaaggaaggaaggaaggaaggaaggaaggaaggaaggaaggaagggaggaaagaaagaaagaaagaaagagaaagaaagaaagaaagaaagagaaaaagaaagaaagaaagaaagaaagaaagaaagaaaaagaaagaaagaaagaaagaaagaaagaaagaaagaaagaaagaaagaaagaaagaaggcaagggagggaagggagggaagggagggaagggaagaagggaggaagggagggggagggaaggggagggaaggggagggaaggggagggaaggggagggaaggggagagaagagagggaaggggggagggaaggggagagaagggagggaggggagggtgagggaaggggagtgaaggggagggaggggagggaaggaatgaaagaggggagggagggaaggaaggaagggagggagggaaggaaaaagagagaagggagaggagaggagaggaagggagggaaaaatcattattatttaaccattttaagggattggaatgaacatgaactagttccctatagaagtcttcttacctgcctcattttttgccaagaaaaggcccaaagtgggcaaataaatttgaattgggccccttctatgtgggactgtttgcatttccatgctgggtctctcacttatcctccatccaagacagtggagacccaccaatcacctctgttgttctctcttctgatgaaatgaggtcagaaaaaccccttggcacaatggtctccccatagaagtcactggatttcattaacctttcattggttaatctcctgtcttgacattgaaagacatatatagccatatcttaaaattacattggtaacgatgcttacttatagtacccaggcagtagtaaaatgatagaatagaaagtgaaaatctttgatgatgttactctttggaaacaacgctgctgttaaacatttattctatattgcttcaattgtgtgtgtgtgtacatgcacatcatacatacattacatgtcacacatagacatctatatatgtgtcatctgtcatatgtcaatcatagctcactgcaacctcaaggttttgggctcaagcagtcctcccaccacagccccccaaaatgctggggttacagatgtgaacaaccacacccagctaatttttaaaaattttttgtagagacaggggtcttgctatgttgcccaggctggtctcaaactcctggcctcagcctcccagagagctgggattacaggcatgagccaccgcacccagcagatccattcttacaaacttcctgcatctgcttttttttcagctcagaaatgtggatatcttttcatatcatacatgttgtccagtttattctcttttaattggtttattgttttccttttatctatattgattttttaatgtgaaaagtaatgaaagtttattttactacattccagcactacagagaaagcagtgaaggctccccctcactttgttctctttagcagttgctcagaatttcatgggatggctattccatgatatttaactctttccctgttaaactatttgcaatgtttcctttttaaaaaaatcgcaaataataatgcaatatgcaaccttatacataggtctttggaccctgatgcaaattatttgggcaaattcatatatatgtgtgtgtgtgtgtatatatatatatacacatatatatatatatatatttatatgtatttttttgaggcaaggtctcactctgttgcccaggctggagtgcagtggtgccataatggctcactgcagccttgacctgccaggcttaagcgatcctctcacctcagcctcctgagtagctggaaaaacaggtgtaccccaccatgccccattaatttttgtattttttgtagggaccggatcttgctgtgttgcccaggctggtctcaaactcctgagctcaagcgattcatccacctctgtcttccctttcaagtcctaggattacaggcatgagctaccgtgccccacctctttgggcaaattcttaaaagaggaattaaattcaaggctattttctcctggcctattctccagccacctatcaacaaaagatacattatcttccaaaaaggaaaagaactgagttaggaaactttttttttttttttttttgagatggagtctcgctctgtcgcccaggctggagtgcagtggtgcgatctcggctcacttcaagctccgcttcccgggttcacgccattctcctgcttcagcctcccgagtagctgggagtacaggcgcccaccaccaggccaggctaattttttgtgtttttagtagagacggggtttcaccatgttagccaggatggtctcgatctcctgacctcgtgatccacccgcctcggcctcccaaattgctgggactacaggcgtgagccaccgcacccggccaagttaggaaactttctagatcattctgtaattctcagcaaacccatggtcatccagaggtctgacgtcctcttggtctggtttcatcccgtgtagttatgtactgcaccgaccccggagaggtggatcactcgacccgcttaatttcggatcctgtgctgctggtggggaccaccatccaatacacctgcaaccccggttttgtgcttgaagggagttctcttctgacctgctacagccgtgaaacagggactcccatctggacgtctcgcctgccccactgcgtttgtgagtcctgtttaatgaattgggcccccagtaggtagaagcagattcactttctcttgttcatgatggaaggctgggctgctaggaggccttctgcttttcgacaggggcttttattatcattactatgacaaaacagtacctaacactgattgggagcacacatactataacatttacagtaaatttatcacgcgttgctctaagtcttctaccaaatttcactctttcttcctcaagtagccctgggagcatagtatactttgtttttttgtttgtttgtttgtttgtttgtttgtttgttggttggttggttggttttagatggaattccactatgtcacccaggctggagtgcagtggcaccatcttggctcactgcaatctccgcctcctgggttcaagcgattctcatgcctcagcctcccgagtagctgggattacaggcgcgtgccaccatgcctggctaatttttatatttttagtaaagatggggtttcaccatgttggccaggctggtcttgaactcttgatctcaaatgatccacccgcctcggcctcccaaagtgctgggattacaggcatgagccaccaccctggcttcactgatttcattttaagaagaggatactgtgctaggtgtggtggctcacacctgtaatcccagcactgtgggaggtcaaggcaggcaaaccactcgagcccaagagtttgagaccagtctgggcaacatggcgaaaccctgtctctaccaaaaaaatacagaaattagccaggcatggtggtgtacacctattatcccagctgctcaggaggctgaggtgggaggattgcttgagcccaagaggtcaaggctgcagtgagctgtgattatgtcactgtaccctagcttgggtggcacagcgagaccctgcctcaaaaaaaaaaaaaaaagaatactacttcaaggctctctagggattctgatatacaaacaatgttcacagtcattgcataaggaaagcatgaagttacacggaaggagcagagccttacacagtattttgggggttagaaactctcagctgcactaatattttaaattagtgtgttatgaacaactccattaggaatacagccagttcaaactccagaagccacagtgaggtcttgatagtgttgaagaaccaagaatttaactctggggggaaaaaaagaaaagaaaaaatagaattcctgtgagttgattataaattcccctacatctgatgtgagtaacactgtgtacaatttatagacttggccacctcctatagtggctatgttttgtgacttctcacaagtacctaaaacaggcttcacaaattttgatgaccacactaacaagcaactctacgatttagacgagcaaactgcagaaaggcaaccagaaagcaggaaagtccttgtccgttttcattggataggctgatacttactgagcacttactgtaggccaggtgtcattctaagaatggcgcatgcattaactctttgattcctggcaggaaaacaaaaatggagatgtctgttgcctgtcgttgaagacagagtatggccaaattcacactcacaagagaccttcctctctgctctattcatgagccagccaaagccaagttcccgtgtgctagttcataaattcagcttccccagcccacagaagggctttactctacagatcccaaaagaatgaagagttttaggcccaaagcgcttgcttcatagatttcccttaacatctgatccttttcttgtgagagaaaaatttccatttctgtgttcttattttctcttctcaaaaagggacactttattattctgtttccacaagtaacagggattcttggaccacacagccctgtgtctccatctgtctttttagtcagagtcccagaatttcagagctgaagggaatctgagagataaaatacaactgcaggatgacttagagataaaatgcaactgcccccattgtacagataataacaatagttacttattgaatgtaaaagacacattgctaagcacactatacatatctgtaaacatgtgtttttgtgtatgtgtgtgtatatatagtgtgtgtacatatgtgcatatatatgcatatacacatatactaaggaaactgatattcagagggaagtacaaataacaagaatcattgctcattgaatgtgtaagacacatttctagacactatatatatgtgaatctatgcatatgtgtgtatttatacacacatactaaacctagccccttaaccacaaccacacttggtccccaagccccagaaccttgggccaaatccacattggttggttcctgttataggttgaatctatccccaaaagatatgttaaagtcctaacccacagtatctgtaactgcgaccttgattggacatagcgtcttcgccatcctaacccatggtatctgtaattgtgaccttgattagaacttcaaagttctaacccacagtatctgtaactgtgaccttgattggacctagcgtctttgacatcctaacccatggtatctgtaattgtgatcttgattagaacttcaaagttctaacccacagtatctgtaaccgtgaccttgattggacacagtgtcttcaacatcctaacccatggtatctgtaactgtgaccttgattagaacttcaaagttctaacccacagtatctgtaaccatgaccttgattggacacagtgtcttcgacatcctaacccacagtatctgtaactgtgaccttgattggacagagtgtcttcgacatcctaacccatggtatctgtaactgtgaccttgattggacgtagcgtctttgacatcctaacccatggtatctgtaactgtgaccttgattagaacttcaaagttctaacccacagtatctgtaactgtggatttgattggaaatagaatctttgcagatgtggtcaagttaagctgaggtcgcactggattaagatgggtgttgatccaatgactggtgtctttgtaagaagagggaaatctggacacagatggggacacagatacagagaaggccacagggtgacagagggagagattagagtgatgcagctgcaagccagggagcacgaaggaaggaccccccccaaccgcccacagcattcagagggagtgtggccctgctgacaccttgattttggacttccagcctcccagccaagaagtttctgctgtcctaagcctcccggtttgtggtcctttgtcaagggcagccctaggacgtcagtgtcattcccatttccttctagtgactgcaagagcgatcagaagcagccactttagtaactccagctgcagagacccagagatgaaaagcttaaaataaaagcttctattaaaatactgaaaggtggaggcatcatttttttaaaaaagaaaaagcacttcaccaatgagacccagtctctaaagaccctctgagctgcggcagctgctgctggatttccaagacgcaagcctccctccctcccttcgggaatgcttttccctgaaatctcagcattggatctgcagtgctgagtagagacggcttcccttacacccatgctaatgagttcacgagccacgcggggtgtcaggagacacgcggtactcccaaaagcctgaagaagagccctgcgtgtggtggcagcgacgtgacaagcgggtgaggctgatgggagataacgcaggaggcgagagatggtccgattctggcagcgcggctcctgagtaagagggaggatgcagtctaggttctgaaggcatttttaaggttgaggttgtcagacataaaacagctttgaaacgttttgtcgactgaacaaagggaacagcacccatttgatgggccccttcagtaggctgaccttttccccaacactaacactcttcaccctcacggaaatcgcacaggtgaatgcctgtccacttaaaagcaggcaaagaaggactggagagggtgagtagctttcctgaggtcacacaacagaaaggaagaacagaattctaactcaagcctgactaaacccaaaagcatcttcccaacctcatcactctgcagttcagcttttgggcaaacctctggtgcttaagagtggacaaagatccaccaagaagttaatgaagcagacagaaaactgcataagcccctgggcccagtggtgaggtggctcacgcctgtaatcccaacacttgtgggaggctgaggcaggaggatcacttgcggtcaggagttccagaccagtgtggccaacatggtgaaacccccgtctctactaaaaatacaaaaattagccagacttgatggtgagcacctgcaatctgagctactcaggaggccgaggcaggaaaatcacttgagctcaggtggcggaggttgcagtgagcagagatcacgccactgcactccagcctgggcaacagagggagaccctgtctcaacaacatagaaacagaaaagaaaagaaaagaaaactgtataagctctggttgtctacagcctcttgcccagtcacttgcccaaagccatagtttggtcccctgggactgaaagccatatctttttaatcctagtccatttaccccagggcactttaagaacagacaggtcaggcagagataaagggaagagtctgggtgtcaaagtcagacacaccctccagctctgctgagtgaccttgggcaagtaacttgccctctctgggcctcagagcccccatctgtgaaagaaaataataccctttaccaagaaggattgttgggagcaactcactcagtcattcagcttactcagttgttcaggcctcctatatgcaggcacacgctaggacagaggttcccaaactttctcaactcatgacacccttggtgtctcaggaattttttcacagatttcctaggccaaaataccatttccatttattaaataccagttccatttattaaacagttaggtacaaacaactgaatgagtagttatctcttcacagcatagtagccatttgaaaaagtaatgcacatacattaaaagaaaaacggttttttttattattaaataatgacaattgctggctgggcgtgatggcttacacctgtaatcctagcactttgggaggctgaggcgggcagattacctgaggtcaggggttcgagaccagcctggccaacatagtgaaaccccgtctctactaaaaatacaaaaattagctgggtgtggtggcacgtgcctgtaatcccagctacctgggaggctgaggcgggagaatcgctggaacccgggaggcggaggttgcagtgagctgagatcatgccactgcactccaggctgggagacagagcaagattctgtctcaaataataataataataataataataataataataataataataataataatgacaattgctgctacgaggatgtgtatacccgttgggctgtgcaaatcttcttaaacgttaggatcagatgggacttcgccaccctaatttcctgttccacattgattttgtcacagttagcacgagcaccacaaaaaaatccagctttgcaatgatgagtcatcaccaaaacaaaggtgacgtgatctaatgttgaaacggtgaactatcttgagctggtagttcacaagggtccaacacatcattgtgtttcctcagaacttttttttttttttgagacggagtctggctctgttgcccaggccgatgtgcagtggcgcaatcttagcccactgcaagctccacctcccgggttcacgccattctcctgcctcaggctccagagtagctgggactacaggtgcccgccaccacgcctggctaattttttgtatttttagtagagatggggtttcaccgtgttagccaggatggtctcctgaccttgtgatccacccgccttgacctctcaaagtgctgggattacagccatgcgccactgtgcccggccctcagaactttttttaaaaatcccacagcaccccctgtgagttcctggtggcatcctgggtcaccttggtgaaagtttgggaaccctggcactagcccctggaaaaacagtaaggtataaacagatatgacccacattctcatggagcctggggcctatttggaaaggagggtggagagacaggtctatgaaggaaatcacaatgaatcgtcagcaccacctcctccaggaagtcctccctgatttcctaggccgggttgtgtttctgtcctcagaattcccatggaacctacagtgacatctgtcaccacagctgctgcagtttattgaaatgatctgtttatatgtttgtagaatcacattccctagagtaagaaagagaaagaattttaaaatatatatatagaataaacacataactcacctgctaggattgtctccagttgatccttgaatcccccaagcccaggaggctcgacaaatgatgttactattactgtcgttgatattgttagcaaaatgaatgtggtctttatcacacctctgctttgttgcaacttcccctctttgataaggacgtggtggatgactcctgaggtaaccatcccaaagacataaaccacaccaccaaaactaaaaagaatctgacaaatccggcaagggttttatgagtggctctccaggagccacttagcttgcttaagagacagcgattccccgggaggccctggttctcacagccctgagcccagaacacctgggatacgagacacagggatttcccagcctggacagagcccacaggtgctgtggccagactgtggccaccgtaggagcttccactgttgagccgtctcctgtggccacatcttggccagcatgtccagtgttagctgagttcccgtcctcatttagaaatctctgtctctgggaaagcggtctctcacagaaatccatgataaccctaggggatttgggtaaaagaagggcctttgttatagcagaaccattaaatggacagcactaaaaaccagcacgtccaggtttgtaccccagccctgcctcttacaagcaccatgactttatacaagccagctttctcaccaaaaagattgaaaaacgaacatgccaatcataaatataaaggcttttaatgaatggtgtgcttggcacatagcaagtcgtcagttaacattggctgctaatcaccactctgtttcaaagctccactgcttgtagggcatattgcaaaccatttgtaactattactaggggacttgatttcgagctttttgttcaaatgtgctccagaaatgtacattttcttctattgttaaagagaggggaaaatagaaaaagaaaacagaaacgagagtgggttcgtgagtagatctataaggccatcggtccaattcatttgcattcctgggagagaacggctggagttacaccagttgcaacccgaattgtttaaaacattcgaccagtggttttcaaccagaggcgattttgctttccaggggacatgtgtaaatacaatttctagagaaattatgagttgtcacaacttgtcagggaagaggggtgctaccggcttctagcaggtcagggcccaggatgctgctcaatatcctccagtgcccaggacagcccccaccacaaagaattatccattccaaatgtaaaacctgtctaagttgagaaaacctgccttagatgatcttatttcaaagtgtgactacatgtcactgcctagccatgtctcggctaaggtccagactgtttatgggcagaaaaaaatggagtatggagacataagcaactcactcaaggtggtgcagcagacacaggcctccagtttcaaattcaagttcctattcctttgactcttctgccatcttctaggtgctgaagatacacacaaatgccttccaagagctggttcctgctggggaaaaattccatatgacattgttttcaaactcttactgaggactgggtcaaaattgaatcaggctgacttgaaagctagagaatcctcagctcaaattgcagctcagccacttcctgcttgaggggacttttcaccagtgagttccacctgagcctcagttttctcatctgtaaaatggctgcatggtgcagtggttaagaccggacttggaccacctggatttgaatcttatttataccactaactagcttgtgacctttaacacgttacccaaccgttctgcgctgcattctccttggatacaaaatggagatgatgaccaggcatgatggctcatgcctgtaatctcaacactttgaaagaacgagacaggaggatcacttgaggtcaggagttcaggaccagcctgggtaacctcagggtcctcaggaccctgtcttcataaaaaatttttaaattagccaggcatgatggtgcacgccagtggtcccagcgactcgggaggctaaggtgggaggatctcttgaaagggaggtcaaggctgaagtgagctgtgttcacgccactgcactccagcctgggtgacagaatgagaccctgtctcaaaaataaaaataaaataaagtaggaataaagatataatatctgtgtcttagggttgttgtgataactaaatgagttcatagatataaaacactcagaatggaatctggctcagagaatgccctcagtaaatattgtaaatgttggctgttttggtcatgattgttattaccttcaaggactttgcagaaggattagaaataatatatgcaaatcatctaatacagaatggttgtgcaaatactttggaaattaattaaatgatgagttaatatgttaaccatgccaggacaccaaaccagtggttctgagcccttgccaaactttaaaatctcctggagagttttaaaaagaatactctgggtgactaattaaattaaaataccataggggcggagccagggcacaggataacccaaggccattctagcacttagcctgggggtcctgctcctaggtcggctgtcaatatcctcctttacacccaggtctaacgatttatcctttatgcaccttccatctccccagggcgaggacagtgtttagcacaggtttggtatcaggaaatacttctggaatacatacaggactgaattagtgttcagttacatgaaggcagggaccatgttcgccttgctcatcattgtatgcccggcgcatacaatgcctggcacacagaaggtgtccagtgaatatttgttgtattaattcatctgttaatttatgaaagaaaatttccgaggaaaggttcatgggggaattcttttgtgtcgccactgccacctgctggtcatttttctgcactgcaggtaatacagtagggatttgtgttctctgaagggagccaccaacgtcatcaagaaaaagcctccccgaccagggggcgggaaagtgaggcttctcctgtgcgctttccccagcacagctgagaccacactgggctgtaatgacccggtaactgttctctgttccccattcgactgagttttgggagaacagaaaacgtgattctctaattcactgcttcatacccagctcctagcacagggatggaacattggaggaacagagtctacgggctgaaaaaaaaacaaaaaacaaaaacaaaaacaaaaaaaacacggagagtgtattctggactctgggagttcaaaagctataaagtgttgtgcaccgggctgcacttcccgaggagtaggagtattagatacactacggggatacccacgcggctttaaacagtgtccagatgaactttttgtgagtcgtttggcttaagaaaattagaaaaattaaaactgacatgtgaaacctctgattataagactattattatttagagtgaggctaaattatactgtgcaatctaaatagaaaaacaagtcaatagaaatttttaaaaatatattacataggccaggtgtggtggctcatgcctgtaatcccagcactttgggaggctgaggcggatggatcacttgaggtcaggagttcgagaccagcctggccaaaatggtggaaccccgtctctactaaaaatacaaaaacaaaaaaaatcagctaggcttggtggcgcatgcctgtggtcccagctactcgggaggctgaggcaggaaaatcgcttgaacccaggaggctgaggttgcagtgagctgagatcacaccactgcactccatcttgagtgacagagtgagactctgtctcaaaaaaaaaaaaaaatatatatatatatatatgtattaagtgaacaacagtacaattggtatgaaaatatgacaagagttttaaaagccataaaaataatcagtgtatattgggtgctcactatatgctgcccatctcatgtgcgtgagcttgttttattctcataacaacaccttgagacagcccattttaaagatgaggaaactgaggctcagagaggtcagttgtgctcacagacatacaactaggatgtgcatcctgagcccttggacacttgaacccaagcgctcctgctctgcaatttgcctttaaatgaaatgatgtgaggtctttcaagaaatatttactgggcacctaccctgtaccaggttgccaaggatgcagcagtgagctcagctgggttgaggaccaaagacttcctcaggatattttcagaggaatcattagaatatgattggcactgggttctgttcattataccatctatgcttattgtaaagtaatgcagacccaccctgcattaaaaaaaaatacatcaaagcacaggctttaaaaataaaaataaaattctcccttcctacagtccatccccaaggcacgctctgcagggtgaatgattccttgccagccctcttaggtctcatccataaacacataatagagtgctgccttggagggagccccatgattgacttaagcaaggctttgtgatttgattctgggctcaaacacagaagcgttggctgcatatccatcctgctctggaatgccagggggcaaacttcaagtatacagatgaccttcaattagtggaaggattagccttggccaagtgtcagctgaaccacttactgcctcatctctgggagtcttgtggaaagggagctacattcaaaatctctgcctctctcgctcaactattccaacagccccttcccttggctactttaggggtcttctgcagccacccagggtcttctgagtttctctcttctatggcacctgccatttttaattaaattgtccatttacacatttgcttggccccttagagcatgcagaccatgagctctagaggacaggaatgatgtctgattcacctcctcaccgcattgctggacgcattgctgggcatgaagtaagcactcaagatatattttctgaataaatgcatgggtgcccgccagagctatctatggtgtcatccaagatgcaactccagctgcacagtgacctgggaagtctcttcccacaggctgacttctgggctagatttcaagggtgggaaggaaacagttcataactcccagggaagactgctattgaagtataaaggaaaacccttcaacctcaagagtgaagccagattcctacccgtccacccactggaggagatcaaagtcccgattcttcatgtatggtgattactgtgactaaaacatactcatcaattgattcattcatcttttcattggaaaagtgatacatttaaatgcctacaaggccaggcaagtaccacgtgaaagacaatagggagtggcagagactggggctaaagtaaagaatattcctggtctaacagggaaagccattactcaactccagccagtcattgccatgtaacaatgtgaacccagtattgcccaatcttctaatgtttcagaagaatccagaaatctaaattattatttgaaatctcctaatctgtgaaagcttggtaactattgtttcagttgacattactcaagctgagtagagcccaaatgtaagtcatgttcacagagaaaagggttctagctgggacctatactgtactgtgtgccttgaaccacaagtgccgtaggaccagggattatatctgttttattcacctctgtgtcctcagtactatttatgttgttggcacataataattgctcaataaacattatctgagtaaataaaggaatgcttcctgtgaaccaggcattgtactgggtatgagcatatatgagtttaaagcctgggaaagaagtgccagaaaagattctgaagttatgatgatgataagacagagttccaaggacagaattcatgcctttggggagcaatctgggtcttgaaggcatgcttgagattcatcgtgcaaaatgagacgcttcaaacaacacgtttattatctgacagtttctgtgggtcagaaatctgggcatagcttaacatgtacacccatgttcatagcagtattgttcagagtagccaaaaggggaagcgacacaagtgtccatcgatggatgaacgaaaaacaaagtgtgacacctgcctacgatggaatattagccttgaaaaggaagaaaatttttgacacatcttgcaacctagatgaaccttgaggacattatgctaagagaaagaagccagtcacagaaggcaaatactatctgattccacttacatgcgataactagagctgtgaacttcatagagacagaaagtagaatggtggatcccaggggctagggtaagttgtttaacgcatatagagtttaagatttgcaagatgaaaagagttctggacataagttgcccaacaatgtaaaagtacactaacctactggactgtacacttaaaatggttaagatggttagttttatgttatgtagattttactacaatttaaaattttttaaataataaagtttagaatgttttaggatttgtagtcctgtgtgtgaagcaatttgctggctgtccattccatccaggtgctgaaaaaggactagatctcacatgcggcctggaatgggttaaacctgcaggttcaactctccagtaaatactgtgatcctaacaccttgggaggctgtggcaggagaattgcttgagcccaggagtttgagaccagcttgggatgcatggcaagaccctgtctctactttaaaaaaaaaaaaaaaaaaaaagccgagtgtggcgggacacgcctatagtcccagctactcagaaggcttaagcaggggaattgcttgaccctgggaggttaaggctgcagtgagccgtgctgcaccactgcactccagcctgggtgtcttaggctaccgggtactttgtgtctgcagctgaagagagcagtcaccagatggcagtatgggcttatttgtaatagttgaggccttttgttgccaggctcccaggccctgagcttcaggcttgctctgataggctcatctccaatgagggaaacagataactaattcagtacagtacagtgcatgcagtgctggagaaactaagaagactgacgactcaattcacggtaggaggcatcaaggaaggcttcctggagaaggagaaatgaagattgagtattgaaagacaagacgtagtcataatggatgcgcaggttaggtgtcaggtgaaaagcaagaagaagatttcataattaaacaccaccaccgtccatcatttactaagtacgtatgacatgccaaaaacaaaacatcttaagcatttccttacttacctattttagtcctccaaattcctaggagatagatattactttgatcgtcgttatgctaatgaggaaactaaggatcagaaaggttatgccacttgctggcgatcacacagctaacaagtaacagaactcatattttaaccttgattcctcagccaacttcattctaccttgcctgtatgtaatctgtgcccagaggtggaagacagaaagaacagtttgagaaatagaaaacagtctgatgcaaggtggggatgcagagagaggatgctggagaggctgaccaaagctagatcacacgggttctgagcaggactccccaaagatttgcatcatctcatcagagctccttctggcttgcatttcagcggaggagtccctggcatgtgacaacccagggctgcctgaaaatggataccaaatcctgtacaagcgactctacctgccaggagagtccctcaccttcatgtgctacgaaggctttgagctcatgggtgaagtgaccatccgctgcatcctgggacagccatcccactggaacgggcccctgcccgtgtgtaaaggtaaagaaacctactcaccacacagggtccacggggcctggagatgtcaggctcctggctcacaggagttctgaacttgctctaaaaaattggactaggagttcgagaccagccgaggcaacatagtgagacccccatctctaccaaaaaaaaaaaaattagtcaggcatggcggcacacacctgtagtcccagctactcgggaggctgagatgggaggatcacctgagcctaggaggtcaaggttgcagtgagccttgatcatgccactgcactccagcccggacagaacgagactctatctcaaaaaaattaaattaaattttaaaataatagagctgagctgctgtacttcattaaatctaagatgtcaccatgactttatgcaccactaaaaaagaaaaaaacatgctgccaattatactatgacacaatgtcttctcctggcttagcatttttatttttacttactaaaggagcttttgaccaggcacagtagctcacgcctgtaatcccaacactttgggaggctgatgcaggcatatcacttgaggtcaggagttcaagaccagcctgaccaacatggtgaaaccccatctctacttaaaatacaaaaaaattagctgggcgtagcggtgcatgcctgaagtcccagctactcgggaggctgaggcaagagaatcacttgaatccaggaggcagaggttgcagtgagccgaggtggctccactgcactccagcctgggtgacacagcgagattctatctaaaaaatgaaaacataaaggtctttaagctttttatcatatatcacaattatgaaaatgttcaaatgaaaatataagcagcccaggtgcagtggctcacacctgtaatcctagcattttgggaagctgaggtgggaggattgcttgagccggggagtttgagaccagcctgggtaacatggtgaaactgtctctacaaaaacaaaataatgataataatacaaaaattaacctgatgtggtgacgtgtgcctgtagtcccagctacttgggaggctaaggtgggaggatcacttgatcccaggagacagaggttgcaatgagctatgatcatgctactgcactccagcctgggtgacagagtgagactctgtctcaaacaaacaaacaaacaaacaaacaaaatacaagcaaaataaactggttccagtgtatttaaaacttccccaccttcaaagtctggcacttttgattttctaaattattactaaatttttttgtagagacagggtcttgctatgttggccaggctggcctagaactcctgacctcaagcgatcctccctcctctgcctctgagtagctgggattgcaggtatgagccaccacacccagctgtagaatcattttttactccaagtcttcaacatcctatttttccactcaatatcgctcctgttgaatgtcattgtgtactaaaatatatatacatttacatacatacatagctcctgtcccattaaagcatcagggatgcagaattctgtaggaacgtccataacgaactaaagtctttgatacaaggggcttgcagttacattgaggcagggctgggacgagtctgaggcaaaagaggtgcctgaggtgaaaaatgtaaggaggtgaccaagcgtcccgtagaacagccttaaaaaaagagtctccgtacacttctcgccctagacagctctcgccttgccctagtcccggccctgtgatccagcctggtttttgttgatttgtttgtttgtttttgtttgtttgtttgtttggagacagggtcttactctgttgcacaggctggaatgcagtggcgtgatcattactcactgcagcctcaaccacctgggctcaagctatcctcctacctcagcctcgcgagtggctgggaccacaagtgcacgccaccacgcccagctaaatttttttatttttgtagagatgggggtctcgctatgttgcccaggctggtctctactcctggcctcaaacgatcctcccacctcggcctcccaaagtgctgggattaccgcatctgacctctgcctgcttttgacccctgcttagagaaccctgcttaattatttcccacctcttgcactgcctcctcacaaccagttagttcccatgggttaggagtgttcctccactgcctacagggtgatctcccagggcgttacctggcgttctgcaaaccctaatactcttaacgcccccagtttgtgcacacggggaatcgtgagcgccacctggtggcagctattattacacattattgctttaagcctcgcccccacctcccagatggtgaagtgagaaaattgcatcttagaatccattgaacactcatcactaaaattaagttgtaacacactaagtaaaatttggattcgtttatctggacttttgaagtgcacaatcagtaatagtaacggaaatatgttcagtgttttaggccagtggatcttaacctttattgctttagtgcccctttgagaatcaggcaaaaggctcgaatttgccctccagaaggaacagaagcatgaagttttatgtctctacttgggaacccctaacttcagtggatccccaaatgccttattcatgaaccccagctctgaggcttaaaactactttcccagttagtttgtccactccgaggtatatttccaaaagaagtgaaacaggtatttaagcaaaccctgtctaagaatgtttataggagcactattcacaatagccacgagatggaaacaacccaaatgcccaccaactgatgaatggataaacaaaagtgtggcagaaaaaagggaatattattcagccattaaaaggaacgaaatactgacacataccacaacatggatgaacctcaaagccgttatgctgagtgaaggaagccagacacaaaaggtcacatgttttagggttctgtttctaggaaacatctagaataggtaaatccatagagacagaaagcagagtcgtggttgtctagggactgcttactgagtatggggcttgttttggagatgaagaacatgttttggaactaggcagaggtcatggttgcgcaccattgtgaatatgctgaatgccactgaattgtaacactttgaaatggttaattttatgttatgtgaattttatctacctaaaaaaaaaaacaattcccctgaatcacctctgttaagtcttatgaccactgtctaagataggtgagccatcttacctgttttacagatgtggaaggagaagctcagagaagttaagtgattttcccaaagccacacagctagtacaagacaaagctaggacttgaacccgcatctcatgactgtaaatttcccgccttcagggctactaagaaagacccccaaccagccagtcaccgcagcatggaaacctaggtgtgttcacacattcccgaatctaacccagatctcccaaagcaaaatcattgagaggcgggcctggaataagccttttaacaagctctcaaatgcactttgaatgtgagaaccatttaaggccgtgatttccaaacataaacggagtcctgagccctttccacggagattctgattcactgggtctaaagcaggacccagggaccagtttaactaaccacacaggtgaattgtatcatcagccaagtatgggaaacactagcatgagggttgcaatttaatcttaccaggtatcaagcaggggctcatcacgtgaatgacaatgacttatataagcagttcttttgtttttttttttgagacagattctcgctctgtcccccaggctggagtgcagtggctggatctcggctcactgcaagctccgcctcccgcattcacgccatttctcctgcctcggcctcccgagtagctgggactacaggcgcccgccaccacacccggctaattttttgtatttttagtagagacgggttttcaccgtgttagccaggatggtctcgatctcctgacctcgtgattcgcccacctctgcctcccaaagtgctgggattacaggcggagtcactgcgcccggccgtaagcagttcctaataagagaacaaggggtccttttgaagagcagcgaacagtaagaaatccacaattagcattcaagacagctgccttccctcattcccccataattttgactaagtccagcccagtgtttgaatttattttatttgtgtatttttaatagagacggagttttgtcattttgcccaagctggtcttgaactcctgggctcaagggatctgtccacctcagcctcccaaagtgctgggattacaggcgtgagccatcatacccgacctgaatttatttttgatagcacaggaaacctgctttgcagagcttaagtattgggaagttcctgagtaaagattgcctgtaaaccctctaactgtcacatggacattaatagaaattaatttgacattgttgatgagttttctgcagggaagaaaaattagcaggatttgttttttaagaaaccttggccggcgcggtggctcacgcctgtaatcccagcactttgggaggccaaggcaggtggatcacgaggtcaggagttcgagaccatcctggctaacacggtgaaacctcgtctctactaaaaatacaaaaaaaatttagccgggtgtggtggcgggcgcctgtagtcccagctactcaggaggctgaggcaggacaatggcgtgaacgtgggaggcggagcttgcggtgagctgagatcgagccactgcactccagcctgggtgacagaacgacactccatctcaaaaaaaagaaagaaaaaaaaccctaaataagaaaaccatgaaaagggccactttggcctggacaacgtgtttgtatctgccacggtagctttttaaattcttcttggattaattgcaaaggtatctcatggaacaagtagaagaaatcagagcttcaaatggaaggagcagttttcctctctcctccatccctttctttcttctccagaagccagtgctaatcacctgaatttccagtgtcacacctttccctagtcttatacacatagacatatttggaaagagagagggatgtttgtttttgttttacagaaaaaaaaaaagaaaagaaaaaaaggctgggtgtggtggcttacacctgtaatcccagcactttgagaggccgaggtgggaagatcacttgagcccaggagttcgagaccagcctaggcaaaatagtgggacctcatttctacaaaaaatcaaaaaattagcggggcatggtgacacactcctgtagtcccaactacttgggaagctgaggcaggagcactgcttgagcccaggaggttgaggctgcagtgagccatgattgcaccattgcactccagcctgggaaacagagcaagaccctgtatcacaaaaaaaaaaaaaaaaaaagggagggaggttcatatcatgctgtattctgtgttttacttattacaaaagtagtgccatgttattttttttatttgccacccgtcattccacactttgcttgttccccagtgcattcagcccttcctctgttgatggagacatcagttctcttccagttttttgtttgttttgttttgccaaaaaaaatcttgcccatgaatccttggatgctggcacttttcatcctgcaggacagattcctcaaagcaggattgatggtgtgggcaaagatctatggatatcgagttgtcctggatgtcaccaaatcgtttcccacaattggagcaatccacgctcaccaacaatgtgtaatatgtccatttctccacctcctcgccagcactgtatgttttcaatttttttttaatgctgccaaactgaaaagaaaataaaactaccatcagaatatacacaaatgtagctgggcatggtggtgtgcacctgtaatcccagctacttggaggctgaagtaggagaatcgcttgaaaccgggaggccgaggttgcagtgggctgagattgcaccactgcactccagtctaggtgacagagcaagactctgtcttaaaaaataataataatatacacaaatgacaaaaaaaggaaaaaaaaaacacgaaaagataaaaagaggctccattttgcaggtgatccctgaaacctctcttttctatgggctagtatctctagaagccccacaaggtcaatcagctcactgccttctcccacaactgtgatggaattgctagcaagaaaggctctcaggagacccctgcacctttcttccctctccatttccactcctgagatccgtcccaccaccaactctgtaaggaaatgagaaatcacttcctcctcagaaaaaaactgggatgcatgacattgtggtatgcaggaggggaagcaactcagtgccaatgtgaggccacctgactgggacttggggaccccgggctccagtccagttctgctgtggaccacctgtgtgaccttgagtgagcccccctccctctctgaccttggtttccctttttgtgaaataactgggggagtccagatcagagtttctgaagaggagccagtgagcccactggatgcatcagaactgctgaggcattggtgagacctgcagaggtccaccgctgagaataccgctctgacaagtcccaggaatggcccaggaatctgcatttaacatgccctgtggggttcatgagcacagggctccaaggaacacatgattcaatgcctcctcccagttctaagattccatggacattcacgcactctcactcaaccacggtgcaactcacatcttggggcaggaccatctgcttcaatctttccattttcttgatgccaaagctgcagagaagtgtgcacttagttagccagctagcttttcagctggttttgtcatcatggtgtgatgatggcgtaaaccagagagtgactttaaccaaggcatggattagggtgtcttgggattggggacatcagtatagctaagcctttggtggccactccctcctatcccctaatgctgcaattttttcatcaaagtccttcatgctggggttttgcattcctgtaataaacatccatccttgttggtatatttttgtgcttagctaccatgatgactgatgacaaagatggggtgccagtccccatgatgttgaacctccggagaagttttacaaaaaacataaatgattaaaaatagtttcacatgggatacaaagcctcatcaatataaaaggaataaaaatgaaattagagaggtttacatagatagtcttcaaaacaggaaaacagttccacctctggctggattttgtatgaaggtctggggcctcgcaattcattcgtgctttgccccacatgaaaatgatgaaaagaccctaaccacataattgagagcagaaaccagagagcttgagcagcccagactgaaatcctgcctccatcactgagaagctgtgtgatgtcagagaagtcacttcacttctctgaacctctgtttgctcatctgtaaaatggggatgataatagcattgacctaacaagattgttatgaggattaactgagcaaatgtatgtagagttcttggcacaattttggacacgcggtgagtgttcagtaattattcactatcactgttgttgatcttgggtcttatctatctcatcttctcttggtaacttaggaagtgaatagtccaggcacgttcactgattatagtggcccaagataagtaaaaacataccactaacttcaccaaagcatggcatgggcttttgcatcaaattttttggcctcatttcatgcaaacgaagtgaattcactttacattgaccaatgcttcctgatttctctttcagttaatcaagacagttttgaacatgctttagaaggtgagttccagaacgaaaaaaaaaaaagttcaataaatcaaactaatagcacaaaacaagggcaggtctttgaatatctttatttagacacttaaaaaataaataaattctaccttcagactgccaaagataatcttaaaataatattgtaggggaaaaaaaattatgggatttgcaagtcaggaccctaacaataacctgaaagggatttgacagctgttctgtacatggtaacagcaatgagataaggaaagctcagagcccataagcctgagaaaggcataaccctattgtaaaacttttcatgatgccattctagaaggggaactaaatctagtgacatgtcaccttccatgctgagagtcctcctggtttccagagggaagagtttgccctggaagcattcaatggtccatttttccctgagtcttttttcccctcagcatacccaccccttctcccatctctccttacttcagctctccttttattagaaattcccaaatgagacttattaatgaggagcagatgttaaaatctatccaggattttatttcagttttgttttcattttgtggttccttccctttccaacccctcccgtgtgtaaaatgtccagcgttctatgtcaccgctattgaatttggtacaaaaccactcaccgggactgtgatgtaaaatatatactgtaatatattactgcatgtatatatatgtaaatacaaatgcagtatattatagcatatatatttaaaaatatatactgtaatatattgtttcttttttttttttaatgtttttaccaaatcaagcagtttttattattcctggagccatctttagctttctgacaataatgagttcacttagaatctggggctatgtaaattacatttcactagtggctgttccttgtaacagacaacacttgaatccaagcaggtggaactagggctcatatataaatgaaggagcatgaattatacactccacttggaaaacagagggcacttcgtgttagtctccattcagagtatcctttttctgccttttgccaaccagtgaaccatgagaacgtctcaaagggctggggttgctcggagcttatgagagccattgtaacgttttgtgctcatgcatttattctgggtattaggattgatttttcagaccccataaagtggtggttaatgggttatagattggtgtacagccaagctctattagatgtgaccgtggagaatggcagaggaaacctggaggccaagtttctagaaggaatgtaggatccccctttaagctatgctgggaaagcagccctctgccccaggcgcctgcagcagctgttatagttcttgcaattgccacagtgggaggttgagagagcagccgggaaatgtgcaggagtagcctctgggaatcaaaacgggccttcatatttggggtgtcattggggtgtgcaggacagagagctgtcagtccccaatgctcagagcccactcgtggactggagagtagaactcaaaaggtctaggacgggcccgtcagtctgcatgcaacaagctcaccagtccacaggtgagcaccaggtctgagaatcccttagaaaccttgcggctgaccaccagcaccgttcaactcaacgacatacacaaacccagattcgcccaccactcctgcatctggggtccagacccattcctgtttctcttctccactccatggaatgtccagcaaatctgctttcccagttactgaatttgggattttctccaagtcttcctgtgaattggactttaatcagattttaactgtagctcccaaaaaatgggaatggtacgatcaggtttcaaacagtgtaattctctatagctcctatggccaacccaccaaaggatgagtctgggaccccttgcaaaggaccaccaccatttcctctagtctttggagatggctctgcaaggtctaaggccctcccagagccttagaccttggaaagccgtctccaaaggggtggagaactgggcagttgggcactcactgggagtcagctacctgggaaatgaggacctcactggctcctgtgttcagtagcagaagcggcagcagagacgtcgctggaaggggggaacatggccctggctatcttcatcccggtcctcatcatctccttactgctgggaggagcctacatttacatcacaaggtagggagctgatgggggagatgactgccaagcacccagccaccagtactcagagggactgggcggttcacctctctgagcctcagggtctccacctggagctcgggcatagtggcatttgtgttattgcagagatgcccagattcagcccaactctgtgggataaatatttacattgggcaattatgaagcctccaagcaagtaagacaaatactattcctgccctcaaggaggttatggtttagtggggcacacagacataacatattgccaggcatgttgatttgttccttccatcactcactcattcactcatttattcaacaaatatgtactgacaatctgttgtatatcagacattgtcccaggtgttgagggtctagaaacttgcatttgatgcagaaggaagatattaaaccatgcaccagaatagccactcattcattcacattcacagttgttgagcacttactaggtgccaggcagttttctcggttccagaaacatcatttgtggaaaaaaaaaaatagaaggaaatatttgccctcctggggttcaggttctaacaaggaaagatagacaataagcaaagtatgtaagaaaatatgtagtgttagaaactgataagtgcaggaagagaaggctgggagggggcaagaattctggaagagaagtggtggttgacttttaaatagtgtagctagaggaggccccactgagaaatgacatttgagcaaggacttgaaagtgatcatgagaaacctatgcagtccaggcgtggtggctcacacctgtaatcccaagactttgggaggccaacgcaggtgaatcacttgaggtcaggagttcgagactagcctggccaacgtggtggaaccccgtctctactaaaaaaataaaaaataaaattagcctgggcatggtggtgggtgcctgtaatcccagctacttgggaagctgaggcaggagaatcacttgaacctgggaggaggaggttgcagtgagccaagatcatgacactgcactccagcctgggcaacaaagcaagactccatttcaaaaacaaaagaaacctatgcaaatatgtgaaaaaggagggtttcatgcagggaaacagcatgtgcaaaggtcctgaggcaggaacgtgactaaaatagatcatccctgcccttatggagcccacagtctactgggggcagggtagagtaaatacacaaataaattataacacactaagataaacacaatgaaggaaataggtaggtgtggtgagtaacagagaaatcacctttaaatagatggtcaggggccaggcatggtggttcatccctataatcccagcactttgggaggccaaggctggaggatcgcgtgagcccaggagtttgagaccagcttgggcaatgggcaatatagtgagagctcgcctcttaaaaaataaaaaaaataaaacacttaaaaagttagccaagtgtggtggtgcacgcaggtaggagaatcacttgagcccaggaggcagaggttgcagtgagctgagatggcaccactgcactacaacccgggtgacagagcaagaccctgtctctaaataaataaataggtggtcaaggaaggctgatctaaggcaatatggcatacagtaggtgctcaataaatgctcatccttgttcttgtttccctttgcattcaagagggacttgaatgaccttccaggagaaaacaaattaagctccgccccctccctagtaaggagagatcacaaggctttggttctcgctgcctgggttgcaagttgagagcaattatgatttctgctttcacctcactaggattctcgcctgcaaaaggctgtttgcacacatcctcgtcgtcattcacagaggtgccgctgctcaggaagtggcaccaactgttcccgttcaatattgtaatgtttctcctagctggggagaagtaacttctctctcctttctttcccccagatgtcgctactattccaacctccgcctgcctctgatgtactcccacccctacagccagatcaccgtggaaaccgagtttgacaaccccatttacgagacaggggtgagttggtctctctcgtctcttcccaattccctccctctttgctctgaattcaccaacaataagacaaaacatttcatttcctattgctcacaagaggcacagccagtggtcctgtcttatccccaccaagagccctaaagagataaatgctgggagaacccagctctctttgcaggtgattggtgctgaggacgagcctaggaggctgattactgtcagcagaacacccacagaaaaaagaggctgcacccaagacccacagagagcagaccaacggtggcctggtggcaacgtgctgcattcccacacatcccactgggctccaccctttattcaatggcagtgtgaaacatccctacacatttgagtatcaggtcctattttaggtgctaggaacatagtcatgaaccccaatagacacagattccaccattaatgagcctaccgtcttgtgaattattattatcaataataatacatgccatctgctgggcactttaaatgcataatctccttgaatccttgcagctctctgcaataggttccacagttatctctaattgattgatgaggacattgaggtccagagagaggaaagaataatttggccaaagtggcacacagccaggatgcacagcctgaagccaggatgcaaattcaacctgacactcttaatcatgatgctatcttgcttccctcgaacctctgacaatccaatgtgcccatgaatattttgattacaacaaataatactttttaaggactatgaaaaaattgaacagggcactaggagaatgtataatggggacacttagagggagttggggaaggcatcattgagaaagtgagagtaaagctgagacatgggaagtgggtagagcttggacaatgggctgaagaagatgccagacagaagggagagcatgtgcaaaggtccagggcacatgcgaggaagcaaaaggctggttatgagtttgcaaaaccaccatccttcaagttcactgtgtaatgatgtgcagccatctcccaacgtttggggggaataaacctgacttgtttcttatcctgctaaccttccttcacctccacttctctgatctcctgtgttagttatccactgatgtgtaacaatattactgcaaacttaggggcctaaattaacaacatacatttattatctcatagtttctataagtcaggaagccaggcacagcttagcctgaccccctgctttatggctcacaggctacaaacaaggcagcaactgggctgcagtctcatctgaggctcaaccagggaaggatccacttccaaactcacatggttgttgacagcattcagttccttgcaggttgttagaatgagggcctcaatttcttgcgggctgtcttctaggggccacccgcagtttcttccatgtgggcctctctatagagcagctcatgacatggcagctggcttcttcagagccagcaacagagagagagtcatcttgcaagacagaagtcacaatcctgtgtcatgcaaacatggaagtgacatcctagcacctgtgtattctcctagttagaatcaagtcacaggctttacccacccttaaaaggaggggaccccacaaaggcatgagccccagaaggtggggatcatggggaccaccttggggcctgcccaccaaaatcccatgtaccatgaagcatagatgtgattgcatatctgtgttggctgaatgggagctggagactttcattaaagcatgtgacagtgtcaacttccagggctgagccttcttctatctccttgctccttgtccctggagcttggaatacattactcacactccataaatattgaagaaatcaaactaccccccatgttgtagtcgtttcacatggcaatggtagatcagggcatatgttattttgcattctatgtagcttgctttgaaatcatgggaaaaggtcagactgaaataaaggagaattttagagactagacatgaatgaatacttattagtagagtgtatcagtgacctagaactatagtaatgctgagtaacaaagatc

SEQ ID NO: 2328 - DNA, 516 bp, Homo Sapiens
tttaaacgtttggaggatgaggtcttgctatgatgcgcaggctggtcttgaactcctgggctcaagtgatcctcccactttggcctcccaaagtcctgggatacaggcacgagccaccatacctggctcacggtttttaataacatacagatggatagaataataaattcaggtgcttgtatttgcatgttttaacatatatacatatatgttttctagctctgtctgctgagcaggcctacaagcaatgacactccgccaatgatactctagccaggagtatatattctgtccagatcttggtttccagtggcatcaagaaacaacttggtttctaagttccttttttctggaataaaaggaactgggagcttcttagagaatgactgatgccagggctgagatagggaaaatgtgaggaagcctgaaacatcttgtggtgccagaaaatgcttaaaaagtgacaggggcaatgtcgaaacaacacagtgccaacttcaatgagttctcactggc

SEQ ID NO: 2329 - DNA, 443 bp, Homo Sapiens
ttttttttttttgcactggaaatcagaggtgaatatttatttaattcatatataaattttacataatattcatggtgctataaatataggcacattttttaaaagtccagatacatccaaaaattaccccctcactgtagcctactccaatcccctcaagacggaatatctaacgtgtttggaaaacagggtccagaaaggccctgcccattaattttaaaactttctgaccatcaagaccattctttcctgcttcaaccaagcagagtcaacaaggatcatgtgttttcagggttttaattgcactagttgatgaattaagtaaatgcctctgcctgggtagtttgtaataggtttatgggttggtttctcctacttagttcaagtcagagaaagaaaaaccaatatctatattcctattggccttctttaaatccctatga

SEQ ID NO: 2330 - DNA, 374 bp, Homo Sapiens
  misc_feature (47)..(47): n is a, c, g, or t
tttttttttttttttttgccccataaatatataattttcttaaatanaaagaggttgtgattgacagggtgggatgttgctggtcagctaggttaggtgaggatggtgaagccactgtctgacctggtgatgtggagacactgatgttgtgggagactctgccatcaggacctgtccgggcaagcatcacaggtgtgcagggcaggggcagggatgctcagggatgacagcagactgcagcaggcggagacagtgagaaagacaaactggaggtctcagggtcgggatgttgttggggtgctgacaaagattctctacttggccaaactctggccaggctctggaatcttctcctaggggcctccctcgtgccg

SEQ ID NO: 2331 - DNA, 1524 bp, Homo Sapiens
ggaatccactgcccctgcacaagtcagcactctgcctcagtcacctgctgccctttcctcaagcaacagagctgcagtctggggggcccaagggcagaactgcacccaggttcctgtttcctctgccagcgagctcacaaggaagacaacaggctctgctcagtattctttatctgatgtcacaagtaccacatcttctagggtggatgatcatgactcagaggaaatttgtcttgaccatctgtgtaagggttgtccgcttaatggtagctgcagcaaagtccacttccatctgccttaccggtggcagatgcttattggtaaaacctggacggactttgagcacatggagacgatcgagaaaggctactgtaaccccggaatccagctctgttctgtaggaagttatacaatcaattttcgggtaatgagttgtgattcctttcccatccgacgcctctccactccttcttctgtcaccaagccagccaattctgtcttcaccaccaaatggatttggtattggaagaatgaatctggcacatggattcagtatggagaagagaaagacaaacggaaaaattcaaacgtcgactcttcatacctggagtctctctatcaatcctgtccgaggggagttgtgccatttcaggcgggctcacggaactatgagctgagtttccaagggatgattcagacaaacatagcttccaaaactcaaaaggatgtcatcagaagaccaacatttgtgcctcagtggtatgtgcagcagatgaagagagggccagagtaagtgttctgaagcagctgtttgctgacagatgcttgagatgttcatgccctgggctcatcaagtcactcgtgaatctggagcctgttttcctgaaaagttcctgtttgcattactctgcagtttccatttgcattatcgatgagtaagatgcttgttaagcagcatggtgtgactgaaaggatactagatcggaaaatgaattttctttctgaaagggaagtctgagcgagtctcctaaatactctgggctttagcttctccagctgtgaagagctggattgatgcagtacacctaaggaataatcatatatactgggtttttgttttgctgtggattctttttttttttttttttttttttttagagggggtctcactttgttgcccaggctggtcttgaactcctgagctcaagtgatcctcctacctcagtctcccaaagtgctgggattacaggcatgagccaccgtgcctggctttgctgtggattcttttgggtgtcttttgttttcctacacgatttatagaggatgaggggcggagaaagagatagaaaaaagggatgagctagctgttagagcaagggttttggtgagagataatattgattgaagggattttaaaggaaatgttgctgtgggggattcattgtaactctccttgtgaactgctcagtaaactctacattgttcatgaacaaaaaaaaaaaaaaaaaaaaaaaaaaaaaaaaa

SEQ ID NO: 2332 - DNA, 4595 bp, Homo Sapiens
gcatgctcgacgcgccatgtgatggatatctgcagaattcggcttactcactatagggctcgagcggccgcccgggcaggtcgccagtatgttggagttggtggtggcttaagttttgaagggaggtagcatccgttggatatccacaccatccttctcgctgcaggctttcttggactccgtactgttggtgtaaccaaggcctggaggtctgggtggctcaggtttcctgcagccatgtttctgtacaacttaaccttgcagagagccactggcatcagctttgccattcatggaaacttttctggaaccaaacaacaagaaattgttgtttcccgtgggaagatcttggagctgcttcgcccagaccccaacactggcaaagtacataccctactcactgtggaagtattcggtgttatccggtcactcatggcctttaggctgacaggtggcaccaaagactacattgtagttggcagtgactctggtcgaattgttattttggaataccagccatctaagaatatgtttgagaagattcaccaagaaacctttggcaagagtggatgccgtcgcatcgttcctggccagttcttagctgtggatcccaaagggcgagccgttatgattagtgccattgagaaacagaaattggtgtatattttgaacagagatgctgcagcccgacttaccatttcatctcccctggaagcccacaaagcaaacactttagtgtatcatgtagttggagtagatgtcggatttgaaaatccaatgtttgcttgtctggaaatggattatgaggaagcaggcaatgatccaacaggggaagcagcagctaatacccagcagacacttactttctatgagctagaccttggtttaaatcatgtggtccgaaaatacagtgaacctttggaggaacacggcaacttccttattacagttccaggagggtcagatggtccaagtggagtactgatctgctctgaaaactatattacttacaagaactttggtgaccagccagatatccgctgtccaattcccaggaggcggaatgacctggatgaccctgaaagaggaatgatttttgtctgctctgcaacccataaaaccaaatcgatgttcttcttttgggctcaaactgagcagggagatatctttaagatcactttggagacagatgaagatatggttactgagatccggctcaaatattttgatactgtacccgttgctgctgccatgtgtgtgcttaaaacagggttcctttttgtagcatcagaatttggaaaccattacttatatcaaattgcacatcttggagatgatgatgaagaacctgagttttcatcagccatgcctctggaagaaggagacacattcttttttcagccaagaccacttaaaaaccttgtgctggttgatgagttggacagcctctctcccattctgttttgccagatagctgatctggccaatgaagatactccacagttgtatgtggcctgtggtaggggaccccgatcatctctgagagtcctaagacatggacttgaggtgtcagaaatggctgtttctgagctacctggtaaccccaacgctgtctggacagtgcgtcgacacattgaagatgagtttgatgcctacatcattgtgtctttcgtgaatgccaccctagtgttgtccattggagaaactgtagaagaagtgactgactctgggttcctggggaccaccccgaccttgtcctgctccttattaggagatgatgccttggtgcaggtctatccagatggcattcggcacatacgagcagacaagagagtcaatgagtggaagacccctggaaagaaaacaattgtgaagtgtgcagtgaaccagcgacaagtggtgattgccctgacaggaggagagctggtctatttcgagatggatccttcaggacagctgaatgagtacacagaacggaaggagatgtcagcagatgtggtgtgcatgagtctggccaatgtaccccctggagagcagcggtctcgcttcctggctgtggggcttgtggacaacactgtcagaatcatctccctggatccctcagactgtttgcaacctctaagcatgcaggctctcccagcccagcctgagtccttgtgtatcgtggaaatgggtgggactgagaagcaggatgagctgggtgagaggggctcgattggcttcctatacctgaatattgggctacagaacggtgtgctgctgaggactgtcttggaccctgtcactggggatttgtctgatactcgcactcggtacctggggtcccgtcctgtgaagctcttccgagtccgaatgcaaggccaggaggcagtattggccatgtcaagccgctcatggttgagctattcttaccaatctcgcttccatctcaccccactgtcttacgagacactggaatttgcatcgggttttgcctcggaacagtgtcccgagggcattgtggccatctccaccaacaccctacggattttggcattagagaagctcggtgctgtcttcaatcaagtagccttcccactgcagtacacacccaggaaatttgtcatccaccctgagagtaacaaccttattatcattgaaacggaccacaatgcctacactgaggccacgaaagctcagagaaagcagcagatggcagaggaaatggtggaagcagcaggggaggatgagcgggagctggccgcagagatggcagcagcattcctcaatgaaaacctccctgaatccatctttggagctcccaaggctggcaatgggcagtgggcctctgtgatccgagtgatgaatcccattcaagggaacacactggaccttgtccagctggaacagaatgaggcagcttttagtgtggctgtgtgcaggttttccaacactggtgaagactggtatgtgctggtgggtgtggccaaggacctgatactaaacccccgatctgtggcagggggcttcgtctatacttacaagcttgtgaacaatggggaaaaactggagtttttgcacaagactcctgtggaagaggtccctgctgctattgccccattccaggggagggtgttgattggtgtggggaagctgttgcgtgtctatgacctgggaaagaagaagttactccgaaaatgtgagaataagcatattgccaattatatctctgggatccagactattggacatagggtaattgtatctgatgtccaagaaagtttcatctgggttcgctacaagcgtaatgaaaaccagcttatcatctttgctgatgatacctacccccgatgggtcactacagccagcctcctggactatgacactgtggctggggcagacaagtttggcaacatatgtgtggtgaggctcccacctaacaccaatgatgaagtagatgaggatcctacaggaaacaaagccctgtgggaccgtggcttgctcaatggggcctcccagaaggcagaggtgatcatgaactaccatgtcggggagacggtgctgtccttgcagaagaccacgctgatccctggaggctcagaatcacttgtctataccaccttgtctggaggaattggcatccttgtgccattcacgtcccatgaggaccatgacttcttccagcatgtggaaatgcacctgcggtctgaacatccccctctctgtgggcgggaccacctcagctttcgctcctactacttccctgtgaagaatgtgattgatggagacctctgtgagcagttcaattccatggaacccaacaaacaaaagaacgtctctgaagaactggaccgaaccccacccgaagtgtccaagaaactcgaggatatccggacccgctacgccttctgagccctcctttcccggtggggcttgccagagactgtgtgttttgtttcccccaccaccatcactgccacctggcttctgccatgtggcaggagggtgactggataattaagactgcattatgaaagtcaacagctctttcccctcagctcttctcctggaatgactggcttcccctcaaattggcactgagatttgctacacttctccccacctggtacatgatacatgaccccaggttccagtgtagaacctgagtcccccattccccaaagccatccctgcattgatatgtcttgactctcctgtctacttttgcacacacccttaatttttaattggttttcttgtaaatacagttttgtacaatgttatctctgtgggaggaaggaggcaggctgtggtgggactgggtagggtatagtatcactcctgagttccactgctctagaatctaaccagaaatagaaacctagtttttaaggtgactggcatccatgtgtcttgttctggagatgaggatgtaggtgggaggtttgaacccaagttagagcaggaagaactgagtagactccttccttccagataccgacttggacttgcggcactctgtggctccccacccccaggtctgtggtggtttctttgttttttcctggttctttttgctgtgctgatgaaacatgacctcaataaccatgtgtata

SEQ ID NO: 2333 - DNA, 451 bp, Homo Sapiens
ttttttaagttttccaataaatttaatcaataaaatatatactgaaatatcacataaaaattaacttacacttcaaagattgtgcagctgacaactcccccaaatcccccaaccctcaggccaaacaagataaaaagaaacaagaaaaaagttgtaacatgaaattgacttgttttgcttggaaataagattataaattagtaaatcaaaatcttgacctctcatgataatcgtggtgtgctgcaggcatcacgatgaaggcggggctgtctgtactcctgtgcttgcgacactaatactgttctctccactgcaccggagcacctttgttcggtatatatatgcctttgttacctctgactcacgtcgcttaaagaccagttttgcaaatgttgttttttaaaagcatacttgtcaaaactgtgatgtaagagaataaaatccttggagg

SEQ ID NO: 2334 - DNA, 1800 bp, Homo Sapiens
tattgaagatgctcttgttttaaacaaggcctctttagacagaggctttgggcgttgccttgtatataaaaatgctaaatgtacgttgaaacgatacaccaatcagacttttgataaagtgatggggcccatgttggatgctgctacaaggaaacctatctggcgacatgaaatcttagatgcagatggtatttgttctccaggtgagaaagtagaaaacaaacaagtgcttgtaaataagtccatgcccacagtgactcagattcctttggaaggaagtaatgtaccacagcaaccacagtacaaagatgtacccataacctacaaaggagcaacagactcatatattgaaaaagtgatgatatcttcaaatgctgaagatgcttttctgatcaaaatgctgctgagacagacaaggcgtccagaaattggagacaaattcagcagtcgtcatgggcaaaaaggtgtttgtggcttgatcgtcccccaggaagacatgccattttgtgattctggcatctgtccggacatcatcatgaacccacacggctttccatcacgaatgacggtggggaagctcattgagctgctggctggcaaggccggtgtgctggacggcagattccactacggcactgcgtttggaggcagtaaagtgaaggatgtgtgtgaggacctcgttcgccatggttataactacttggggaaagactatgttacatccggcatcacaggtgagcccttagaagcatacatctattttggccccgtgtactatcagaagctgaaacacatggtgctagataaaatgcatgcccgggcccggggcccacgagccgtccttaccaggcaacccactgaaggacggtctcgtgatggtggcttgcgtctcggggaaatggaacgtgactgtttaatcggttatggagccagtatgcttttgctagagagactaatgatttcaagtgatgcctttgaggttgatgtctgtgggcagtgtggacttctggggtattctggctggtgccattactgcaagtcatcctgccacgtgtcttccctccgtattccgtatgcctgcaagctgctcttccaggaactacagtctatgaacatcatccccaggttaaaactgtccaagtacaatgaatgaggatggaaaaaatgattattaaagagaacaagtgatacatccaatgcaacggaaagcagaagggatttaggactacgtctcctcctgtgaagaattcccttgcgtattctctctctaaaacaaccaaaaaaaaatggagaggctttttatatactctaagactggctaaacaaccttgatcattgagcctcgagccatgggagagatgctgaccatgtggactgcaaggctgcttgattcacagatggatgtgacctaaaggataaataagctattacttatgtgctgatctcttgacattcactcattagaagaccttactccttcaagcaaatgtttggggtcaaatttaccatatcttctggctaaccatattcaagattcttctgaaacttggaggatgtaaagaatccatttgatttggtcagcctggcttttgtcgtggtggctggctcggataaattttcccaacaattaaatcttgcctttacacacccaaactttgtaattttagtcttggtgaaatataatgaatttgttcctaccttgtcaagcaagaatgtcgtcttctcctatggactcaattgctattattttaaacctgcatgattgtaccatgcaatactattcgttaaatatctgaatct

SEQ ID NO: 2335 - DNA, 452 bp, Homo Sapiens
tcaaatactagaattattatttaatgagaaaaaaatccacgtgtatacaacatttcaaaacagaagttaaatcattaaatagtactttttatttaaatgtttataaggcagatctatgagaatgatagaaaacatggtgtgtaatttgatagcaatattttggagattacagagttttagtaattaccaattacacagttaaaaagaagataatatattccaagcagatacaaaatatctaatgaaagatcaaggcaggaaaatgagtataactaattgacaatggaaaatcaattttaatgtgaattgcacattatcctttaaaagctttcaaaagaaagaattattgcagtctagttaattcagacagtgttaaatggtatcaggataaagaactgaagggcagaaagaattaattttcacttcatgtaacacacccagatttacaatgg

SEQ ID NO: 2336 - DNA, 2505 bp, Homo Sapiens
gctgagcgccggaggagcgtaggcagggcagcgctggcgccagcggcgacaggagccgcgcgaccggcaaaaatacacgggaggccgtcgccgaaaagagtccgcggtcctctctcgtaaacacactctcctccaccggcgcctccccctccgctctgcgcgccgcccggctgggcgcccgaggccgctccgactgctatgtgaccgcgaggctgcgggaggaaggggacagggaagaagaggctctcccgcgggagcccttgaggaccaagtttgcggccacttctgcaggcgtcccttcttagctctcgcctgcccctttctgcagcctaggcggcccaggttctcttctcttcctcgcgcgcccagccgcctcggttcccggcgaccatggtgacgatggaggagctgcgggagatggactgcagtgtgctcaaaaggctgatgaaccgggacgagaatggcggcggcgcgggcggcagcggcagccacggcaccctggggctgccgagcggcggcaagtgcctgctgctggactgcagaccgttcctggcgcacagcgcgggctacatcctaggttcggtcaacgtgcgctgtaacaccatcgtgcggcggcgggctaagggctccgtgagcctggagcagatcctgcccgccgaggaggaggtacgcgcccgcttgcgctccggcctctactcggcggtcatcgtctacgacgagcgcagcccgcgcgccgagagcctccgcgaggacagcaccgtgtcgctggtggtgcaggcgctgcgccgcaacgccgagcgcaccgacatctgcctgctcaaaggcggctatgagaggttttcctccgagtacccagaattctgttctaaaaccaaggccctggcagccatcccacccccggttccccccagcgccacagagcccttggacctgggctgcagctcctgtgggaccccactacacgaccaggggggtcctgtggagatccttcccttcctctacctcggcagtgcctaccatgctgcccggagagacatgctggacgccctgggcatcacggctctgttgaatgtctcctcggactgcccaaaccactttgaaggacactatcagtacaagtgcatcccagtggaagataaccacaaggccgacatcagctcctggttcatggaagccatagagtacatcgatgccgtgaaggactgccgtgggcgcgtgctggtgcactgccaggcgggcatctcgcggtcggccaccatctgcctggcctacctgatgatgaagaaacgggtgaggctggaggaggccttcgagttcgttaagcagcgccgcagcatcatctcgcccaacttcagcttcatggggcagctgctgcagttcgagtcccaggtgctggccacgtcctgtgctgcggaggctgctagcccctcgggacccctgcgggagcggggcaagacccccgccacccccacctcgcagttcgtcttcagctttccggtctccgtgggcgtgcactcggcccccagcagcctgccctacctgcacagccccatcaccacctctcccagctgttagagccgccctgggggccccagaaccagagctggctcccagcaagggtaggacgggccgcatgcggcagaaagttgggactgagcagctgggagcaggcgaccgagctccttccccatcatttctccttggccaacgacgaggccagccagaatggcaataaggactccgaatacataataaaagcaaacagaacactccaacttagagcaataaccggtgccgcagcagccagggaagaccttggtttggtttatgtgtcagtttcacttttccgatagaaatttcttacctcatttttttaagcagtaaggcttgaagtgatgaaacccacagatcctagcaaatgtgcccaaccagctttactaaagggggaggaagggagggcaaagggatgagaagacaagtttcccagaagtgcctggttctgggtacttgtccctttgttgtcgttgttgtagttaaaggaatttcatttttaaaagaaatcttcgaaggtgtggttttcatttctcagtcaccaacagatgaataattatgcttaataataaagtatttattaagactttcttcagagtatgaaagtacaaaaagtctagttacagtggatttagaatatatttatgttgatgtcaaacagctgagcaccgtagcatgcagatgtcaaggcagttaggaagtaaatggtgtcttgtagatatgtgcaaggtagcatgatgagcaacttgagtttgttgccactgagaagcaggcgggttgggtgggaggaggaagaaagggaagaattaggtttgaattgctttttaaaaaaaaaagaaaagaaaaagacagcatctcactatgttgccaaggctcatcttgagaagcaggcgggttgggtgggaggaggaagaaagggaagaattaggtttgaattgcttttttaaaaaaaaa

SEQ ID NO: 2337 - DNA, 6137 bp, Homo Sapiens
ggccgcgtgctggtggcgcccgccagccggcccgggagaggggacttgagcgcttcgcggccggtgcgcagcgcggctccggccccgcagtctgtctgcaagtggccatccccgcccccgactcctgcggccggtgcgggagctgtcagctgcacgttgcgggggtaccggagaagccggggttgccttctcccggttctgtgcgctaaccccggagcccggccccggggaactagggagcgtctccggctgcacagcgctcaggttttagggtttcctttgggccacccaaaatgttttttaaatactttggataagagctaaaccacctgccactggggacttccatactctcggctcccttgtcatctgatggcattttgattgtctcgaggccaagtgacttgctgtccatgatgagtgatgagaagaaccttggtgtgtcccaaaaattggtatcaccttcaaggagcacaagtagctgctcttccaagcaaggaagtcgacaggacagctgggaagtggtggaaggactgaggggggagatgaattacacccaggagccaccagttcagaaaggatttttgctgaaaaagaggaagtggcccttaaaaggctggcataagagattcttctatctggacaaaggaatcttgaaatatgccaagagccaaaccgatatagagagagagaagctgcatggctgcattgatgtcgggctctcagtgatgtctgtaaagaagtcatcaaaatgcatagaccttgacaccgaggagcacatctaccatctgaaggtcaagtcagaagaagtctttgatgagtgggtatcgaaacttcgccaccacagaatgtatcgtcagaatgaaattgccatgtttccacatgaagttaaccactttttctcagggtccaccatcacagactcttcatctggggtgtttgactccatttcaagtaggaagcgtagcagtatatcaaagcagaatttatttcaaactggaagcaatgtatcattttcttgtggtggtgagacacgagttccattatggttacagtcttcagaggacatggaaaaatgctccaaagacctggcgcactgtcatgcctacctggtagaaatgagccagctcctgcaaagcatggacgtcctgcatcggacatactcggcaccagctatcaacgccatccagggtggatcttttgaaagtcccaaaaaggaaaaaagatcgcacaggaggtggcggtccagagctattggcaaagatgctaaaggaacactgcaggtcccgaaacctttttctggcccagtaagactacactcctccaatcctaatttgtcaacactagattttggagaagagaaaaattattctgatggctctgaaacctcatcagagttttctaaaatgcaagaagatctgtgtcatattgcccataaagtttacttcactttaaggtcagcttttaatatcatgtcagcggagagagagaaactgaagcagctgatggagcaggatgcctcctcctccccgtctgctcaggtcattggtctgaagaacgccctgtcatccgccctagcacaaaacacagatcttaaagaacgcttacgcagaatccatgccgagtctctgctcctcgactcccccgctgtcgccaagtcgggtgacaatctggcagaggaaaactccagagatgaaaaccgagctctagttcatcagctttctaatgaaagtagactctccatcactgactccctttctgagttttttgatgctcaggaagttctgttatctccaagctcttcagaaaacgagatttctgatgatgactcatatgtcagtgacataagtgataatctttccttagataatctcagtaatgatttagataatgagagacagaccttggggcctgtccttgatagtggtcgggaagcgaagtcccggagaagaacgtgcctgccggcgccctgcccgagcagcagtaacatcagcctgtggaacatcctgaggaacaacatcgggaaggacctgtccaaggtggccatgccggtggagctgaacgagcccctgaacacgctgcagaggctctgcgaggagctggagtacagcgagctcctggacaaggccgcgcagattcccagccccctggaaaggatggtatatgtggcagcctttgccatatcagcgtatgcatctagctactaccgagctggaagcaagccatttaatccggttcttggagaaacatatgaatgtattcgggaggacaagggcttccagtttttttcagaacaggtcagccaccatccgcctatctctgcgtgtcatgctgagtctagaaattttgttttctggcaagatgtgagatggaaaaacaaattctggggcaaatccatggaaattgttccaattggcacaacccatgtgactctgccagtttttggggatcattttgagtggaacaaagtgacctcttgcatccataacatcttaagcgggcagaggtggattgagcactatggagagattgtcatcaagaacctgcatgatgattcctgctactgcaaagtgaattttataaaggcaaaatactggagcactaatgcccatgagattgaaggcacagtgtttgacaggagtggaaaagcggttcatcggctgtttgggaaatggcatgaaagcatctactgtggcggcggctcctcttctgcctgtgtatggagagcaaatcctatgccgaaaggctacgagcaatactatagcttcacacagtttgcgctggaattaaatgaaatggatccatcatcaaagtctttattgccacctactgacactcgatttaggccagaccagaggtttctagaggaagggaacttagaagaagctgaaatacaaaagcagaggattgaacaactgcagagagaaaggcggcgggtcttagaagaaaatcatgtggagcaccagcctcggtttttcaggaaatccgacgatgactcttgggtgagcaacggcacctatttggaacttagaaaagatcttggtttttccaaactggaccatcctgtcttatggtgaaaaagtaaagaagaaagataacattagtgtatttctcctgtgcttgccttctgaagtggcacaaacctgtgtttatatatttaaaagatactctaggatgatcacttgtgcttagcttagcattgtaactctttaagtctatattttcctcagtgcgtttctttacaatttcaaatgttaccctgattgtttatatgaatgtagaacaccttgacatttctttttatatataaactatttaataaaaatgaaagattgaatgttcatgtgtgggttaaaaaaagaagctttaacactaattttccaaaggttagggaagattccaattaaatttatgccttataaaattatgttgtagaaaaaaaatcaacctctcccaggtgcattaagaaataagaattcccagggttactcacccatgcgtaagctacccaagtttaatttggtagctgaaatatctttttgcctcagacagctcttgaattgctcatacagaacaattctgctggtgctggagtctgaagaatattttcatttgcattttagtggttagggagaggatataagattaatggaatgtatatttttatataagacgtatacggcaccttcttgaaaaggaagcatttgaacttgttcctccctatagttctattgccttatatgcaaaattgtaccctgttgctcagagaaattattcataagagaaaagaattccaattaattaaatatcacaatagcatcccagagagacagtaggaaatttctccttagtgagagctgagtccttgagaagttaagagactgtttcctgcttcccaccccaccccgttttttgtccctccgtttgatcacctccctgttgagtatggaatgtcccagtttaatataaaacatacagtttattccacacagcagtttgactttgtaaaagtttagcaaaataactgattgttttggataactcaacatgtttttcttaaatgctgttttagtattttctacctcttaataagcaccatattttagatcttgtataaaaagttgccatctgccttatagacaaatgtagagaattgatgttcttgctttgtgttgtgttctggtaaagctttaagtgagtgtcttacccctttcctatactttcttgttatccatatcattcttttgtgagttttgcagcagtcttgaataatacagattataactactgaaaggggaaccttcgtctttttaaatgtgtcatttcacattacaataatatgtgtagtagttgaattgtgttatcaaagcatgtccaacttctgtccagatgacattaaaaccaaagcctaattgttaagcctcttattctaaagtccatagcaatgctatggaatatcaagtataatgatgtagtaaaaagatttctccagaaaacactttgagatacttaaagaaattcagagcatatcgaatgttatgaatgaagagtaaaataattacaggaaaagaatgcatgatttttcattgtcacaccaaataaccagttggacaatattgcattttcaaaatggagagttatttaaagtggatgtgtagccttctggaatctgcacgtgactggcattttaaaacaactcattaaatattggattcattttatcgagatgccaagatgaacacaatgtgaatatcatttccatttctaagcagttgaatgacacagtcagattctttggtgtatgctttgttctttccatctcaagcatttatccaaattctgctcacagacatgaggaagcaggctgtagatttaagggcactcaaggggaaaacaaatgtagtttccacagtgtgaggataaatgtagaatcgtggtaatattggctgttaaattggcctgctccagagactggctcaaaaaagaaagaagcaacgaaaacaaaatgcacagcctgaatggacgtagcactgtcatgtggcatttggaaaatctttaattatcctaatgttatttcacttgcccttatgctttattttagagtcccagggacaactggatgaaacattacgtctgtagtcatcttatttgagatgggggtgggaacgaattaaaatatgatagagaactatatgcagattttaaaatctagtcagtactagcatctataaagggcttttctgaaatttaaacagcttggtgatgcatcctgatattataagcttaaaactatcttgagggggaaatgacttcttttctccttctgtcccttttctcaaaagcatctttcccccaaatgtatgtctctaggacattttatagttttaagaggaagaaaacagaaacgtggcatcatttgggaagaaccaaggtagaatttaattttctggactttaaatctcctggttaaataatgctaatcactgtaccatttgagttacatgttttaacctcttttttttttctaattattccatccaaaatttctggtgaattacacagaaatttttggaaatgggactttgtgcaggtaaccaccctgcacttcaggtaatgttcctgtcacagctgtcgactaccccacgctgcaggaaatccattcagaaatgagctaacagtctccagtgtagcaggagagccagtcacttccctccccaggccccaaagcaccccaaggctggtattccttgagtcataggtattaataataaaagcctcaatgcagcttctccatgtagttcctctcctacaagccaggtggattctggtcctaactaaagagatgggagttcacctgagggcaagaagtacccaggatgcccaaacagccgcacaggtgtcctgtgcttcctgtgagacttcctgggggaaatatacaaactaatatattttttaatgtttacgtcatttacactgctgcttttctcatattctgcttttaattacttgtagtaaatcatttgtttgggcttcaagcactgtcttccatctgcatcttccagatttatcatgagtgatcttgttctactgttaaagatgtcaagcctaaaaagtaataaagtttttatttggctgtt

SEQ ID NO: 2338 - DNA, 1243 bp, Homo Sapiens
taaaaagcaaaagaattcgcggccgcgtcgacacgggcttccccgaaaaccttccccgcttctggatatgaaattcaagctgcttgctgagtcctattgccggctgctgggagccaggagagccctgaggagtagtcactcagtagcagctgacgcgtgggtccaccatgaactggagtatctttgagggactcctgagtggggtcaacaagtactccacagcctttgggcgcatctggctgtctctggtcttcatcttccgcgtgctggtgtacctggtgacggccgagcgtgtgtggagtgatgaccacaaggacttcgactgcaatactcgccagcccggctgctccaacgtctgctttgatgagttcttccctgtgtcccatgtgcgcctctgggccctgcagcttatcctggtgacatgcccctcactgctcgtggtcatgcacgtggcctaccgggaggttcaggagaagaggcaccgagaagcccatggggagaacagtgggcgcctctacctgaaccccggcaagaagcggggtgggctctggtggacatatgtctgcagcctagtgttcaaggcgagcgtggacatcgcctttctctatgtgttccactcattctaccccaaatatatcctccctcctgtggtcaagtgccacgcagatccatgtcccaatatagtggactgcttcatctccaagccctcagagaagaacattttcaccctcttcatggtggccacagctgccatctgcatcctgctcaacctcgtggagctcatctacctggtgagcaagagatgccacgagtgcctggcagcaaggaaagctcaagccatgtgcacaggtcatcacccccacggtaccacctcttcctgcaaacaagacgacctcctttcgggtgacctcatctttctgggctcagacagtcatcctcctctcttaccagaccgcccccgagaccatgtgaagaaaaccatcttgtgaggggctgcctggactggtctggcaggttgggcctggatggggaggctctagcatctctcataggtgcaacctgagagtgggggagctaagccatgaggtaggggcaggcaagagagaggattcagacgctctgggagccagttcctagtcctcaactccagccacctgccccagctcgacggcactgggccagttccccctctgctctgcagctcggtttccttttctagaatggaaatagtgagggccaatgc

SEQ ID NO: 2339 - DNA, 466 bp, Homo Sapiens
tttgtgacactgaattctttatttaaaaaaatttttgtaacacacagtacctcctcttctcttctatttttaggaagaagttataacaagttttaaatatctcaattctgaaaaacaataggcttttaaaaaataagacttgattaccagaaacaagtaatatgtagttacataaccattttcatatcactactcatttccattatttaccaattcaatttttgatgcaacctgggaaacaattaagcagtcactagacacctgttttagaatctgaagaaattattattcaccacaggaatctaatgatatatatatttgcatatatttaaaatttcatgagggaaaaggtaataaactattctagttattttataccaaatattgatattcctagtcaaaacaacaaggaattaagatctttctccaggtgaactgctgactatatagaagctatttccagcac

SEQ ID NO: 2340 - DNA, 214 bp, Homo Sapiens
ttttttttttttttttttttttgctcaccaaaaacttgctttaatgtctaaatgttctaaagatgagaggggggagggaaatgcataaaaagcagtgcctcatggaaaacacacacatgtgcatgcacacacacccaaagtcctttgtgctttaaacattcctggtaacttcactgaccatcctggccggaatctttgaaatggttaaccaaga

SEQ ID NO: 2341 - DNA, 3492 bp, Homo Sapiens
cagctaagacccggagaggtggaatttcactttgaaattcccttgcctcgtgagggccggcgctgggcatgctcagtagccgcggcgctgctgctgggctgctgggctggcgcggagtccaccctgccgtctccgccttggcttctgggcgtccagaaggccaggcatttgccgcctctgagcgcttctgttccccttacccgcaacctcctactgctcttcctctctccctctcttagggaggttgaagctggtgctggtttctgtcggcgccacagactgactgctctgcaaaccccagccgaggacctgaatcccggagactagaagacccttggcggtggctctttctaatagcactttacctgaagtggggtcgtggtggagtttctcctccacctctcaatgcaaacactatgcggagagcagtctgcttccctgcgctgtgcctgctccttaatcttcacgctgcagggtgcttttcaggaaacaatgatcattttttggcaattaatcagaagaagagtgggaagccggtattcatttataagcattcacaagacattgagaagagcctggatatagccccacaaaaaatctacagacatagctaccattcctcttccgaagctcaagtaagcaaacgccaccagattgtcaattcagcatttcctagacccgcatatgacccgtctctcaatctgctggccatggatggtcaagatcttgaagtggaaaatctcccaatcccagcagcaaatgtaattgtggtgacactgcaaatggatgtaaacaagctgaacataaccttgcttcggatcttccgccaaggagtggctgcagctttaggactcttaccccagcaagtgcacatcaatcgcctcattggaaagaagaacagtattgaactgtttgtgtctcccataaaccgaaaaacaggaatttctgatgctctgccctctgaggaagttcttcgttcacttaatatcaatgttttgcatcaaagtttatcccagtttggaattacagaagtctctcctgagaaaaatgttttacaagggcagcatgaagcggacaaaatctggagcaaagaaggattttatgctgttgtcatttttctcagcatctttgttattatagtaacgtgtttgatgattctttacagattaaaagaaagatttcagctttccttaagacaagacaaagagaaaaaccaggagatccacctatcgcccatcacattacagccagcactgtccgaggcaaagacagtccacagcatggtccaacctgagcaggccccaaaggtactgaatgttgtcgtggaccctcaaggccgaggtgctcctgagatcagagctaccaccgctacctctgtttgcccttctcctttcaaaatgaagcccataggacttcaagagagaagagggtccaacgtatctcttacattggacatgagtagcttggggaacattgaaccctttgtgtctataccaacaccacgggagaaggtagcaatggagtatctgcagtcagccagccgaattctcacaaggtctcagctgagggacgtcgtggcaagttcacatttactccaaagtgaattcatggaaataccaatgaactttgtggatcccaaagaaattgatattccgcgtcatggaactaaaaatcgctataagaccattttaccaaatcccctcagcagagtgtgtttaagaccaaaaaatgtaaccgattcattgagcacctacattaatgctaattatattaggggctacagtggcaaggagaaagccttcattgccacgcagggccccatgatcaacaccgtggatgatttctggcagatggtttggcaggaagacagccctgtgattgttatgatcacaaaactcaaagaaaaaaatgagaaatgtgtgctatactggccggaaaagagagggatatatggaaaagttgaggttctggttatcagtgtaaatgaatgtgataactacaccattcgaaaccttgtcttaaagcaaggaagccacacccaacatgtgaagcattactggtacacctcatggcctgatcacaagactccagacagtgcccagcccctcctacagctcatgctggatgtagaagaagacagacttgcttcccagggccgagggcctgtggttgtccactgcagtgcaggaataggtagaacagggtgttttattgctacatccattggctgtcaacagctgaaagaagaaggagttgtggatgcactaagcattgtctgccagcttcgtatggatagaggtggaatggtgcaaaccagtgagcagtatgaatttgtgcaccatgctctgtgcctgtatgagagcagactttcagcagagactgtccagtgagtcattgaagacttgtcagaccatcaatctcttggggtgattaatcaaattacccacccaaggcttctagaaggagcttcctgcaatggaaggaaggagaagctctgaagcccatgtatggcatggattgtggaagactgggcaacatatttaagatttccagctccttgtgtatatgaatgcatttgtaagcatcccccaaattattctgaaggttttttgatgatggaggtatgataggtttatcacacagcctaaggcagattttgttttgtctgtactgactctatctgccacacagaatgtatgtatgtaatattcagtaataaatgtcatcaggtgatgactggatgagctgctgaagacattcgtattatgtgttagatgctttaatgtttgcaaaatctgtcttgtgaatggactgtcagctgttaaactgttcctgttttgaagtgctattacctttctcagttaccagaatcttgctgctaaagttgcaagtgattgataatggatttttaacagagaagtctttgtttttgaaaaacaaaaatcaaaaacagtaactattttatatggaaatgtgtcttgataatattacctattaaatgtgtatttatagtccctcctatcaaacaattacagagcacaatgattgtcattgggtatatatgtatttactctctattattgggcataaaggtggcttctgctccagaactctatccactgtatttccacatcgtgagtcattttactttaaaagggaaaaacaaatttgtagcaactctgaagtatcaagagttttaactacttgtctctcttttgctaagaagggatttttgaatatgctatctacctggaatctctctctcaacaaaaggtatatgccttcaggaatgatataatctgtcccattttcgaggctccttataaggacatttccatgtatgtccttacatttctgaaagctttcaatcttcaagagccaaaaaaaattaaaataactaccctcagcaaacactagctgttctgctcatatatgaatttttaatgcagcaatgttgactttgtttcatactgccaataaactcttaatact

SEQ ID NO: 2342 - DNA, 1783 bp, Homo Sapiens
  misc_feature (11)..(11): n is a, c, g, or t
  misc_feature (52)..(52): n is a, c, g, or t
  misc_feature (57)..(57): n is a, c, g, or t
acgcttgtcanttacgtgagcgcagccaatcagcactagaggttgggatatntcggnccaaaggagaacggrgacttgtggggaygctcctgcgcaccaatgaatgtgcatggagatggagaggcgggcctgcaagtgcgaacaagccaatcacggaatcccggcggccggcggcccgggaggcagtcgcgcgctcgcatccccaagatggcggccgttaaggacagttgtggcaaaggagaaatggccacagggaatgggcggcggctccacctggggattcctgaggccgtgtttgtggaagatgtagattccttcatgaaacagcctgggaatgagactgcagatacagtattaaagaagctggatgaacagtaccagaagtataagtttatggaactcaaccttgctcaaaagaaaagaaggctaaaaggtcagattcctgaaattaaacagactttggaaattctaaaatacatgcagaagaaaaaagagtccaccaactcaatggagaccagattcttgctggcagataacctgtattgcaaagcttcagttcctcctaccgataaagtgtgtctgtggttgggggctaatgtaatgcttgaatatgatattgatgaagctcaggcattgttggaaaagaatttatcgactgccacaaagaatcttgattccctggaggaagaccttgactttcttcgagatcaatttactaccacagaagtcaatatggccagggtttataattgggatgtaaaaagaagaaacaaggatgactctaccaagaacaaagcataatgctggcaattaaaaatgtggtttagttttccaaacatgttatcttaaatacccctttatccttacaggttgacataactttgaatgttttaacagcaagaattttaagaaaagataaacaccattttatttatttataaaaacaaaattagtttcaaatatttttgacattgtgatttttttttccacatttctcagcaaagctaatggtattttaatcattatttttgcctgtcataagaaaactcttagctgaaatggccgaaaactgtgagacatgctatggaagctgaatgccggacgctagcacagtttactttttccctttctaattggctgatgttactctcacttgatgtggttaaaccatgttagaggtagagaagacagacagtttgaatattagtaaacttgttattctttagtatatttaggacttagtggtwctctgttgctattgtcttctataagtggagtttcatgacttactgcttaacgaataactaagtactatgatattctggacattttaggaaatggtaatttgccttgctacacattaagagggctattaagactacattttttctaacctcagataagtgcagtgtctttgcaatgccaacataagggagatcttggccaacgtgaaataaaattactcattcaaaactctgcctaaggtgattttgtagttcttaacagttctccagagcatcttgaacaggaatattaagataaatgtgaatctgcaatggctgaaaagagttgtgagcttttttattcatgataaaaccttataggaatagtataaaaaatccctgtggaaagctactagtacattgaccagcgctgggtgatacagattctgataaaaacataaatgtattagttcatctccatgtagtaaaaagtatacttatacaatgttttgtacttgtatttcatgaaattaaaacagtgatgctaaaactaaaaaaaa

SEQ ID NO: 2343 - DNA, 405 bp, Homo Sapiens
  misc_feature (13)..(13): n is a, c, g, or t
  misc_feature (21)..(21): n is a, c, g, or t
  misc_feature (24)..(24): n is a, c, g, or t
  misc_feature (62)..(62): n is a, c, g, or t
  misc_feature (100)..(100): n is a, c, g, or t
  misc_feature (105)..(105): n is a, c, g, or t
  misc_feature (159)..(159): n is a, c, g, or t
  misc_feature (166)..(166): n is a, c, g, or t
  misc_feature (284)..(284): n is a, c, g, or t
  misc_feature (298)..(298): n is a, c, g, or t
  misc_feature (308)..(308): n is a, c, g, or t
  misc_feature (371)..(371): n is a, c, g, or t
  misc_feature (384)..(384): n is a, c, g, or t
attcggcacaggngtggtccncantgagctgccgtagcggacccagcacagccaggagcgtncgggatgagctcagccgcggccgaccactgggcgtggntgctngtcctcagcttcgtgtttggatgcaatgttcttaggatcctcctcccgtccttntcatccntcatgtccagggtgctgcagaaggacgcggacagggagtcacagatgagagcggagatccaggacatgaagcaggagctctccacagtcaacatgatggacgagtttgccagatatgncaggctggaaaganagatcaacangatgacggataagctcaaaacccatgtgaaagctcggacagctcaattagccaagataaagtnggtgataagtgtncgctttgttacgtatttgcag

SEQ ID NO: 2344 - DNA, 528 bp, Homo Sapiens
  misc_feature (102)..(102): n is a, c, g, or t
tcgacaagaacacagaccacatccctgtcctcatgcggcttatgttttctggaggaaagtggagacacaagtccttggctttagggctcccccggctgggcnatgtgcagtccggtcagggcgggaggggaaatgcaccgctgcatgtgaaccttaccagcccaggcggatgccccttccccttagcactaccctggcctcctgcatcccctcgcctcatgttcctcccaccttcaaagaacgaagagccccatggcgccagccctgccctgggaacctagcagccttccagacctcaggggctgaggcagactattagggcagggctgactttggtgacactgcccattccctctcaggccagctcaggtcacccgggcctctgacccaggcctgtcactttgagaggggcaaaactgagaggggcttgtcctagagaaagagaacaaggagcttgccaggcttcatgtagccgacacacgtctcaggattttaagtccacattggcctcacactaccagggccaat

SEQ ID NO: 2345 - DNA, 168 bp, Homo Sapiens
  misc_feature (19)..(19): n is a, c, g, or t
  misc_feature (21)..(21): n is a, c, g, or t
  misc_feature (23)..(23): n is a, c, g, or t
  misc_feature (25)..(25): n is a, c, g, or t
  misc_feature (45)..(45): n is a, c, g, or t
  misc_feature (114)..(114): n is a, c, g, or t
  misc_feature (163)..(163): n is a, c, g, or t
ttcggcactagggagccanangntncttaacggcgtttatgtccnttgctgtctgaggggcctcagctctgaccaatctggtcttcgtgtggtcattagcatgggcttcgtganacagatacagcttttgctctggaagaactggaccctgcggaaaaggcanaagat

SEQ ID NO: 2346 - DNA, 5786 bp, Homo Sapiens
gccgcccctgagcagcctcgccttcgcctcccgcgtttcctgccgtccgccctcccccggccgagctccaggggctgccgcctagcagctcccggcgggagagcggttcagagcgcgcacgggggcgggcggaggcggcccggtgcggggcggccgcgctggagagaggcgcgcgcggagacgccggcccccctctccgcgtttgctcgcttgctccccgcctcccgcactccgctcgctcccaccccttcccggcgtgattgatccgtcacgggcgccgccgctgccgccgccgccgcggccgttctgagccgagccggaaccctagcccgagacggagccggggcccgggccggcgccattgcgcgggcgccgcgggaagaccttggcgcggggcggcgggccgggccaggccatgcgggccgagtgagccggcgcccgcagcccgcggcgcggcatggcttccccgcggagctccgggcagcccgggccgccgccgccgccgccaccgccgcccgcgcgcctgctactgctactgctgctgccgctgctgctgcctctggcgcccggggcctggggctgggcgcggggcgccccccggccgccgcccagcagcccgccgctctccatcatgggcctcatgccgctcaccaaggaggtggccaagggcagcatcgggcgcggtgtgctccccgccgtggaactggccatcgagcagatccgcaacgagtcactcctgcgcccctacttcctcgacctgcggctctatgacacggagtgcgacaacgcaaaagggttgaaagccttctacgatgcaataaaatacgggccgaaccacttgatggtgtttggaggcgtctgtccatccgtcacatccatcattgcagagtccctccaaggctggaatctggtgcagctttcttttgctgcaaccacgcctgttctagccgataagaaaaaatacccttatttctttcggaccgtcccatcagacaatgcggtgaatccagccattctgaagttgctcaagcactaccagtggaagcgcgtgggcacgctgacgcaagacgttcagaggttctctgaggtgcggaatgacctgactggagttctgtatggcgaggacattgagatttcagacaccgagagcttctccaacgatccctgtaccagtgtcaaaaagctgaaggggaatgatgtgcggatcatccttggccagtttgaccagaatatggcagcaaaagtgttctgttgtgcatacgaggagaacatgtatggtagtaaatatcagtggatcattccgggctggtacgagccttcttggtgggagcaggtgcacacggaagccaactcatcccgctgcctccggaagaatctgcttgctgccatggagggctacattggcgtggatttcgagcccctgagctccaagcagatcaagaccatctcaggaaagactccacagcagtatgagagagagtacaacaacaagcggtcaggcgtggggcccagcaagttccacgggtacgcctacgatggcatctgggtcatcgccaagacactgcagagggccatggagacactgcatgccagcagccggcaccagcggatccaggacttcaactacacggaccacacgctgggcaggatcatcctcaatgccatgaacgagaccaacttcttcggggtcacgggtcaagttgtattccggaatggggagagaatggggaccattaaatttactcaatttcaagacagcagggaggtgaaggtgggagagtacaacgctgtggccgacacactggagatcatcaatgacaccatcaggttccaaggatccgaaccaccaaaagacaagaccatcatcctggagcagctgcggaagatctccctacctctctacagcatcctctctgccctcaccatcctcgggatgatcatggccagtgcttttctcttcttcaacatcaagaaccggaatcagaagctcataaagatgtcgagtccatacatgaacaaccttatcatccttggagggatgctctcctatgcttccatatttctctttggccttgatggatcctttgtctctgaaaagacctttgaaacactttgcaccgtcaggacctggattctcaccgtgggctacacgaccgcttttggggccatgtttgcaaagacctggagagtccacgccatcttcaaaaatgtgaaaatgaagaagaagatcatcaaggaccagaaactgcttgtgatcgtggggggcatgctgctgatcgacctgtgtatcctgatctgctggcaggctgtggaccccctgcgaaggacagtggagaagtacagcatggagccggacccagcaggacgggatatctccatccgccctctcctggagcactgtgagaacacccatatgaccatctggcttggcatcgtctatgcctacaagggacttctcatgttgttcggttgtttcttagcttgggagacccgcaacgtcagcatccccgcactcaacgacagcaagtacatcgggatgagtgtctacaacgtggggatcatgtgcatcatcggggccgctgtctccttcctgacccgggaccagcccaatgtgcagttctgcatcgtggctctggtcatcatcttctgcagcaccatcaccctctgcctggtattcgtgccgaagctcatcaccctgagaacaaacccagatgcagcaacgcagaacaggcgattccagttcactcagaatcagaagaaagaagattctaaaacgtccacctcggtcaccagtgtgaaccaagccagcacatcccgcctggagggcctacagtcagaaaaccatcgcctgcgaatgaagatcacagagctggataaagacttggaagaggtcaccatgcagctgcaggacacaccagaaaagaccacctacattaaacagaaccactaccaagagctcaatgacatcctcaacctgggaaacttcactgagagcacagatggaggaaaggccattttaaaaaatcacctcgatcaaaatccccagctacagtggaacacaacagagccctctcgaacatgcaaagatcctatagaagatataaactctccagaacacatccagcgtcggctgtccctccagctccccatcctccaccacgcctacctcccatccatcggaggcgtggacgccagctgtgtcagcccctgcgtcagccccaccgccagcccccgccacagacatgtgccaccctccttccgagtcatggtctcgggcctgtaagggtgggaggcctgggcccggggcctcccccgtgacagaaccacactgggcagaggggtctgctgcagaaacactgtcggctctggctgcggagaagctgggcaccatggctggcctctcaggaccactcggatggcactcaggtggacaggacggggcagggggagacttggcacctgacctcgagccttatttgtgaagtccttatttcttcacaaagaagaggaacggaaatgggacgtcttccttaacatctgcaaacaaggaggcgctgggatatcaaacttgcaaaaaaaaaaaaaaaacaaaacaaaaaaaaaaactagacaaggagagaggcactagaactccagctggaagtcacggagtggctcgagcagccttgggaagaggcaaggagcttctgaagaaactgcctctgcacacacatcactggctgtgacccctcaggctagcccttctccactctgggggaggaggtgggaagggccaccaggcccccagctgccaggccagctgaccccagccttcctggaacagggagtctgcaggagcgcagacaggcacagccctggagcaggcaggccgagggctgcggcactggagcaggctgacttacatgctccacatgggacctgtgtcacccaatgagatgtttgttactctggtaaatgccacacgttaacacaataacacccattcctgggaccgtggggatttagggcacgtcactgcagacacgctctgcagcattcaccgacagtctgtcatgcacccaccacgttggccacgtccttgtgttcctatcggatgctcccagtaaccagggggaccacccgagctaatcatggaatgtctgttcccagcaaacacgataaagaaagattgtgcactttaacctctctcatcagggcccaagggctggctgggattttttttttttttttttcccactaactttgtttctgaccaaagtgaattggaggcattctgctaaaagacatccccgtagacataggggagagagttgctggctgagggcttcccttggcttccagaaggcagccttccatccagacaagccagtgagctctccccttgggatcactggggtgatcagtcagcagattgattctcattcataagatcattcctccctttaaattgagcccctaagagcactggcctgggagtcagacagacctgggttcaagtcctcagtcccctgcccactccctacgtgactttgatcaggtcactagtgtctctctgagcctcagtttcccctctgtaacttggggttgaactaaaacacctgtcctgcctacctcacaaggtcactctgaggattgaaacttgatcttgtccaggaaagctttgtaccaaacagtgaagccgccctgatccgtgaggtatgagtatgactctgaccttcagccctccctacagccgggggtgtggcccagagaagcttccagcacagccctctacccagaacatccgggctggagggaggctcccagtgacttttctgacattcctagacaggttcattctttgctcaagaaaggcctgaatgacaatgtccaggatgtctgcacaactgagcagctcgctcactccctaaagaaacctattggcagcttcaacaggcaggcaataatctcttcccagaaccactgcagtcaggaataaactgttttctccaccaggctttgacaaaagggcccacaggaatcttaccaatgccaacatttcaaagcaccctatttcacgtagcatagctttctgctccccttccccaaagagaggttatggaggtactgtagcttttagggaaaaaaaaaatgttaacacatcacaggtcaagttgaagtcattctctgtttaggcactaaaaatcggtgttgtcactcactgtgtattaccagtatttacttgctttcttgatttcaccaaaaccaaatttaatttaaaggaccacattaatttttcaaagggaaagagacaattaattgtacataatgtatacacacacaaaaaaaaaaatacctgtagaaatattattccagcatagcaggaaaacaaacaaaagtattggactgtcggaggtgagcctgtgcgtctgtaaccctttgtgactcctgagcgtgcgctgtcttctaggttaactcacgaagtacattctctgtcttactgatactgtaggttcacccatttttttttaatttcctcgcaaataacaagacccacagaagtgactctagctacttaatggttctgttcttttatatgcagcaaacacaccgtccatttctgaagaggcttcggcctgaaggcattttccaatgatgttagtgcacaaaacgctttaaattagactggaactgccagaatcaaatgtaaatgaggaatttctcgtacccctactgcatggtatcgatttttaataaattgttgcaaatttgtttttatgaataaaaggaaaaaacctgtcgtcttt

SEQ ID NO: 2347 - DNA, 515 bp, Homo Sapiens
tttttttttttttttttacattaaatgacttagcattagaaagcatctactttgctttttctttcaccaaccctgaaagccaaataaggcactgggcattcaggccttcttttgagcagaacacgtgattacgcagttattcttcaagagcctctgttaatctgtcgcttggagaactctgcatactgtcccaaatccgtctgaattttccatcggctgccagtgttcgtagcagaggcctcgggtcttctcgtcctctcctcagggtctggcagctgtcactaccgtggacttcggtccagtccccagagtcgggggcgctgcctttcccatttcagttgccagggggttcatccacgatcgtgccagaggggcagcgcgtggtctcctcgaactacgggggagagaggaaccactgttggcacgggccggactgaacgccggctcccactgcctacctcctcggagctgcatccgccgacatcttgcgccctaccctcgtgccgaattcttgg

SEQ ID NO: 2348 - DNA, 342 bp, Homo Sapiens
  misc_feature (205)..(205): n is a, c, g, or t
  misc_feature (268)..(268): n is a, c, g, or t
  misc_feature (306)..(306): n is a, c, g, or t
  misc_feature (315)..(315): n is a, c, g, or t
gcaaaatgggaaaggaaacaacccatttaaatttgaataaaaccgtgcctatgcgaacagtagcaatttagaatctcttttctgcttttaaaataatttatatttaaaaattgcactttagctttttgatccctttgtatttctcttattctctttctaacctcttctctgtcctcaaacttgcctttgctctcctttacaatanccccccacccctcctccaaggctctgagcggcatcatttaaaatactttactttacagatatntgcaccaggtacatttatgtgcgtccattgggtagcanagctgaganctgtgtctcacatcagcctaggtggaa

SEQ ID NO: 2349 - DNA, 402 bp, Homo Sapiens
  misc_feature (242)..(242): n is a, c, g, or t
  misc_feature (306)..(306): n is a, c, g, or t
  misc_feature (340)..(340): n is a, c, g, or t
  misc_feature (366)..(366): n is a, c, g, or t
  misc_feature (383)..(383): n is a, c, g, or t
  misc_feature (394)..(394): n is a, c, g, or t
  misc_feature (399)..(399): n is a, c, g, or t
gcccgtcatcctcggtaagcccccaccaggcccctgatgcaccacgccagaccctgggggagcctgggccccagccctggcagctgacctgggccaaagcccttctgccctgcataagccccgacataagtacctgccctgggtgtgggggaaggggccaaaagcttgtcccttagaggaatgacgtcccttctcccaccacactgtgactctcagttgtctaacccagggggggcggagtnggggacggggtgtgcctgaggtctttgctggggcatcacaagctgtggtcagtcacagccacancagactttgggccaagcccaccacttctttcttnggccccaaccaccaaggacaagatgnccagcccaggatccgtngagcaggagangcccnttc

SEQ ID NO: 2350 - DNA, 3774 bp, Homo Sapiens
atgatgagcttcggcggcgcggacgcgctgctgggcgccccgttcgcgccgctgcatggcggcggcagcctccactacgcgctagcccgaaagggtggcgcaggcgggacgcgctccgccgctggctcctccagcggcttccactcgtggacacggacgtccgtgagctccgtgtccgcctcgcccagccgcttccgtggcgcaggcgccgcctcaagcaccgactcgctggacacgctgagcaacgggccggagggctgcatggtggcggtggccacctcacgcagtgagaaggagcagctgcaggcgctgaacgaccgcttcgccgggtacatcgacaaggtgcggcagctggaggcgcacaaccgcagcctggagggcgaggctgcggcgctgcggcagcagcaggcgggccgctccgctatgggcgagctgtacgagcgcgaggtccgcgagatgcgcggcgcggtgctgcgcctgggcgcggcgcgcggtcagctacgcctggagcaggagcacctgctcgaggacatcgcgcacgtgcgccagcgcctagacgacgaggcccggcagcgagaggaggccgaggcggcggcccgcgcgctggcgcgcttcgcgcaggaggccgaggcggcgcgcgtggacctgcagaagaaggcgcaggcgctgcaggaggagtgcggctacctgcggcgccaccaccaggaagaggtgggcgagctgctcggccagatccagggctccggcgccgcgcaggcgcagatgcaggccgagacgcgcgacgccctgaagtgcgacgtgacgtcggcgctgcgcgagattcgcgcgcagcttgaaggccacgcggtgcagagcacgctgcagtccgaggagtggttccgagtgaggctggaccgactgtcggaggcagccaaggtgaacacagacgctatgcgctcagcgcaggaggagataactgagtaccggcgtcagctgcaggccaggaccacagagctggaggcactgaaaagcaccaaggactcactggagaggcagcgctctgagctggaggaccgtcatcaggccgacattgcctcctaccaggaagccattcagcagctggacgctgagctgaggaacaccaagtgggagatggccgcccagctgcgagaataccaggacctgctcaatgtcaagatggctctggatatagagatagccgcttacagaaaactcctggaaggtgaagagtgtcggattggctttggcccaattcctttctcgcttccagaaggactccccaaaattccctctgtgtccactcacataaaggtgaaaagcgaagagaagatcaaagtggtggagaagtctgagaaagaaactgtgattgtggaggaacagacagaggagacccaagtgactgaagaagtgactgaagaagaggagaaagaggccaaagaggaggagggcaaggaggaagaagggggtgaagaagaggaggcagaagggggagaagaagaaacaaagtctcccccagcagaagaggctgcatccccagagaaggaagccaagtcaccagtaaaggaagaggcaaagtcaccggctgaggccaagtccccagagaaggaggaagcaaaatccccagccgaagtcaagtcccctgagaaggccaagtctccagcaaaggaagaggcaaagtcaccgcctgaggccaagtccccagagaaggaggaagcaaaatctccagctgaggtcaagtcccccgagaaggccaagtccccagcaaaggaagaggcaaagtcaccggctgaggccaagtctccagagaaggccaagtccccagtgaaggaagaagcaaagtcaccggctgaggccaagtccccagtgaaggaagaagcaaaatctccagctgaggtcaagtccccggaaaaggccaagtctccaacgaaggaggaagcaaagtcccctgagaaggccaagtcccctgagaaggccaagtccccagagaaggaagaggccaagtcccctgagaaggccaagtccccagtgaaggcagaagcaaagtcccctgagaaggccaagtccccagtgaaggcagaagcaaagtcccctgagaaggccaagtccccagtgaaggaagaagcaaagtcccctgagaaggccaagtccccagtgaaggaagaagcaaagtcccctgagaaggccaagtccccagtgaaggaagaagcaaagacccccgagaaggccaagtccccagtgaaggaagaagccaagtccccagagaaggccaagtccccagagaaggccaagactcttgatgtgaagtctccagaagccaagactccagcgaaggaggaagcaaggtcccctgcagacaaattccctgaaaaggccaaaagccctgtcaaggaggaggtcaagtccccagagaaggcgaaatctcccctgaaggaggatgccaaggcccctgagaaggagatcccaaaaaaggaagaggtgaagtccccagtgaaggaggaggagaagccccaggaggtgaaagtcaaagagcccccaaagaaggcagaggaagagaaagcccctgccacaccaaaaacagaggagaagaaggacagcaagaaagaggaggcacccaagaaggaggctccaaagcccaaggtggaggagaagaaggaacctgctgtcgaaaagcccaaagaatccaaagttgaagccaagaaggaagaggctgaagataagaaaaaagtccccaccccagagaaggaggctcctgccaaggtggaggtgaaggaagacgctaaacccaaagaaaagacagaggtggccaagaaggaaccagatgatgccaaggccaaggaacccagcaaaccagcagagaagaaggaggcagcaccggagaaaaaagacaccaaggaggagaaggccaagaagcctgaggagaaacccaagacagaggccaaagccaaggaagatgacaagaccctctcaaaagagcctagcaagcctaaggcagaaaaggctgaaaaatcctccagcacagaccaaaaagacagcaagcctccagagaaggccacagaagacaaggccgccaaggggaagtaaggcagggagaaaggaacatccggaacagccaaagaaactcagaagagtcccggagctcaaggatcagagtaacacaattttcactttttctgtctttatgtaagaagaaactgcttagatgacggggcctccttcttcaaacaggaatttctgttagcaatatgttagcaagagagggcactcccaggcccctgcccccatgccctccccaggcgatggacaattatgatagcttatgtagctgaatgtgatacatgccgaatgccacacgtaaacacttgactataaaaactgcccccctcctttccaaataagtgcatttattgcctctatgtgcaactgacagatgaccgcaataatgaatgagcagttagaaatacattatgcttgagatgtcttaacctattcccaaatgccttctgttttccaaaggagtggtcaagcccttgcccagagctctctattctggaagagcggtccaggtggggccgggcactggccactgaattatgccagggcgcactttccactggagttcactttcaattgcttctgtgcaataaaaccaagtgcttataaaatgaaaaaaaaaaaaaaaatgctgttattctctttccctgggaaggctgggggcagggcaggggaggtctggatgtgacaccccagactgcatgggactgagcaagcatcagt

SEQ ID NO: 2351 - DNA, 209 bp, Homo Sapiens
gttgagaaatgactcagttcagccccaggcccctgtgactctgcttaaagcacacatttctcgctgactcttgtccctggggcagcaggataatcaccaacacactcttaacgggacacaacacaccaagcaccgtggagctctcctaggcaacactcgcggtctcaggctgcggtcggcgttctcctgcatgtcgtccagaccacctc

SEQ ID NO: 2352 - DNA, 4139 bp, Homo Sapiens
tcgcggccgccgagcgcagtgccccgcgggtcttacaggagaggggaccgtcctgggctggcctggaccatggtgctgctctgggagcctgcaggagcctggcttgctctgggcctggccctggccctgggccccagcgtggccgcagctgcccctcggcaggactgcacgggcgtggagtgcccgccgctggagaactgcattgaggaggcgctggagccgggtgcctgctgtgccacgtgtgtgcagcagggctgcgcctgcgagggctaccagtactatgactgcctacagggtggcttcgtgcgcggccgcgtgcccgccggtcagtcctattttgtggacttcgggagcactgagtgctcctgcccaccaggcggcggcaagatcagctgccagttcatgctgtgcccggagctgccgcccaactgcatcgaggctgtagtggtggctgacagctgcccacagtgcggccaggtgggctgcgtccacgcgggccacgagtacgccgctggccacactgttcacctgccgccctgccgggcctgccactgccctgacgccggtggagagctcatctgctaccagctccccggttgccacgggaacttctcagatgccgaggagggtgaccccgagcgacactacgaagacccctacagctatgaccaggaggtggccgaggtggaagcagcaacagccctggggggtgaggtccaggcgggtgcagtccaggcaggcgcagggggccccccagctgctctgggaggtgggagtcagccactgtccaccatccaggcacccccctggccagctgtcctccccaggcccacagcggctgctgccctgggtcccccagccccagtgcaggccaaagctaggagagtgaccgaggacagtgaggaggaagaagaggaggaggaggagagagaggaaatggctgtcactgagcagctggcagcaggtggccacagggggctggatgggctgcccactacagccccagctggacccagtcttcctatccaggaggagagggcagaagctggggcaagggcagaagctggggcaaggcctgaagagaacctcatcctggatgcccaagccacgtcccgcagcactgggccggagggcgtgacgcatgcaccgagcctgggcaaggctgctctcgtcccaactcaggccgtgcctggctctcccagggacccagtcaagcccagcccccacaacatcctgtccacatcactgcctgatgcagcctggatcccacccacccgagaagtgcccaggaagccgcaagttctgccccattcccacgtggaggaggacacagaccccaactctgtccattctatccccagaagtagccctgaaggctccaccaaggacctgatcgagacttgctgcgcagccggacagcagtgggccattgacaatgacgagtgcctggagatccctgagagtggcactgaggacaacgtctgcaggacagcccagaggcactgctgtgtctcctacttgcaggagaagagctgcatggccggcgtcctgggagccaaggagggtgagacctgtggggctgaggacaacgacagctgcggcatctccctgtacaagcaatgctgtgactgctgtggcctgggcctccgcgtgcgggccgagggccagtcgtgtgagtccaatcctaacctgggctatccctgcaatcatgtcatgctctcctgctgtgagggtgaagagcctctcatagtacctgaggttcgccgacctccagagcccgcagctgcaccacggagagtttcagaggcagagatggcgggccgagaggccctgtcactgggcacagaggccgagctgccgaacagcctgccgggcgatgaccaggatgagtgccttctcctcccgggagagctgtgccagcacctttgcatcaatactgtgggttcttaccactgtgcctgctttcctggcttctcactgcaggacgatggccgcacttgccgcccagagggtcaccctccacagccggaagccccacaggagcctgcactgaagtcagaattttcccaggtggcctctaacaccatcccgctgccactgccgcagcccaatacctgcaaagacaatggaccctgcaagcaggtgtgcagcactgttgggggctcagccatatgctcctgttttcccggctatgccatcatggcggatggcgtgtcctgtgaagacatcaacgagtgtgtgacggacctgcacacgtgcagccggggcgagcactgtgtgaacacactgggctccttccactgctacaaggcactcacctgtgagccaggctatgccctcaaggatggcgagtgcgaagacgtggatgagtgtgcgatgggcacgcacacctgccagccgggcttcttgtgccagaacaccaagggctccttctactgccaggccaggcagcgctgcatggatggcttcctgcaggatcctgaaggcaactgtgtggacatcaacgagtgcacgtcactgtccgagccatgtcggccaggcttcagctgcatcaacacggtgggctcctacacgtgccagaggaacccgctgatctgcgcgcgcggctaccacgccagcgatgatggggccaagtgtgtggacgtgaatgagtgtgagacaggtgtgcaccgctgcggtgagggccaagtgtgccacaacctccctggctcctaccgctgtgactgcaaagccggctttcagcgggatgccttcggccggggctgcatcgacgtgaatgagtgctgggcctcgccaggccgcctgtgccagcacacgtgtgagaacacactcggctcctaccgctgttcctgcgcctccgggttcctgctagcagcggacggcaagcgctgtgaagacgtgaatgagtgtgaggcccagcgctgcagccaggagtgtgccaacatctatggctcctaccagtgctactgccgccagggctaccagctggctgaggatgggcacacctgcacagacatcgacgagtgtgctcaaggcgccggcatcctctgcaccttccgctgtctcaacgtgccagggagctaccagtgtgcatgccctgagcagggctacaccatgacggccaacgggaggtcctgcaaggacgtggatgagtgtgcactgggcacccacaactgttccgaggctgagacctgccacaacatccagggtagcttccgctgcctgcgcttcgagtgtcctcccaactatgtccaagtctccaaaacgaagtgcgagcgcaccacgtgccatgacttcctggagtgccagaactcgccagcgcgcatcacgcactaccagctcaacttccagacgggcctcctggtgcctgcgcatatcttccgcattggccccgcgccagccttcacgggggacaccatcgccctgaacatcatcaagggcaatgaggagggctactttggcacgcgcaggctcaatgcctacacgggtgtggtctacctgcagcgggccgtgctggagccccgggactttgccctggacgtggagatgaagctctggaggcagggctccgtcaccaccttcctggccaagatgcacatcttcttcaccacctttgccctgtgaggtgccagcacgggccacctgcgggtgtggcgcagccagggctcacactgcgtgggagggactgggtcactattgtggtttttactataactttgtaaattaacttaattttgctgacttgactcctgtggcttctggacccctcctctgccccgcaggaggaagttccacggcaggtggtgcgttcccatgtaggcaccaagtggaagcttgcacggtgggccacggccgtggcgggtgccctgtgggtgaggctgggtgatgacctgaggaccagagacacgcgaccatgttggggctcttggactcctctggatgacccgtccccaaacgttgacattccatttcatgttccactgtgattaacttcttttcttttttaaaaaatcattttaaagttttttgtttaactataaagtagtacatgtacattatataaaaaaaaagttcaactagtatgaaagggttataaagtaacagaggaaaacgcctcttggtccctttaaaaaaaaaaa

SEQ ID NO: 2353 - DNA, 1062 bp, Homo Sapiens
gcggccgcgtcgacggaccggagtggggagcgcggcgtggaggtgccacccggcgcgggtggcggagagatcagaagcctcttccccaagccgagccaacctcagcggggacccgggctcagggacgcggcggcggcggtggcgactgcagtggctggacgatggcagcgtccgccggagccggggcggtgattgcagccccagacagccggcgctggctgtggtcggtgctggcggcggcgcttgggctcttgacagctggagtatcagccttggaagtatatacgccaaaagaaatcttcgtggcaaatggtacacaagggaagctgacctgcaagttcaagtctactagtacgactggcgggttgacctcagtctcctggagcttccagccagagggggccgacactactgtgtcgtttttccactactcccaagggcaagtgtaccttgggaattatccaccatttaaagacagaatcagctgggctggagaccttgacaagaaagatgcatcaatcaacatagaaaatatgcagtttatacacaatggcacctatatctgtgatgtcaaaaaccctcctgacatcgttgtccagcctggacacattaggctctatgtcgtagaaaaagagaatttgcctgtgtttccagtttgggtagtggtgggcatagttactgctgtggtcctaggtctcactctgctcatcagcatgattctggctgtcctctatagaaggaaaaactctaaacgggattacactggctgcagtacatcagagagtttgtcaccagttaagcaggctcctcggaagtccccctccgacactgagggtcttgtaaagagtctgccttctggatctcaccagggcccagtcatatatgcacagttagaccactccggcggacatcacagtgacaagattaacaagtcagagtctgtggtgtatgcggatatccgaaagaattaagagaatacctagaacatatcctcagcaagaaacaaaaccaaactggactctcgtgcagaaaatgtagcccattaccacatgtagccttgga

SEQ ID NO: 2354 - DNA, 397 bp, Homo Sapiens
  misc_feature (389)..(389): n is a, c, g, or t
taacttatttgaatcaagatccaaggaagaaaacacattgtgatgggttgatatgtctcctaagtttcttttaatatatgggtaccctctcctgttttctcttccaactcacttgttaaagaaaatgaagttgtttgtcctgtagagttgcacacagcatgggttttgctgtctgcatcatgtgctatagtctaagatgttctgttgtcctctgtattttctgtaaattgtagtaatgtacaggcttgatcaaaatcaagttttaagtttttttgaccagataaatttaatgattttgggcaaggatggtgtgttctatttggaaggcctattattttctgtttgtctctttttctgtgggtgttagcagctattgatccccaataccnataggccg

SEQ ID NO: 2355 - DNA, 2868 bp, Homo Sapiens
cgagcggccgcgcctcctcccttccccgcctccgccggcgctgcctcctccctccgcccagctcggcctcccttgctccctcccctcctagctggcttcggcggggacggcggcggcggcggcggcggcggcggcgggcggggagggcgtgcgccggccgagaggtgtcggcggcgaggcaaaggaagtttcaagtggaaggtcgtccgtcggccggcgcgtcctcctgctctcttccgcagcatcatggcggagccgagcggctcgcccgtgcacgtccagcttccccagcaggcggccccggtgacagcggcggcggcggcggccccggcggccgcgacagcagcgccggccccggcagctcccgcggccccggccccggccccggccccggccccggcggcacaggctgtcggctggcccatctgcagggacgcgtacgagctgcaggaggttatcggcagtggagctactgctgtggttcaggcagccctatgcaaacccaggcaagaacgtgtagcaataaaacggatcaacttggaaaaatgccagaccagtatggatgaactattaaaagaaattcaagccatgagtcagtgcagccatcccaacgtagtgacctattacacctcttttgtggtcaaagatgaactttggctggtcatgaaattactaagtggaggttcaatgttggatatcataaaatacattgtcaaccgaggagaacacaagaatggagttttggaagaggcaataatagcaacaatttttaaagaggttttggaaggcttagactatctacacagaaacggtcagattcacagggatttgaaagctggtaatattcttctgggtgaggatggttcagtacaaatagcagattttggggtaagtgcgttcctagcaacagggggtgatgttacccgaaataaagtaagaaaaacattcgttggcaccccatgttggatggctcctgaagtcatggaacaggtgagaggctatgacttcaaggctgacatgtggagttttggaataactgccattgaattagcaacaggagcagcgccttatcacaaatatcctcccatgaaagtgttaatgttgactttgcaaaatgatccacccactttggaaacaggggtagaggataaagaaatgatgaaaaagtacggcaagtcctttagaaaattactttcactgtgtcttcagaaagatccttccaaaaggcccacagcagcagaacttttaaaatgcaaattcttccagaaagccaagaacagagagtacctgattgagaagctgcttacaagaacaccagacatagcccaaagagccaaaaaggtaagaagagttcctgggtcaagtggtcaccttcataaaaccgaagacggggactgggagtggagtgacgacgagatggatgagaagagcgaagaagggaaagcagctttttctcaggaaaagtcacgaagagtaaaagaagaaaatccagagattgcagtgagtgccagcaccatccccgaacaaatacagtccctctctgtgcacgactctcagggcccacccaatgctaatgaagactacagagaagcttcttcttgtgccgtgaacctcgttttgagattaagaaactccagaaaggaacttaatgacatacgatttgagtttactccaggaagagatacagcagatggtgtatctcaggagctcttctctgctggcttggtggatggtcacgatgtagttatagtggctgctaatttacagaagattgtagatgatcccaaagctttaaaaacattgacatttaagttggcttctggctgtgatgggtcggagattcctgatgaagtgaagctgattgggtttgctcagttgagtgtcagctgatgtatgtcccttgatgtcaccctgatctgtcatgccccaccgccacccctactcccttcaaccctccctctttctgcccatttcctcccaccccctcactcccatttcctagcaaaatcagaagattgtgaagaggccggcttcaacaaaatgggataaaaaaataattttttaaaacttacaacactccgagttctgctttattctctagcaatccacagtacaagaacaagcaaatgccacagctgcacgactgttgctcatttttccaaaagctatttaatattcttagcaatcaatttggatatcccttaagtgaaaagaatctgaaatacactcaggtggtcttatttattggcaacaaaaggaattttctatccagaagcctatttctcctttcattgttgttatttctgttataatactttaattgtacatctgacaatactgcctcttttatgttgtatttagaaattaatatacttataaaattaagatttattagccaaacttgaattctagttttaaaactgactgtgaattttatttttcatatatttatgcattacacaccttagctataagaaaaaaagggttttgattatatgcttcttgcagttaatctcgttatttaaacaaaaagttttgggtctgtctttggagtatttgtaacttctaaattttgaaatgactgaattaggaatttggatgcttattcttttagtctgtttgcctaaaaaccaatttacaatctgactgtctcttgggagagggaggtgccttgcaaactttcacattaagaatgtgcctgaggctgctttactctggaatagtctcagatctaaaatttcctctatataaggtggcatatgttaagttttgcttcattggaccgtttagaatgctatgtaaaatgttgccattctgttagattgctaactatatacccatctctgatttggctctccttaagtgata

SEQ ID NO: 2356 - DNA, 2943 bp, Homo Sapiens
gtgctgcctggcgctggctaggaggcaaacgcacgcgggaagagctgctacccattccagggaccctgccgctgcccctctgaggggtctgcacctcctgggagcaggtgggtctctgggacgagggtccatggtggatggctctggagacgctcccgaggctgtgccgtcccgctgctgcacaggtcggagggtcaccgcagaggctactcgggctggggctggggccgagggagcccgcactggagccccatgtggaacccaaggatgcagctgctctgctaacacggcagcccatccttcgagactgtgacctcgccacagtggccctcagccctccacctccggcgggggcgagggccacccacctccaagtctccagccatgacgacctccgcactccggcgccaggtgaagaacatcgtgcacaactactccgaggcagaaatcaaggtgcgcgaggccaccagcaatgacccctggggcccccctagttcgctcatgtccgagatcgctgacctgaccttcaacacagtggccttcaccgaagtcatgggcatgctgtggcggcggctcaatgacagcggcaagaactggcggcacgtgtacaaggctctaacattgctggactacctgctcaagacgggctccgagcgggtggcccaccagtgccgcgagaacctctacaccatccagacactcaaggacttccagtacatcgaccgcgacggcaaggaccagggcgtcaacgtgcgcgagaaggtcaagcaggtgatggccctgctcaaggatgaggagcggctgcggcaggagcgaacccacgccctcaagaccaaggagcgcatggcactggagggcatcggcattggcagtgggcagctgggcttcagccgccgctacggcgaggactacagccgctcccggggctccccgtcctcctacaactcctcctcttcgtcaccccgctatacctccgacctggagcaggcccggcctcagacgtcaggggaagaggaactgcagctgcagctggccctcgccatgagccgtgaggaggcagagaagcctgtccccccagcctcccacagggacgaggacctgcagctgcagctggctctgcgcctgagccggcaggagcacgagaaggaggtgaggtcctggcagggtgatggctcccccatggccaatggtgcaggggccgtggtccaccatcagcgggacagagagcctgagagagaggagagaaaggaggaggagaagctaaaaaccagccagtcctccatcctggacttggctgacatcttcgtacctgccctggccccgccctccacacactgctctgctgacccatgggacatcccaggttttaggccgaacacagaggccagtggatcctcctgggggccttctgcagacccctggtctccgatcccctcaggaaccgtcctgtcccgaagccagccctgggatctgactcccatgctctcctcctctgagccctggggcaggaccccagtgctgcctgctgggccccccaccacagacccctgggccctgaactctccccactacaaactccccagcactggggctgacccttggggagcctccctggagacctccgacacacctggtggtgcctcgacctttgacccatttgccaaacctccagaatccacagagaccaaggaggggctggagcaggccctgccctctgggaagcccagcagccctgtggagctggacctgtttggagaccccagccccagttccaagcaaaatggcacgaaggagccagatgccctggacctgggcatactaggggaagcactaacccagccaagcaaagaggcccgagcttgccggactcccgagtccttcctgggtccctcagcttcctccttggtcaaccttgactcgttggtcaaggcaccccaggttgcaaagacccggaaccccttcctgacaggtctcagcgctccgtcccccaccaacccgttcggcgcgggcgagacgggcaggccgacgctaaaccagatgcgcaccggctcgccggcgctgggcctggcaggcgggcctgtgggggcgcccctgggctccatgacctacagcgcctctctgcccctcccgctcagcagcgtgccagctggcttgaccctccccgcctcggttagcgtcttcccgcaggccggagccttcgcaccgcagccgctgctgcccacgccgagctcagccgggccgcggcccccgcccccgcagaccggcaccaaccccttcctctgagccccgccccgtcccataccggcctgcgcctgcgccggacgctccgcggccccgcctccggacccggggctgggcggggcgccggtgctagtggaacgccgtgccagtggcggctggtatcccgcggcggctctggaagctggacgcggaccacggcccgggagctagaaactgaacgcccgcataataaagactggaacccacgttctcagctctcaccaagtggactttttgcggggtgtggcggccgggtctcgaccacagcgtggatcaccggctgtttaggaaactgcagctgcacaacgtggggtgcaaaactgccccgcttcctttacagctcttctcaaccctcacctccatcccccgtcacccaggcaccttcgcttccagatgctgccaggctgtcactcaattcggtcatttcattcatttatcacacatgggcactggggttgggctaacagcaagagacaataggcctttgttcctatttattgggtactgcttacgtgctaagcagatcagtttatttaatgcttgcaacgactctctgaggtagaaaatattgttaattccgttcaggatcccggctacataatctgtggggctcaatacaaaataaaaatgtaggggctccttgttcaaaaaaaaaaaaaaaaa

SEQ ID NO: 2357 - DNA, 435 bp, Homo Sapiens
  misc_feature (361)..(361): n is a, c, g, or t
  misc_feature (372)..(372): n is a, c, g, or t
  misc_feature (378)..(378): n is a, c, g, or t
  misc_feature (386)..(386): n is a, c, g, or t
  misc_feature (402)..(402): n is a, c, g, or t
  misc_feature (408)..(408): n is a, c, g, or t
  misc_feature (419)..(419): n is a, c, g, or t
  misc_feature (427)..(427): n is a, c, g, or t
ggaaggcgcgcggatttggcccctcttctcacatcagtgggtccaggcccaaccgacagactatgggggctccggcaaccaggcgctgcgtggagtggctgctgggcctctacttcctcagccacatccccatcaccctgttcatggacctgcaggcggtgctgccgcgcgagtctacccagtcgagtttagaaacctgctgaagtggtatgctaaggagttcaaagacccactgctacaggagcccccagcctgggtttaagtcctttctgttttgcgagcttgtgtttcagctgcctttctttcccattgcaacgtattgccttcctcaaaggaagcttgcaagtgggattcggaactnctgcaatcatnttattntgtttcanaacatggacaaccttnaatttncgataattttncacaattnttgtttga

SEQ ID NO: 2358 - DNA, 475 bp, Homo Sapiens
ttttttttttttttttttaagattttcaaattatttttattaggtaattttataatttcatagcagctgttaggatacacaaacatatatatacaattttctaaacaagtaaataaaagcagtttagtatatctgcctgaattcatattattcaaaatcttaccaaaatatttattataaaaatcagtaaaattgtttaacacatttataaaagttgctgggtatgtatacataaacattttaagcttgctttacaaaaaaaagttaaatttctatccatgtgctcatagtgacttcaaaggtagttcaaagggggaataaagaaggtagcattgccttgtaatacagcattaattaatactgacttacccttggacattcatgaaagatcctttgttatcacatatggtgaaaatattaaaaattaatactccatttctatgaataaaacatagaaaataagactttatttttc

SEQ ID NO: 2359 - DNA, 1824 bp, Homo Sapiens
caataggccggcttttgaactgcttcgcaggggacttggaacagctggaccagctcttgcccatcttttcagagcagttcctggtcctgtccttaatggtgatcgccgtcctgttgattgtcagtgtgctgtctccatatatcctgttaatgggagccataatcatggttatttgcttcatttattatatgatgttcaagaaggccatcggtgtgttcaagagactggagaactatagccggtctcctttattctcccacatcctcaattctctgcaaggcctgagctccatccatgtctatggaaaaactgaagacttcatcagccagtttaagaggctgactgatgcgcagaataactacctgctgttgtttctatcttccacacgatggatggcattgaggctggagatcatgaccaaccttgtgaccttggctgttgccctgttcgtggcttttggcatttcctccaccccctactcctttaaagtcatggctgtcaacatcgtgctgcagctggcgtccagcttccaggccactgcccggattggcttggagacagaggcacagttcacggctgtagagaggatactgcagtacatgaagatgtgtgtctcggaagctcctttacacatggaaggcacaagttgtccccaggggtggccacagcatggggaaatcatatttcaggattatcacatgaaatacagagacaacacacccaccgtgcttcacggcatcaacctgaccatccgcggccacgaagtggtgggcatcgtgggaaggacgggctctgtaggtttttactgagcacctactatgtgcctgggaaccgaaagggaagtcctccttgggcatggctctcttccgcctggtggagcccatggcaggccggattctcattgacggcgtggacatttgcagcatcggcctggaggacttgcggtccaagctctcagtgatccctcaagatccagtgctgctctcaggaaccatcagattcaacctagatccctttgaccgtcacactgaccagcagatctgggatgccttggagaggacattcctgaccaaggccatctcaaagttccccaaaaagctgcatacagatgtggtggaaaacggtggaaacttctctgtgggggagaggcagctgctctgcattgccagggctgtgcttcgcaactccaagatcatccttatcgatgaagccacagcctccattgacatggagacagacaccctgatccagcgcacaatccgtgaagccttccagggctgcaccgtgctcgtcattgcccaccgtgtcaccactgtgctgaactgtgaccacatcctggttatgggcaatgggaaggtggtagaatttgatcggccggaggtactgcggaagaagcctgggtcattgttcgcagccctcatggccacagccacttcttcactgagataaggagatgtggagacttcatggaggctggcagctgagctcagaggttcacacaggtgcagcttcgaggcccacagtctgcgaccttcttgtttggagatgagaacttctcctggaagcaggggtaaatgtagggggggtggggattgctggatggaaaccctggaataggctacttgatggctctcaagaccttagaaccccagaaccatctaagacatgggattcagtgatcatgtggttctccttttaacttacatgctgaataattttataataaggtaaaagcttatagttttctgatctgtgttagaagtgttgcaaatgctgtactgactttgtaaaatataaaactaaggaaaactcaaaaaaaaaaaa

SEQ ID NO: 2360 - DNA, 579 bp, Homo Sapiens
  misc_feature (428)..(428): n is a, c, g, or t
  misc_feature (442)..(442): n is a, c, g, or t
  misc_feature (493)..(493): n is a, c, g, or t
  misc_feature (496)..(496): n is a, c, g, or t
  misc_feature (547)..(547): n is a, c, g, or t
cgcatggagcgctgcacgttctgctcaaacagccgccggttgttctgcaggacctctgcggcctccttgttcagtgggtcctcggggttgggctccaagaagagatactgcaggccataaattatggagtttatcgtaaggactggcttccagtcctctctgaggatgttgaggcagacgttgccctcgaggtcaatgttggggtgatagaccattgtctcacacttcaccttggggggatcatgcgggtaaccctggcccaccttaaaactgaacacaaacttcccactcttgtagaagccctcatcaggacagatgaccagcttgaagttgaggaggtcgtctggatctgagaagctgatatcacacgtcttgggcaggttcagctcgtttatgtccttctggatccgcaggtgcgccgccgacgncttcttgttgttgnccttggtggcggccgccgattctccccccttcttctggtggttcaaggganaanagttggatcatcctgccgccgccgccgccgttgcgccgccgggggccgggnacccggcaaccggcccccgcgcgccgggtggc

SEQ ID NO: 2361 - DNA, 345 bp, Homo Sapiens
gaattcggcacgagcagttgagtaaaatgtgtaatatttattccccattaataactgactaggaaggactaaaagccagaaaggggatgaaaaaaaaatcctttaattcagggccgacattatctacttaaacaactttgagatatggtcttaattattttcaaagcagaataatataattgacagttatagctaaaagagactatataggtcatttagtataattcttcattagtttacgaaccacaaaattcgcaaataaataagctatgaactttgatgtacactataaatctccttaattctataattcggggctrtaccctgattagtttgaaacttctt

SEQ ID NO: 2362 - DNA, 469 bp, Homo Sapiens
tttgagacaggatcttactttgttgcccaggctggagtgcagtgtcacgatcacagcttgctgcagtctcaagcttccagactcaagcgatcctcccacttcagcctcaacattccaaagaaaggtcagccgcaagcgaacttagcactggctacaccctcctcaattctggttggcgagatgcgctcttcccggaagtgacgcacaagtgccggcggaaggggaagtccaggagcatgggtggtttttttccccctaccgaggtccgtgaggtgtgtgctaaccaaggggcggctcacaaccgtgacagactgccattcctgagtctcttctggccatgggccccggagccgtgagcgtcgggcaggcgcggtacagaacaccaacgacagcagcgccctcagcaagcgttccctggccgcgcgcggatacgtgcaggacccctttgccgcgttgctggttccgggcg

SEQ ID NO: 2363 - DNA, 75270 bp, Homo Sapiens
tcccagggtcccgggttgggggggtggagcagcatttcgtcgccgcgggggtgccgggactccggccgcagtgtcgccgccatcacggacttcctgtgggacaagcgcacgggcctcgccgccagaacggtgagcgcgcgggttggctggccgcgcgaaaagatggcgaccgcggggcgggcggggttaggcttgggttgggggcaagggacgggggcgagatttggagaggaggagagttgagacctacgaagcgacggagtagggagatgagggggaaggaggtcggcctgcgttagatgtaccaagaagacctgtaggaagcttgggcggaaccagactagaagggatgatagagtaaggatgggagtggttccagagatgtgaaggagtggaatatcaaagttggactcgggtccaatcaaagctggaggggaggaatacatcaccgtgtcacttggaacatgcaggaagaatttgcctgtaggagttctggattttctgagtaagaaaggaaaaagcaaaagatttcaaacttgagaaaggtaggctagtgatgttttgaggggacagtgctgtgaggccgtttgatggtagtatgtggtgagatggcatttatgtggctatgctgattaggataactatgctgggaaaatcttgtgcttgcagcttggtatgctaccggccccagttacaccaagaatgcatcaaataccaccctcctcaatttggggaggttgggaagaagtgtatacagaatggtggtcagacatcggaatcattaaaccttttgcatacgcgattctcatacacccccaccaagacttatgtccctgggcctgtttcattttattgtgccttcctattctcatcttcctggattgtgacagtgatttttctcttttttccttgaaggaaaaaaaggatttgtgaaccatcccattccaattccattaactggaaggtggccagctgtcagctaagtagggctgatattaattaaaaaccacttactggccaggcgcggtggctcacatctgtaatcccagcactttgggaggccaaggcgggcggatcacctgaggttgggagttcgagaccagcctgaccaacatggagaaaccctgtctctactaaaaatacaaaattagctgggcgtggcggcgcatgcctgtaatcccagctactcgggaggctgaggcaggagaatcgcttgaaccctgcaggcggaggttatggtgagccgagattgcgccattgcactccagcctgggcaacaagagcaaaactccgttttcaaaaaaaaaaaaaaaaacacaagaaacagttgttatctacgtcttaagcacaagagtggaggggccagatgggatgctgactgtattttgtggcctactacattaaaacctctcaagggagagttggccaaagatgtgagagatgattaagttaattcaaggggcccgacccagatccctggagctgatagtatttggcgtttacctggtatatgtagaaacctgggagactggattcctaccctcaggacactgatagtctacttgaggagatgagatgtactcttaatgagtgtacaacatttatcataactgtaaaccaaagctttactctattgacttgtgaggaactcagcatcacacagatctatatcttagatcctgaacggggatacactgtggcagtctccatcggtcgtcatacactttgctctgtagtgaactgtgtcctagacctgaaggtcttcatggagctgtgtttgaagaaaataaggatagaacacttgaactggctgggtgcggtggctcacgcctgtaatcccagcactttgggaggccgaggcaggaggatcacgagtcaggagtttgagaccatcctggccaacatggtgaaaccccgtctctactaaaaatataaaaattagccaggagtggtggtgcgtgcctgtaatcccagctacacaggaggctgaggcaggagagttgcttgaacctgggaagtggaggttgcagtgagccgagattgtgccactgcactccagcctggccacacagcgagactctgtctcaagaataaaataagaacacttgaactgaggggtgggtaatgagggatgggtttgggggctttctagagtttcagccagagttagtaggtggctgtactccaataaggaggaattgtaagtacagaggaagactgaggaagttgtgcctggtaaaaagaggcagaaataagaggggaaagcagcttagcatctttggagcagccagtccttggaggagatttctgaaaactcgaaactttcctatttccgctttcccttgccttccagatgccgcatcctcgaaggtaccactcctcagagcgaggcagccgggggagttaccgtgaacactatcggagccgaaagcataagcgacgaagaagtcgctcctggtcaagtagtagtgaccggacacgacggcgtcggcgagaggacagctaccatgtccgttctcgaaggtgaggcctcaggaagagatactcaaacacagggtcactcgctcattcctttgttcaacaaatacttattggttatatgctaaaaccattgccttaagtagctggctgaaggtaatgtcgggatagataaccacagaagccatttgggctgcagtgttaagtgttagaatacataatgaggaactgaggacgtacccagtgcgtttggttggagtggggcaggatgttaattcagataaaacattgcagaaagcaacatctgtatatgtctggaggacaagtagagtcaggtgggggaagtgtctttgggcagagggaaagcatgtgcaaaggactgggagctacaggtaactaataagctaacagataagacaaagttagatctttgtgtttttaattttttaaaaattttaaaatatcatttatttatttttgagacagagtttcactctgttgcccaggctggagtgcagtggcaagatctcagctcactgcaaactctatggccccaggttcaagttgattcttgtgcctcagcctcccaagttacctgggactacaggcatgcgccatcatgcctggctaattttttttttttttttttgtatttttagtagagacaggatttcaccatgttggcctcaaactcctgacctcaagtgctccacctgccttggcctcccaaagtgctgggattacaggcgtgagccactgtgcccggcccagttttaatattttagtggtatgttcagtggaaagaatgggttaaggatggtttagagcaaggggggatttcattcaggaaagcttgagaaaaaaatggctctttgtttctttgtatcactgcagcgggaaaaaggccccaatagggagtggttctgcagatgccttttcagaggttttggtgacatggcagatgtgcttggttaacctcaacttcttctggtcccttggtcctctccagtgactcaaacaagtgtctgagaacagtttttcttagcattcactctttgtcctcactaaggcaggaccttgtcacagggtatggtagggaatgtgatctgaacagatacacctcattggtatttgttatccaacagcagttatgatgatcgttcgtccgaccggagggtgtatgaccggcgatactgtggcagctacagacgcaacgattatagccgggatcggggagatgcctactatgacacagactatcggcattcctatgaatatcagcgggagaacagcagttaccgcagccagcgcagcagccggaggaagcacagacggcggaggaggcgcagccggacatttagccgctcatcttcggtgagtgccagcccaggcccttcctctccccactcttctgcaggccctctaggactctggtaagtgagcagtatccttgttctcagctgaacattggggcatgaacactgaggtgggcactgagtttgcctactttcttggaagctctccgactcttgaagggccctggatctgctttggagatggatgggcacggagcatttgtgacccccagtgctctccctggcatgttgggcttattgtgttgggagcagcttctccgccccagcggcctccactctttaatggggaccttgcttgttgaactgcctttttcccccaagccctgggctctgtagcccccttggcaggcgggcttgggtgggggcaaggggagatctgtgtctgcccggaagggcattgtgtagagcatggggttgtgggtgacattggcaacaacaccacttctctgctctgcccatgcctctccctgttcctgttttgggtttggggacttgggattatgcgccgctctctcttctcacaccgatccaccttactgcatctgacgtgttcccttccactgtcccccatcatcgtctgtcccccctggctgggcgcctgtgaccggtgacccctctaccacccaccccgcctccctccggcccccggctccgaacactgggcttggttcggaaccccccctgccccccgacagcagcacagcagccggagagccaagagtgtagaggacgacgctgagggccacctcatctaccacgtcggggactggctacaagagcgatgtacaagccaaatcgtaacaatcctatagcctgtaatggtcccatagccatcctaacgtcccaagccaacctgagtcacagcctcttgccttttgctcagtggtgttgtttatctgggtggtttgagttgctgttgagaattgacctctgttgtccactcccagctctcacggcccctgggttaaaggtggtgggaatcacgcaggggttttcttcccctgtgaccatctgtatctgttccccttccttcatctccaccccaggttgctgtccccttttttcttccaactcagctcattccccaccttctctccctccctctccccgaccctgctctctttcatttcagatgaaatcgttagcaccttaggagaggggaccttcggccgagttgtacaatgtgttgaccatcgcaggtaactgtcagtccctccctactatgtggggctaaagagatggttggggttatatggggcttttttgctaattaacctgaggtagaatttcttagtccccctacagccctgttcattttgagacattcttgagaacccagcaaaagcctctcctgccaacttacaggggtggggctcgagttgccctgaagatcattaagaatgtggagaagtacaaggaagcagctcgacttgagatcaacgtgctagagaaaatcaatgagaaagaccctgacaacaagaagtaagcaagcaaggaagtgtgtagggaggctgagagccccaacccctacacgggagagattcctagacctggtttaggcagacagggggagtcctagaccttctcatccattcatcttttgttcatcatcttagagtagtagaacatcagggtaggaaagggggggggcccatgacattccttaatccactccccttgttttcagggaagttagattgctctgtcgtttgaccccagcctagaatggcttctgtagagatataccctggacatagccctaggactgagcatcaacctcatcgaacaatgaattaagcttttataagtagaactatgctgataaggccacagacatttatgcagtaatattttgttcacatacattcacagtccaaaaatagaataaggactttaagccaagatatgaggccagtaggtataaataggagcccagtggtagctagtggtgaatgaatatcaggagttgggctggggtttgggatttaggatggacagtttgatgattccaggatctatactgtttggagcttggcactccacagctcttccagcaaatagtttttgaactatttaaaatgacgcaggaagatattttgaaacttgggctgggcatggtggctcacgcctgtaatcccagcactttggaggccgaggcgggtggatcacaatgtcaggagttcgagaccagcctggccaatatggtgaaaccccgtctgtactaaaaataaaaaaattagccgggcatggtggtggacaactgtagtcccagctacttggaaggctgaggcaggagaatcgcttgaacaggaggcagaggttgcagtgagccaagatcgcgccactgcactccagcctgggtgacagagtgagacgccatctcaaaaacaaaaaagaaaaaaacatggcagatagtaccatttctttcttgggtctggtagaggctactccttagctgaactgaattttggtgttagtactagctggcatggttttacacaagttatgtggaatcaacagctatgaagtacctccttgttggatggctgatgggcagatgggagctcatcagacaatcccccttcccccatctctcttctcagcctctgtgtccagatgtttgactggtttgactaccatggccacatgtgtatctcctttgagcttctgggccttagcaccttcgatttcctcaaagacaacaactacctgccctaccccatccaccaagtgcgccacatggccttccagctgtgccaggctgtcaagtgtgagtggggtgggccgaagtggactctggggcagtccctcccttcattggatctcttctgtcggttgtgcactggtgaagcccctaaacagtcagctgtctgttatctgcagttctttgatttactgtcatcttgaaacgtcttctgacttaactccttgactgatgtctttatcgtcactgattgctcttactctacacctagcctagcagcagctagaagagaaagcctttggaatcaaagcacttaattaccctccccttttcctttctccctttcttgggaaagcatcagtcagacagcaaacataaagagacaaaaatacactccttagggtaaaggcttacatttgtctgggatgagatgttcattcacagcaaaggagatgggaacacagagtatgtagttcagctaaggggcaaggtggggaattcaaagaaatatatcattcctctggagtcatcaaaataatacagtttcacagaattgagttaacataatgccagctagacacatgtcaaagtgtgtacacactacaactcaaagcaaactttttttttttttacatcagttgagctacatatgtatcttacattagaaagagcagagcttcttagaccaggcattccatttagacgtagagcggaaagcagccctagtgattctggacctgtctcctcactggctttgccctaggtaaccaggcctggggtcagctgataccagttagctctggccacctgcaccaagcctgacctggccttctcccctacagtcctccatgataacaagctgacacatacagacctcaagcctgaaaatattctgtttgtgaattcagactatgagctcacctacaacctagagaaggtaagatggatagggtctgcccttggttactgggggcaggcagctgcaccactttgccttctgccgagccctttgttttctcccttttatttcgtcctcccacattttctccctgactggctccaactgggtaaaactaaataggttgaaagggagaaatctcttaagaagacttaaattgggagataacttgtacaggggacttcagataactttccagtagagtgaaagtttttaaggttcttggtttgggctttatttatttatttatttatttatttatttatttatttgagacagagtctcactctgttgcccagactgatgtgcagtggcataatctcggctcactgcaacctctacctcccaggtttaagtgattctcctgcctcagcctctggagtagctggggttacaggcacccgccaccacgcctggctagtttttgtgtttttagtagagatggggttttgccatgttggccaggctggtctcgaacccctaacctcaggtgatctgcctgtctcgggctcccagaatgctgggattacgggtgtgagccacagtgcctggcccggacttcttttttgagatgtgtatttctgtgaggtaggaaagctcggctcctttgactaactggagataatgaagatctcagacctaaagaagctctccctcctttgacccctttgctacatgttacatatttttagagaaactcctttgctacatgttacattttttcagaaaaacccatttgctacatgttacattttttcagaaaaacccatttgctacatgttacatgttttcagaataactatatatctggcacttgagtgtagtcttcagatgcttacagatgtgcacgctgttctataatcatttcttaatccttttgctcccctacttctaaaagtattatgctggatgtggtggaagctgtaaaacaggaatttcccaggcttgtaaggccaggcaggagatcacagtaccttttttaaggctcagaagcaatgtagagaatactggtggaatctcagtctgggtgcagaggttcatcctctttctcctctgctcctagaagcgagatgagcgcagtgtgaagagcacagctgtgcgggtggtagactttggcagtgccacctttgaccatgagcaccatagcaccattgtctccactcgccattaccgagcaccagaagtcatccttggtaagggagggcaaggctgtccaagtgtgtgagatgatgtgagggtggggccacctaagcctcataacaccttttccctcccattctcacccagagttgggctggtcacagccttgtgatgtgtggagtataggctgcatcatctttgaatactatgtgggattcaccctcttccaggtaagtgatgggatgtcttacttgactgcctggcattcttctacctggttcctttgttttctgctgaggacctgcctactcagttctccacattgcctgccttcctggcagctgatccttagcatgcccttttcagtcccatgctcagtttctgtttttgtttcccagacccatgacaacagagagcatctagccatgatggaaaggatcttgggtcctatcccttcccggatgatccgaaagacaaggtgaaccttgagggggcactagttaactcttttccttttctctccacagaattggtctatttcacatcattttcttttttctttgatacctcctctccccccagttactttcagatggggaaataagggaattgtaacaagggtgaccttctgattcctcaacctccccttcccctctagaaagcagaaatatttttaccggggtcgcctggattgggatgagaacacatcagctgggcgctatgttcgtgagaactgcaaaccgctgcgggtgagctgggctcgggataaatagtgcccaccgtccagaagtcacttccttcttagggtggttgccccctggaatgctcttcaacaagccagagggttaggaaaggaggggaggaaagctgaaagaagacatctttggtcaacagaggaaacataagagggagtggttttgcggagggaaggaggttagacagcctaaccttgagacaaccagagatcaaagcaatgtcctggattctttaggtcagacagaaaagaataaactacccttgaagagcttacattttaatgaggaactaaagaagattcatgaagttgacaaggatatacaagtagaaagaactttcaaagattatggagtaattgtgctagagggaaggtaggttgagctataatatcagaaacgttggtcctggtgtggtcgtggttaggtagccttcaaattggttgcaagcagagccttggttctccaagaatgaaaggtagggtcttgaagaaggcagggtttgtaaggcatcctgcctcacctttttcctgccctcctccaccagcggtatctgacctcagaggcagaggaacaccaccagctcttcgatctgattgaaagcatgctagagtatgaaccagctaagcggctgaccttgggtgaagcccttcagcatcctttcttcgcccgccttcgggctgagccgcccaacaagttgtgggactccagtcgggatatcagtcggtgacgatcaggccctgggcccccctgcatcttttatagcagtgggtgtccagtccaggacactggtgcttttttatacaagagaacgagccagagttcactccttcctcctggctctctatatacctgtgaatatgtgaaatagtgtaaatatgaaagaacttgtacctatcacttcaacccctgccttgtacataatactattccatccacacagtttccaccctcacctgccccctcatacggagttggatgggggccgagtgaggtaaccaggtggcatctaccccatgttttataaggaattttgtacagtctttgtgaaataaaataacgtgcttcatttgacccccatccctggagttggaggtttgggaatgctggggtggagggatgaaactattggcaaactttctgagtttgggtatgaagggagtcctccttaccctccaaaatgaagcacagccaggctaccatttatttcccctgtccaccttatcatatgggagggtagtgatgggtggggcagcatttctttcagattaaaacagagaagtgttatgaggtggcacttctcggatgtggaattatgagagttgggaagatctgactcctagagtcattaggccgcggcccagtatagagccagaaactcaggttgaaaacgtgctcaacctggctcctaggggggattgccaggaccggtcagaaggctcccgtcgtccatctcgggagactaggaaggccggattcctacgcgaggcctgctgggaagtgtagttcgttagtggaaggaagtcacatggaagaggggcggtagttggttgtgggcactgggttagaggtatcacgtgggggcactttcgtcttagcttttggacaagacgcaggcgcaaacccacggctgctgcgggggatccttgtggccctttccggtcggtggaaccaatccgtgcaacagagaagcggggcgaactgaggcgagtgaagtggactctgagggctaccgctaccgccactgctgcggcaggggcgtggagggcagagggccgcggaggccgcagttgcaaacatggctcagagcagagacggcggaaacccgttcgccgagcccagcgagcttgacaacccctttcaggtgacttgcgccagtcggcctcttttgggcggtcaggttgattcttcccggttctgtagggtcgggctaacttgtatccccatttgtgacatttgatcctgggaagagccgccacgtggggtgacagtgactccagaccagtgagcactctggggggcgggccctgccccttaatgggctggtgctggcagtgttggatgatggatttgaggtaaatgttgtcccagtcctgggacaacggcgtggccccgaaggtgcagtacttggagccacaggcagtttgggaatggtccctgggaattcccctaggtggcactgggtgccagctgagacccgggtctctgccctcaggacccagctgtgatccagcaccgacccagccggcagtatgccacgcgtgacgtctacaacccttttgagacccgggaggtgagctactggagagcataggagttcaaggaagggaagggtttgccagtgagacaagttagcttgggtacaggggacttttctgcatgcacaggaaggaagaggcactgtgatcttagttccctgagagaggctagtcagccatgggatgcctcatccttctagggccaccagggccaccaacccaaatggtttgagctctaaaagtcagtcctgggaagatctggaggctggcaaggccttaaccaatgttctgtatgggaaggctttcttgaagaaaataaaggttggggctggttggagtttaggttaggtgtgcagtttgaaagcaaggaatgaggaggactacacctgtttgtcccactggattagaagatggtgagttgtaagaatttaaggggttttcatggtacttaaaacttaaaaaaaaaagccaagcatggtgtgcatgcctgtaatcccacttgggaggctgaggtgggaggattgcttgagcccaggaatttgatggagaccatcctgggcaacagcgagacccccatctcttgagacgttttaaaaattggctaggtgtagtggcacatgcctgtagtccttgctacttgggaggctgggatggaaagactgcttgggcccaggagtttgaggcttcgatgagtgatgattgcaccactgcactccagcctgggtggcagagagacaaccccacactccatccccagaagaaaagagaaaaaaaaaacacagttaagtggggagatatggtaaatgagtgatttgagtcctcactaaggaattggatatgagggatgataaggctgctacaggtcatcatagagttctctgacagaaattcaacagaagaactagcttcctaacaaatgggggaaaggctgcttccttacatcatgagttctgggtctaaaggtattcaagcagactatagattcctgtgttatgagggactagatgatcactaaggtcttttcctcaacagccaccaccagcctatgagcctccagcccctgccccattgcctccaccctcagctccctccttgcagccctcgagaaagctcagccccacagaacctaagaactatggctcatacagcactcaggtacaggaggtgtgcaggtgagggctggggagaagggccagtcctggggcccagggctcacatctccgtctgctcacactgggcaggcctcagctgcagcagccacagctgagctgctgaagaaacaggaggagctcaaccggaaggcagaggagttggaccgaagggagcgagagctgcagcatgctgccctggggggcacagctagtaagtaatagagtggggaagagcatctgagagtttgggaggagcaaaaacaggtcttaagggcctgggctcggctgggtgcggtggctcacacctataatcccagcactttgggaggctgaggtgggcggatcacgaggtcacgaggtcaagaaatcgagaccatcctagccaacatggtgaaaccctgtgtctactaaaaatacacacacacaaaaattagctgggcatggtggcgcgcacctgtagtcccagctactcgggaggctgaggcagggagaatcgcttgaacccgggaggtggaggttgcagtgatccgaaatacgcgccactgcactccagcctggtgacagaaatgagactccatctcaaaaaaaaaaaaacacaaacctgggctctggagtcagactgctgagtttgaattttagagatactgcttactaaccatgagcttttagggaagttacttaatcttgaatgcctcagtttccctatttataaaatgaaaaccacgtttgcatccgtttgacagggttgttgtgaaggttaaacaaaatatatgtgaagtacttggtacagtgcttagatgttttaaataataataaacagtattaatttttccactctcacttgtctccttggaccccaaattggagataaaagagaggatccagggctgggtatggtgcctcacgcctgtaattccaacactttgggaggccgaggcaggcaggttgcttgagttcaggagttagagaccaacctggacaacatagtgagatcctgcctccaaaacattaatgaaaaaaattagcagggcatgatgtacctgtctgtagtcctagctcctcaagaagctgaggtggacggccaggcgccggggctcatgcctgtaatcccagcactctgggaggccaaggcgggtggatcacctgaggtcaggagttcaggaccagccaacatggtgaaaccctgtctctactaaaaatacaaaaattagctgggcgtggtggcatgtgcccataatcccagctactcaggagactgaggcaggagaattacttgaacccgggaggcggagattgcactgagccaagatcacaccactgcactccaacctgggcaacaagagcgaaactctatctcaggagaaaaaaaaaaaaaaaaaaaagctgaggtgggagggttgcttgagcccaggaggttgaggctacagtgaaccatgatcataccactaccttccagcctgaacaacagagaccctatctcaaaaaaaaaaaaaaaaaaaaaagagaggatccagggatggagagaagggggagtgattcctttgttggtctctgttttacttctggggtccacctgttttttggcgccttacagctcgacagaacaattggccccctctaccttctttttgtccagttcagccctgctttttccaggacatctccatggagatcccccaagaatttcagaagactgtatccaccatgtactacctctggatgtgtgagtagtgagaagccttttggaggaagttacaggtagatctcttaactgccctggggtccgctcaccaagaaccaaacacttcacctctatttagaactcaccagcctgctagcaaatgttcttgccctctccccactttttattgtccatatgcaggaatatattttgaattctttagatgtctttgggctgggtgcagtggtatacgcctgtaatcccagcactttgggaagctgaggtgggtggataacctgaggtcagaagtttgagactagcctgatcaacatggagaaaccccatctctactaaaaatacaaaattacctgggcgtggtggcacatgcctgtaatcctagctactcaggaggctgaagcaggagaatcacttgaacccgggaagtggaggttgcaatgagccaagatcatgccattgcactccagcctgggcaacaagagcaaaactccatctcaaaaaaaaaaaaaaaaaaaaaaaaaaaaaaaaaaaggccgggcacggtggctcacacctgtaatcccagcactttgggaggcccaggtgggcagaacatgaggttaggagatcaacaccatcctggctaacacggtgaaaccccgtctctactacaaatacaaaaaattagccgggcgtggtggcgggtgcctgtagtcccagctacttaggaggctgaggtaggagaatgggcgtgaacccaggaggcagagcttgcagtgagccgagatcctgccactgcactccagcctgggcgacagagcgagattccatctcaaaaaaaaaaaaagaaaaaaaaaaattagctgggcgtggtggcgggcgcctgtagtcccagctactctggaggctgaggcaggagaatggcgtgaaccggggaggcggagcttgcagtaagctgagattgcgccactgcactccagcctgcgcgacagagccagactccgtctcaaaaaaaaaaatgtctttgcaaggggatcacacattattgacatttgctttctccatctcccctgttgaggattccatgaaggcagcagctgccttcatttccttactctgccatgtttggtgaatattataggatgagcatagatgggaaggagccttcattgcagtccagaagggctcctcatcctgtccctctgccccttaggcagcacgctggctcttctcctgaacttcctcgcctgcctggccagcttctgtgtggaaaccaacaatggcgcaggctttgggctttctatcctctgggtcctccttttcactccctgctcctttgtctgctggtaccgccccatgtataaggctttccggtaagtgtgttagtggtgggagagtgatggagacctgggatgggccccacgtctgcccatccttcagctctaattcttctcccaccctccccatttttttcctctttgtaggagtgacagttcattcaatttcttcgctttcttcttcaatttcttcgaccaggatgtgctctttgtcctccaggccattggtatcccaggttggggattcaggtttgtgaggctgttatccaccctcacctttccctctagatccagccagcactgggtgctggataggagttgttcagaaaaaggaaatgtggttttaatccttgggaggtactagtttaatgagatacaagacatacttccaggatagagcgcagacagcactcttgacacatatagattgaagggaagaatgctgcatttggccaatctaaggtggcttcctggaggaggcatagaaccatggttgaaaggaggaagaagaatccccagatgagtgcctggaagagcttggagagctcagggctaatggttcagaaactggaattaaactatgaagagattagatacagtttgggattgtggtgcttggaatgctgctcgattgacagggagccactgctgatgggaagggtaggaacaggggatgctggtgacataaccagtggagaagctgaggagcccctcttcactggtacatccttccctttacagtggctggatctctgctctggtggtgccgaagggcaacacagcagtatccgtgctcatgctgctggtcgccctgctcttcactggcattgctgtgctaggaattgtcatgctgaaacgggtgagggctgtgtcgaaggtggggccgggatggtgagatcatgggtccccaggggcgtgggtggaacattcaggagcaactggcacaggtcaggctgctgggttgttctcagctaatggacctctggggtgtgtgtttctgtgtgtgagtgtgtgtgctgggcagcaggctgctgagtggtagtgatgctgttaggctgggggtggggaaccagtggctggaatgggcggtaatgtctttgtcctctacttgcagatccactccttataccgccgcacaggtgccagctttcagaaggcccagcaagaatttgctgctggtgtcttctccaaccctgcggtgcgaacccgagctgccaatgcagccgctggggctgctgaaaatgccttccgggccccgtgacccctgactgggatgccctggccctgctacttgagggagctgacttagctcccgtccctaaggtctctgggacttggagagacatcactaactgatggctcctccgtagtgctcccaatcctatggccatgactgctgaacctgacaggcgtgtggggagttcactgtgacctagtccccccatcaggccacactgctgccacctctcacacgccccaacccagcttccctctgctgtgccacggctgttgcttcggttatttaaataaaaagaaagaggaactggaactgacatccccgtttcctgaatcttcattgggaattaggccttatgaaagagaaaggagagtgtggagtgaggtgggaaggtcggacccggctttagtgtaaactgggagagagatgaggggcggggcggtggagcccgagtggctggcgcaggaaggaggtgggaagtccacggaaacgcgaaacccggagacgccagggagccctgctccccacccctctccattaatgacggggaagagccaccgcctctgccgggaacgccaaggaatacgcgggcctggagcctgaaaagctggatggggctcaagtggaggcccaaaggatcactagcagcctagccagggtccagagcgaggcagggactggaggagcgcttatccgactgcctcgccctgccgcgggatcccccaaccccgacagggtctcagtcccgaactacaactcccggggtgcaccgcgccggccctcgccgccatgcccctccttcccgcaccatccccattcccatcccccttctctagtccccgacctgcggcagccggagctcggggagcggagcgtggtggggaggggagcgggacaggcgacacaggagacagcggcgccgcggcctctccccaccaggcggccccggatcctactggacgccctgagggcacaccgaccgcgcctctagagtcaccccacgccgacccctcccctcttctctagacttatttccatccttcccgcttttaccctccccacccgtccctgggctccaggccgccgccccctcctcactcctggaccggcccttctcggtgcccctcttccctagggagatgcgatgagccggtgcccccgcgtcctcatcgtcgccccgggcacggtgcccgtccagtgcccgtggtggggagggagcactccgcggtccctccgtgacgcccctcgcttggccccccccacagctggcgtccctcggccatgccccaggggacccagccagggggtgggctctagagcgagtggggtggagaggagaaaggacggggccttgggggcctctgagatgctcccaagtgccagggagggccgagcgaggcgcaggcaaccgggcagcaggcatgatgccctcgcctagtgactccagccgctcgctgaccagccggcccagcaccaggggccttacccacctccgcctccaccgaccctggctgcaggccctgcttacgctggggctggtccaagtgctcctgggcatcctggtggtcaccttcagcatggtggcctcttccgtcaccaccaccgagagcatcaagaggtcctgcccgtcttgggctgggttctcggtgagttgggtgcacagttgttgggtgggggaggctcctcgggccccaccctccacaccagctgcaagtccacatgcttgcctctcctccctctcctggtcctctgcctccttacagggctgggtgcatcctgtggtgaggggctcactcaggagcctccccctgccaggctgagcctgtgcccactctgtccccagctggcgttctccggggtggttggcattgtgtcctggaagcggccattcactctagtggtaggtgccagggtccagtgcccactgggaggcaggtgcccagcacgcaaggggaagcccatttatgacctcaagaagggaactggctccccagttggtgccagccgggtgggcacgaagttctgtgaaggagggggactctgtccgtggcagaggagtactcatgagggtcccagccctgagtctgcaccctgttttccccagatctccttcttctccttgctttcggtgctctgtgtcatgcttagcatggctggctctgttctctcctgtaagaatgctcaactggcccgagacttccaacagtgctctctggtgagatttgaggagggagagctggaaagaactggctgggggaggtgtgcaggacacctcagtttgtgctgactcaggctgcctcaccctccctgctccactcaggaaggaaaggtctgtgtgtgctgtccctctgttcccctcctccggccctgtccagagtcggggcaggaactgaaagttgcccctaactccacctgtgatgaagcccgaggggccctcaaggtgagcttgcaccctgcaaacatcctcctggttctcactcttgcctcccctgctggggatctcacaggcccataatgtgtggaacttagccgtctcctgactcctctcctcctttcccttccccagaacctgctcttcagcgtctgtgggctcaccatttgtgccgctataatctgtacactctctgctattgtctgctgcatccaaatcttctccctggacctcgtgcatacggtgagaagggagcaggggccagggcacgcaggtatggtgggggcaggggtgtgtgtgctgagacttgcctgagggaacaatggctacagatctggcttttgagcaccaggggctatgggttatctattatcctcatctattggaggaatggatgtttagtggggaggatgagaaggggagatggcagggagtgagttaagtatgtgatgctggtctgggaccaggagagggtgctttagagaatgggactggatggtggggtagagtcaagaaggtcctatgctgggcacggtggctcattcctgtaatcccagcactttgagaggcccaggcaggcggatcacctgaggccaggagttcaagacccacctggccaacatggcgaaaccctgtctctattaaaaatacaaaaatcgggccgggcgcagtggctcgtgcctataatcccagcactttgggaggctgaggagggcagatcacctgagatcaggagatcgagactatcctggctaacatggtgaaaccccatctctactaaacatacaaaaaattagccaggcgtggtggcgggcgcctgtggtcccagctactcgggaggctgaggcaggagaatggcatgaacctgggaggcagagcttgcagtgagctgagatagtgccactgcactccagcctgggcgacagagcaagactccatctcaaaaaacaaacaaacgaaatacaaaaattagccaagtgtggtggcgggtgcctgtaatcccagctacttgggagtctgaggcaggaaaattgcttgaaccggggagtcagaggctgcagtgagctgagatggtgccactgcattccagcctgggcgacaagagcacagactccgtctcaaaaaaaaaaaaaaaaaaaaaaaaaaaatatatatatatatatatatatatatatatatacacacaaaattacaaaaattaggctgggctccgtggctcatgcctgtaatcccagcactttgggaggccaaggcaggaggatcaccagatatcaggagtttgacaccagcctggccaacatggcgaaaccctatctctactaaaaatacaaaaattatccgggtgtggtggcgggtgcctgtaatcccagctactcggaagactgaggctggagaatcgcttgaacctgggaggcagaggttgcagtgagctgagatgtagccattgtactccagcctgggcgacaagagtgaaacttcgtctcgaaataataataataataataattagctgggcatggttgcacacccttataattcctgctactcaggaggatgaggcatgggaattgcttgatcttgggaggtgggggttgcagtgagctgagatcgcgccactgcactccagcaacagagtcagactctgtctcaaaaaaaaaaagaaggtcctagatggaggtgaggctaaagggtggacattcctgtgaagacacagaatgtgtggagcttctggatggaggtggggccataaagaggaatttgtgggtgggcagggccagaggctagaggtacagggtgacggtggggttaaggagagctgattttgggtgagggaggggccagaataagagcttctctcaggggatagggccagaaaaaataatgtagatgagagaggagtttggggcccaggaggagctgtattcccagaatccagacttgctgacctgctcgcttccccagcagctggcccctgagcggtcagtctcaggcccactgggacctctgggctgcacgtccccgcccccagcccctctcctacacaccatgctggacctggaggaatttgtcccgcctgtgcccccaccgccctactatcccccagagtatacctgcagctcagaaacagatgcacagaggtaaggcctggtggggtcttgctgggggagctaaggaaggggactggggctgggcctggattgctggagagagggatctttgtggagggggaattatttctcctacattgaccctcttcctcatctgccagcatcacgtacaatggctccatggacagcccagtgcccttgtaccctaccgattgccccccttcttatgaggcagtcatgggactacgaggagacagccaggtgagagcacagcacggcttggggcgggctggggagccgggttgtagcctggaaagctgaacaggctgtagcctctggataaagatagtaacagtggtcaaggtctttacagcaccagcatgcccactgttgcctttgatcttccctagagcctggtgaggtgagtgggttggaagctatcatttctgccatacagacgtggaagctgaggctgcacaattaagtgacttgtacaaagggacaaggctggtctggaatctaagtctccagagctctgtctagcacatgggggtgttcagtgtgtagggctgaacccttgaccctgtgtcttctgcaggccactctctttgaccctcagcttcacgatggctcgtgcatctgtgaacgagtggcctccattgtagacggtgagcagggcgtaatgaggggtggacaagggcggggctgccagggatagctggggtgggtagagacaatagaaggggaaaacaaggcggagttggtggtttggggacataggagggctgtggcaacttggaaccctggacttatttttctcctctgagataaagctggaggcacagtggcccctagaggctgggcttgggagaagaggaactgcctgggcagggctaggccaggccaggctggtgctacacagcgccccctgccgcccacagtgtccatggacagcgggtctctggtgctgtcagccattggtgacctccctgggggctctagcccgtcggaggactcgtgcctgctggagctgcagggctccgtgcgctccgtggactacgttctctttcgctccatccagcgcagccgtgccggctactgcctcagcctggactgtggcctgcggggccccttcgaggaaagccccctgccacggcgccccccacgggctgcccgctcctattcctgctctgcccctgaagctccacccccactgggtgcccccacagctgcccgcagctgccaccggttggagggctggccgccctgggtgggaccctgcttccccgagctgaggcggcgggtcccccggggagggggccgcccagccgcagccccgcccacccgagccccgactcgtcgcttcagcgatagctcaggttccctcaccccaccggggcaccggcctcctcatccggcatccccaccaccgctgctgctgccacggtcccacagcgacccaggcatcacgacctccagtgacactggtgagccccctccccgactgcccaggctcaggagagggtaggcactgggagttaggtggccagtgatgcccaccaggattggggcacagttgaggtgggtgaggaggaagaaagggtgagttcactcctctggtagacattctcaggtactcacctcctagggacagaacatccatagcttagcagctaaaaaaggagaatttttttttttttttgagacggagtctctggctctgtcgcccaggctggagtgcagtggcatgatcttggctcactgcaacccgtttcccgggttcaagtgactctctcctgcttcagcctgccgagtagctgggactacaggtgtgcgccaccatgaccggctaatatttttttttttttttttttttgagacggtgtctcgctctgtcacccaggctggagtgcagccgcgcgatctgggctcactgcaactccgcctcccgggttcacgccattctcccccgggttcacgccattctccttcctcagcctcccgagtagtgagtagctgggactacagatgcctgccaccacgcccggctattttttgtatttttagtagagatggggtttcaccgtgttatccaggatggtctcaatctcctgacctcgtgatctgcccgcctcggcctcccaaagtgctgggattacaggcatgagtcaccgtgcccgggcaatttttgtattttttagtagagacaggtttcacccttttggccaggctggtcttgaactcctgacctcaagtgatccacccgcctcggcctcccaaaaggatttattttttgaaaccagttccacagctctcagcttggtccacttatctgtcctccccaagcttcagctgtcacttgttaacatgtataataatagtacttcacgccgggcacggtggcttgcacctgtaatcccagcactgtgggaagctgaggtgggtggatcacctaggtcgggagttcgagaccagcctggctaacatggtgaaaccctatctctactaaaaatacaaaaattagccaggtgtggtggagcgcgcctgtaattccagctactaacgagagaggctaaggcaggagaatcgcttgaacctggaaagcaggggttgccgtgagccaagatcatgccactgcactccagcctgggtgacagagacacactccatctcaaaaacacaaacaaacaaacaaaaaacatgtataataacagtacttcagccataggcattgtactcgaagatgctgagaaagaacagtggcgggcaaggctgttcacacctataatcccagcactttggaggccaaggcaggtggatcacctgaggtcaggagttcaagaccagcctagccaacatggtgaaacccccatctctactaaaaattgaaaaattagctgggcctggtggtggacgcctgtaatcccagctactagggaggctgaggcaggagaatcgcttgaacctgggaggcggaggttgcagtgagctgagatcgtaccactgcactccggcctgggcaacacagtgagactccatctcaaaaaaataagaaaggagatagtactggggaacgctcagcactgtgcgccaggtgctgaacaacaccactgcagtccttgttgtggtggattgtaccatctagttgctggctaatatggacagagatgctggccctttgattggggatggagcgtgggagctgtgaaagctcctctgggcttgagttcccacaggagggtgggcgtgtccacagaacacttccactcactccctgtctccctttctctcttctccccagctgacttcagggacctttataccaaagtgcttgaggaagaagctgcttctgtttcctctgcagatacaggtcaggcatgtggtttgcgccccagggatggggattgggcatggctgcccagccccctctccaccctacaataccattctcttatctctgtctctctgcagggctctgctctgaagcctgcctcttccgcctagcccgctgcccttcccccaagttgctacgtgcccggtcagccgagaaacggcgccctgtgcccaccttccaaaaagttcccctgccctcgggccctgcacctgcccactccctgggggacctaaagggcagctggccaggtcggggcctggtcactcgtttcctccagatatccaggaaagccccagaccccagtgggactggagctcatggacataagcaggtaggaattcggggagccaggaaagatgtttgggaaagcgtggagcttcagattgagccttattgatgatgccctttcttgtgtccctgtccaggtgccccggagcctgtggggccggcctggccgagagagcctccaccttcgcagctgcggagatctgagctctagctcttccctgcggcgtctcctgtctggccgcaggctggagcgtggtacccgcccccacagcctcagcctcaacgggggcagccgggagactgggctctgacctaggcttcttgtcacactgaacacatccagccacaggcaccagctggttgggaccagcagcccccagcatcctcttgcactggctggcacaaaaagaaacctgctgtataccccccaaagtgtccctttccctcctacctctggggtctcttgctgcttgcctctgctgctctggtctgggagagcttctgtcctgtgctgcatgggtatttagactgtgggggagatgccccttcttatagcactggaggaggaaaacaaattcttgtccccctcagaatgagagtggctctttctgatttgcaagggcactatggtcagggcaaaggcatggcccaggtgtttaagtacagggtgacgtgtgcctatgcaatggggtggtaaggcaggcacgaagagtccaaaaaatctaggtggcctctcagctctgccacctctagctgcatgaccttgggcaagctatgtaaccccaattgcctgctccattaaagactgtgaaggtagaatgtttgtaaagctcttaacagtatgtaagccttcaataaatttcagttttccccttgttttcttgatcattctctgtcaccagtgaaatttgttctagtgtctctcatatttaagaaaactctttcaggactgggtatggtggctcacacctataatcctagcactttgggaggccgaagcaagaggatcgcctgagcctaggaattcaagaccagcctgggcaacatagtgagaccctgtctctacaaaaaacaaaaaattagccaggcatggtgggacacgcctgtagtcccaactactcaggtggctaaggtgagaggatcacttgagcttgggaagtccaggctgcagtaagctgtgattgagccactgcactacagcctgggcaacagagcaagaccatgtctcaaaaaaaaaaaaaaaagaaaaaagaaactttcaagacactctttccaaccactaattgtaactctgctcctccttttcacagcaataggttttctttttcttccctccactgttaaacatccattctctcctcacccacccccatcagactccttcccctatctttccacagccactgctctgaccaaactttccagtgaccacagtggtgtcagacccagtgaccatttctctgcctgcatctcacttgacctcgaggcagcaattaatacccataatcagcatcttcttgaatttgtccctttgaaaagggaaatattggctcttctactttgtcctgctgaactgcttaacattggagggccccagggccctcacctaagccctctttcctacctccactctttctataggtggccctactactaaagtccatggctttaaataccatctttctatgtgttaatccatgactccagccttgacctcccatgagcgccatccaactcagcatgtctgcttggatgtctaatgggcatttcagattcaacatggccacaactgaactcttgattcccaccccagcaccggttatttttccactgttcccatctcaatggcacctccattacccatttgcacattccaaaagctcaggaaccatggtgacttcttttcccatatccaacacaaccaatcctatcctgaattcatccacatcccaccacctccccagctacctagctccagccatcctctctccacaacctctgaatcagtctttcacttttcccagcaatccattctccactcagcaaaatgatgataaagcacgtcacatcaaggctctgcctcaatttaatggcttcccattgtatttagaatcatctccaaactcccagagactatggtcgagctacaatctggcccaccttctgttccagccaaatttcctcacagcacaaggacgtttgcacctgctgttttgccaagcatgaaacccttggcccctatatctggtgctatcacctaatatcaggttttagctccattctcaccatttcagtgagcacccaatccccatcgcagtcattctatcacatagccatgtttttttttgtttgtttgtttcattttgtctttttttgagacagggtcttgctttgttacccaggctggagtgcagtggtgtgatttgggctcactgcaaccttccacctcctgggtcaagcaattctcctgcctcagcctcccgagtagctgggattacaggcgcccgtccccatgcccgcccagctaaattttgtatttttagaagagatagggtttcaccatgttggccaggcgggtctcaaactcctgacctcaagtaatccgcctgcctcggtctcccaaagtgctgggattacaggtgtgactcaccgcgcctggccacatacccatggtttcagcatgtatcactatctaaaattattatttttgtttatatatctgtgtcgtcccatagaaggttaaggtcccaagatcagaaacttgctcattgcagtgggtctaacactcagtaggtcctcaacaaacattcgttaagatactaaagtggcagggtggggccctgtaaacagcttcaggagcttcaggaccctgtgcttgtaggggcaacgtggtgccctccaaggaagacagggaggtgggaggagcactgcccagagatggcgtcaggctgcaagacttcttgaataattcagcatcataacaacccagcctcaggaagggatagggcacggccaggacgaaacattaggaggcgatggacaatgggattcccacggggcagcttctgcgcactggacgttccctaacctgaggctctctaaagaggaaggttaggaatcctctgagcttcggtgggctggactcactgtgggaattcaatcgcccccatccaccaacagtgtgctggcgggaaaacgccgacacgcatgcgtagttctcgcgccggctcctctctctctctctctctctctcgctcgctctctcgctctctcgctctctctcgctcgctctctcgctctcgctctctctctctctccggctcgccagcgacacttgttcgttcaacttgaccaatgagacttgaggaagggctctgagtcccgcctctgcatgagtgaccgtctcttttccaatccaggtccgcccgactccccagggctgcttttctcgcggctgcggtgatcggtcgggctgcatcctgccttcagagtcttactgcgcggggccccagtctccagtcccgcccaggcgcctttgcaggctgcggtgggatttcgttttgcctccggttggggctgctgtttctcttcgccgacggtaggcgtaatgaatatttcgacctttggatcttagctgtcccctccctgcgttcgcacttaacctttttcaccattattattattattgttattattattattttttgagggagtctcgccctgtcgcccaggctggagtgtaatggcgccttcttggctcactgcaacctccgcctcccgggttcaggcgattctccgacctcagcctcccaagtacgtgggattacaggcacccgccaccacgcacggctaattttttgtatcttttagtagagacggggtttcaccatgttggtcaggctggtctccaattcctgacctcgtgatccgcccgcctcggcctgccaaacagctgtgattataggcgtgagccaccgcgcccggccaaccatcattattatttttaacggtaaggatggtcagattttactaatgaagaagagattataaaatcttcaagtctttatatccacttgctttttgaggggtggagtgggaagaaggttatgtaattcatacgttcttcagagatgtgacaaacattcacggagccggacgacgtcgggttggattcgcactggagctgcagatgggtgccaggatggactggtccctaccctccgcttgaacctaggaggcggaggttgcagtgaaccgagatcgtgccactgcactccagcctgggtgacagagatactccgtctcaaaaaaaaaaacaaaacaaaaaacaagcggactgggcgcagtgcctcaccctgtaatcccagcactttgcaaagccaaggcgggaggatcctttgagtttaggagtttgagaccaacctgcgcaacacagtaagaccccgtctctacaaaaaatacagaaattagccaggtgtggtggtgtgcgcctatagtcccagctattctggaggctgaggtgggaggattgcttattctggaggcagaggttgcactgagccgaaatcaagctactacactccatccagggcaacatacggagaccctgtctcaaacaaacaaacaaaaaattgctcagtacctggccaaaaaagaagaggctcactatgcagaggggaagtggaaggagatgtttggacttctaaactcaatagagcaggagaggcaaatgtagaatgtgctcaggaaatatctgtgagatgaatgaacttgagggaagtaaggtactagatattacctgccctacccagaacaaatcctgtgcaatgtttccttgaaaagtgagaagtctggaaggggtggctactgacatagtgaagcaactagttcaattctacaacttgacagctaccctgtgccaggctatctacgaggatacttagaatgcataagacattccttcaaggaactccaggaacagaggcctgacatgttgcaatgtttagtgtcaagcagtgtactagagacacattatcacactcaaacctcacaacaattctgtgaggtaggagttatcactccccttttatagatgaaacagaggcttagagtgattgatttattgaaagtcaaacagccagtaaatggtgtagccaggattccaaacttgctgtctcactgagactgtacttaattactggagggaccgggtgtggtggctcattgctataatcccaacaccttgggaggctgaggctggtggatcacctgaggtcaggggttcgagaccagcctggccaacatggtgaaaccccatctctactaaaaatacaaaaattagctgggcatggtggtgggctcctgtaatcccagctactcaggaggctgaggcagggcaattgcttgagccgagatcacactgcactccagcctgggcaacagggcaagactctgtctcaaaaccaaaaaaaaaaaaattactggaggaacctagaagaagaaatgatcaattttgcttggagtgtatctagaaagacttcactgagatcatttaaagaacaaaaaggatggctggggtccaggcagtggctcatgcctgtaatcccagcactttcggataccaaggcagcagatcacctgaggtccagagtttcagaccagcctggccaacatagtgaaaccccatctctactaaaaataaaaaaattagctgagcatgttggagggcacctgtaatcccagctacttgggaggctgaggcaggagaatcactcgaacccaggaggtggaggttgcagtgagccaagatcacgccactgcactccagcctgggcaacagagtgagactctgtctcaaaaaacaacaacaacaaaaaatacaaacaagagacaagtagttcccaggtgcctaccaagtggtcaggcactgcacttacctcactgactgcagtaaccaccctttgaggttgtggcattgctccattttccaggcaaggaaatgggctgagagctgggattagtcaggtcatgactgtgtgtgccactcccgctaaatctcatttgatgtggttcatgaggccacaccatggacagcttcctccttgtgtccactgaggatatggctttgtacaacactttggtttttgaacgactttacaaacctccctgtcttgtgaggaaggaagaacagttattaccatctgcatctgatgatgaaacaagggacgctgcagaggagccgcactgaccactccctccctccagtcctgtcatcccactgccagtgtcccaccctcttgtgccctgcacttcactggctaataacccccctcactttttcctctgtgaagccatcctggataattccccacccacgaatggtccctcctcatctcagagagctctccatgcacacctgttaccgtttctgtctttatctgtaaatatctgtgtgtctgacttccatgcctcacacacctctatagggcaaagactgtcttaaacatcttggtagtgtcagtattttgcacagtgaagtttttttttttaaattatatcagctttatttgtacctttttgacatttctatcaaaaaagaagtgtgcctgctgtggttcccatcctctgggatttaggagcctctaccccattctccatgcaaatctgtgttctaggctcttcctaaagttgtcacccatacatgccctccagagttttatagggcatataatctgtaacagatgagaggaagccaattgccctttagaaatatggctgtgattgcctcacttcctgtgtcatgtgacgctcctagtcatcacatgacccatccacatcgggaagccggaattacttgcagggctaacctagtgcctatagctaaggcaggtacctgcatccttgtttttgtttagtggatcctctatccttcagagactctggaacccctgtggtcttctcttcatctaatgaccctgaggggatggagttttcaagtccttccagagaggtaagagagagagctcccaatcagcattgtcacagtgcttctggaatcctggcactggaatttaatgaatgacagactctctttgaatccagggccatcatggctctttgagcaaggcacagatggagggaggggtcgaagttgaaatgggtgggaagagtggtggggagcatcctgatttggggtgggcagagagttgtcatcagaagggttgcagggagagctgcacccaggtttctgtgggccttgtcctaatgaatgtgggagaccgggccatgggcacccaaaggcagctaagccctgcccaggagagtagttgaggggtggagaggggcttgcttttcagtcattcctcattctgtcctcaggaatgtcccaagcctttgagtagggtaagcatcatggctggcagcctcacaggattgcttctacttcaggcagtgtcgtgggcatcaggtgagtgagtcaaggcagtggggaggtagcacagagcctcccttctgcctcatagtcctttggtagccttccagtaagctggtggtagacttttagtaggtgctcaataaatccttttgagtgactgagaccaactttggggtgaggattttgttttttttcttttgaaacagagtcttactctgttgcctgggctggagtgcagtggtgcaattttggctcattccaacctctgcctcccagattcaagcgattctcttgcttcagcttcccaggtagctgggattacaggcggccaccactacgcccagctaatttttgtatttttagtagagacggggtttcaccatgctggcaaggcaggtctcaaactcctcacctcaggtgatccgcccacctcggcctcctaaagtgctaggattacaggtgtgagcccctgcgcccggccaaggggtgaggaattttgaaaccgtgttcagtctctcctagcagatgtgtccattctccatgtcttcatcagacctcactctgcttgtactccctccctcccaggtgcccgcccctgcatccctaaaagcttcggctacagctcggtggtgtgtgtctgcaatgccacatactgtgactcctttgaccccccgacctttcctgcccttggtaccttcagccgctatgagagtacacgcagtgggcgacggatggagctgagtatggggcccatccaggctaatcacacgggcacaggtaaccattacacccctcaccccctgggccaggctgggtcctcctagaggtaaatggtgtcagtgatcaccatggagtttcccgctgggtactgatacccttattccctgtggatgtcctcaggcctgctactgaccctgcagccagaacagaagttccagaaagtgaagggatttggaggggccatgacagatgctgctgctctcaacatccttgccctgtcaccccctgcccaaaatttgctacttaaatcgtacttctctgaagaaggtgaggaggaaggggacaagatgacatagagccattgaaacttttcgtttttcttttctttttttaaaatttttttgaggcagaatctcactctgcccattctgtcggcgagacaggagtgcagtggtgtgatctcccctcacagcaacctctgcctcccaggctatagtgattctcctgcctcagcctcctgagtagctggaattataggcgtgcgccactaccacctggctaatttttgtatttttagtagagacagggtttcatcatgttgaccaggctagtcttaaactcctgacctcaaatgatatacctgccttggcctcccgaagtgctggaattacaagtgtgagccaccgagcccagcagacacttttcttttttctttttttttttttgagacagagtctcgcactgtcacccaggctggagtgcagtggcacaatctcagctcactgcaacctccacctcccgggttcaggtgattctcctgtctcagcctctcgagtacctgggattacaggtgcctgccaccacgcccggctaattttttgtatttttagtagagacagggtttcactatgttggccaggatgattgcgaactcctgacctcgtgatctgcccacatcggcctcccaaagtgctgggattacatgcgtgagccactgacacttttctttgccctttctttggaccctgacttctgcccatccctgacatttggttcctgttttaatgccctgtgaaataagatttcgccgcctatcatctgctaactgctacggactcaggctcagaaaggcctgcgcttcacccaggtgccagcctccacaggttccaacccaggagcccaagttccctttggccctgactcagacactattaggactggcaagtgataagcagagtcccatactctcctattgactcggactaccatatcttgatcatccttttctgtaggaatcggatataacatcatccgggtacccatggccagctgtgacttctccatccgcacctacacctatgcagacacccctgatgatttccagttgcacaacttcagcctcccagaggaagataccaagctcaaggtaggcattctagctttttcaggccctgagggccctgatgtctgggggttgagaaactgtagggtaggtctgcttgtacagacattttgtcccctgctgttttgtcctgggggtgggagggtggaggctaatggctgaaccggatgcactggttgggctagtatgtgttccaactctgggtgcttctctcttcactacctttgtctctagatacccctgattcaccgagccctgcagttggcccagcgtcccgtttcactccttgccagcccctggacatcacccacttggctcaagaccaatggagcggtgaatgggaaggggtcactcaagggacagcccggagacatctaccaccagacctgggccagatactttgtgaagtaagggatcagcaaggatgtgggatcaggactggcctcccatttagccatgctgatctgtgtcccaaccctcaacctagttccacttccagatctgcctgtcctcagctcacctttctaccttctgggcctttcagccttgggcctgtcaatcttgcccactccatcaggcttcctgttctctcggtctggcccactttctttttatttttcttcttttttttttttttgagaaggagtctctctctctgtcacccaggctggagtgctgtggcgccatcttcactcactgtaacctctgcctcctgagttcaagcaattctcctgcctcagccttccaagtagctgggattataggcgcctgccaccaggcccagctgatttttctatttttagtagagacggggtttcgccaggctgttctcgaactcctgaactcaagtgatccacctgcctcggcttcccaaagtgctgggattacagtgtgagccaccacacccagctggtctggtccactttcttggccggatcattcatgacctttctcttgccaggttcctggatgcctatgctgagcacaagttacagttctgggcagtgacagctgaaaatgagccttctgctgggctgttgagtggataccccttccagtgcctgggcttcacccctgaacatcagcgagacttcattgcccgtgacctaggtcctaccctcgccaacagtactcaccacaatgtccgcctactcatgctggatgaccaacgcttgctgctgccccactgggcaaaggtggtaaggcctggacctccatggtgctccagtgaccttcaaatccagcatccaaatgactggctcccaaacttagagcgatttctctacccaactatggattcctagagcaccattcccctggacctccagggtgccatggatcccacagttgtcgcttgaaacctttctaggggctgggcgaggtggctcactcatgcaaacccagcactttgggaagccgaggcgggtgatcacctgaggtcaggagtttaagaccaccctggccaacgtgttgaaaccctgtgtctactaaaatacaaaaaaaaaaaattatctgggcatgatggtgggtgtctgtaatcccagctactcaggaggctgagaagggagaatcagttgaacccgggagatggtggttgcggtgagccgagatcgcgccactgcactccagcctgggaggctgagcgagactccatctcgaaacaaaacaaaacaaaactatctaggctgggggtggtggttcatgtatgtatgtgtatatacatatatatgtgtttatatgtatatatatatacacacacacacatacatacacacacatacacacacaaattagctgggtgtggcacccgtgtagtcccagctactcaggaggctaatgtgggaggatcagttgaccctaggaagtcaaggctgcagtgagtcgtgattgcgccactgtactccagcccgagtgacagagtgacatcctgtctcaaaaacaaaaaaaaatctccccaaacctctctagttgcattcttcccgtcacccaactccaggattcctacaacaggaactagaagttccagaagcctgtgtgcaaggtccaggatcagttgctcttcctttgcaggtactgacagacccagaagcagctaaatatgttcatggcattgctgtacattggtacctggactttctggctccagccaaagccaccctaggggagacacaccgcctgttccccaacaccatgctctttgcctcagaggcctgtgtgggctccaagttctgggagcagagtgtgcggctaggctcctgggatcgagggatgcagtacagccacagcatcatcacggtaagccaccccagtctcccttcctgcaaagcagacctcagacctcttactagtttcaccaaagactgacagaagcccttcctgtccagctttccccagctagcctgcccttttgagcaactctggggaaccatgattccctatcttccctttccttcacaggtctgcacacctcattgccccttttgcaactactgaggcacttgcagctgcctcagacttctcagctccccttgagatgcctggatcttcacacccccaactccttagctactaaggaatgtgcccctcacagggctgacctacccacagctgcctctcccacatgtgacccttacctacactctctggggacccccagtgttgagcctttgtctctttgcctttgtccttaccctagaacctcctgtaccatgtggtcggctggaccgactggaaccttgccctgaaccccgaaggaggacccaattgggtgcgtaactttgtcgacagtcccatcattgtagacatcaccaaggacacgttttacaaacagcccatgttctaccaccttggccacttcaggtgagtggagggcgggcacccccattccataccaggcctatcatctcctacatcggatggcttacatcactctacaccacgagggagcaggaaggtgttcagggtggaacctcggaagaggcacacccatccccttttgcaccatggaggcaggaagtgactaggtagcaacagaaaaccccaatgcctgaggctggactgcgatgcagaaaagcagggtcagtgcccagcagcatggctccaggcctagagagccagggcagagcctctgcaggagttatggggtgggtccgtgggtgggtgacttcttagatgagggtttcatgggaggtaccccgagggactctgaccatctgttcccacattcagcaagttcattcctgagggctcccagagagtggggctggttgccagtcagaagaacgacctggacgcagtggcactgatgcatcccgatggctctgctgttgtggtcgtgctaaaccggtgagggcaatggtgaggtctgggaagtgggctgaagacagcgttgggggccttggcaggatcacactctcagcttctcctccctgctccctagctcctctaaggatgtgcctcttaccatcaaggatcctgctgtgggcttcctggagacaatctcacctggctactccattcacacctacctgtggcgtcgccagtgatggagcagatactcaaggaggcactgggctcagcctgggcattaaagggacagagtcagctcacacgctgtctgtgactaaagagggcacagcagggccagtgtgagcttacagcgacgtaagcccaggggcaatggtttgggtgactcactttcccctctaggtggtgccaggggctggaggcccctagaaaaagatcagtaagccccagtgtccccccagcccccatgcttatgtgaacatgcgctgtgtgctgcttgctttggaaactgggcctgggtccaggcctagggtgagctcactgtccgtacaaacacaagatcagggctgagggtaaggaaaagaagagactaggaaagctgggcccaaaactggagactgtttgtctttcctggagatgcagaactgggcccgtggagcagcagtgtcagcatcagggcggaagccttaaagcagcagcgggtgtgcccaggcacccagatgattcctatggcaccagccaggaaaaatggcagctcttaaaggagaaaatgtttgagcccagtcagtgtgagtggctttattctgggtggcagcaccccgtgtccggctgtaccaacaacgaggaggcacgggggcctctggaatgcatgagagtagaaaaaccagtcttgggagcgtgaggacaaatcattcctcttcatcctcctcagccatgcccagggtccgggtgcctggggcccgagcaggcgttgcccgctggatggagacaatgccgctgagcaaggcgtagcccaccatggctgccagtcctgccagcacagataggatctggttccggcgccggtatggctcctcctcagtctctgggcctgctggtgtctggcgttgcggtggtacctcagctgagggtcaaggaaggaaggtgtgttaggagaactagttcttggatccctgcccactctccccagggctgcccctcccatctgccccttacctccatcccaggggaagtagagactgagaatgtgggtacaataggcacagaggttgtgcagcccacgcaggtggacctgcagcttcccactgggcagctttgcctgcagcagcagggccaagtagctgaagacgaaggcgtccaaggaggcagggctggagcagagagagaagggtgggatggaggagaaccactggggtagaaggggtaaagatggagctggaggaagagtcagccttgggaggtgggctctgggcagcaggcggccaccagggaaggacaggacacacagttctagacctggtatggggagagatccccaggtggcgccagctggccctgaatagggctctatcccagggctgcataaagggcacactcagtgccccacagctcttcaggcccttcctgtgcctggctgccctcccaccctacccttttgtacctctgagaaggctctggccccacgcacagccccactgtcaccagggccagtatctgtctcagggacctcctatccagagcctgagccagccccagccccagccccagctccagctgctccatctgaacctgtatcttcttccaagccacccattaccctcttggagtcagactcacgcatctccaaagaagaacttttgagagcccaggcgctgagagagcagggtcagacactcccgagcctctcggtacagctgtaggggcgacacaggtaggcttgcagctgcgggaacagtgccacctccgcacctaagcactcccattcctggccagcatccttggggctcatctcatacaatagcccccggtctcagagctacctccttctccagctcttcctcgtcctcaggcctgtgctccccagtcagcagctgtagccgttccatgtactgccgctgcatgcggccaggcaggaagaagttgaggggaaagggcatagcctctgcataccacttccgggtcacttctacgtagttcttggtgtctatccaaaaagtatgtacctggattgggtgggcaggaagaaacaggcaggtctgagccagtgcacctgtctgattcaaggtgggcttctgacctccatgctctcctgagtctctgtgtgggtctgtgtgttcccgtcccctccccggctggccatggatgctgggaggtctgggcacactcaccagcaccgggatcaacttctcctccaggagagacatgaaggccagggtgtctgccccttgctgagctgacagatcataatcagcattgtacttctgtggaggaaatatccatggcgtggacgctggggagctgcaagggcacttcaccagggaggaaggagtcctgtctggtacccccctcactggcctctgagtgcagtggaggtacagcaaggaacttttcctgccaaggcccccttgcctgggcccagccagtagcctgttgctgttggcaaaaagcctgggccttggagcccgctggccgtcaaggtcctgggcccattgagaagaaggaagaaaggttgggccgcaaactaggagcagctcccagaatttccatggaaagctggaacaatgcctgctgacagcaactttctaacagtaactttcccgacccagacaccacaaagctagcacaacggagctcagatgcaggctaggactcggtccatgcctcaggaaccagggaaagccatcctcacactccctggatccagggaacccacgcccagggccccccagcttgttccctcagtgcccagctcttggctatttctttcacttcattccatcgcccagacaccattaccacatacacattccatccatacccccaggtctcagcctgccctaccttcccaggctccagtccctgttcctcagcatcccccaccacatcctgagtaagctttgtccccagataacctcttcagcatgatccttaaatctccctaagcctcagtttctcccctgtggaatgggggtaagaatctctttctctgaatgcccctgtgttaggaaataatttagaatacttcggaaacaaaaagctctgttcacacctaagcaatcagggcagtggcctggccttgccaggaacttaggcttttatctggatcctctttccaggcctctcaattaattccccaggtccttaacctttgggaaattagaaattaggaagagtgtcccacttctgacactgtgttccctcttggaacctgaccgtcaatgctagaagaacccttggaaaacatgctggcccagccctctagttttacaaataagggagtgcacagccctgagaggttacatggcctgcccaagatcacgcagtcaatggcagagtaaagagcatagcctaggcctccccactcctctagtaatgctctttcatcttctccaacctggctctaagccttgtccatcctgagccccatatctagcccaacctagtccctgaaaacaagaagtggcccttagaaatctctctccagtcccactatcagaggccaactgctgtcttccagtctccttcagcctgtgctcctctccctccctgactgacaggcagaaggtaccgtgcctctggatatccccacagtgccctgagctgcatctcttgccgactgctttaatacatcacagtgacattgtgtgtgtctctgccaccagactattgctccttgatgctctgggtcacctgcatctagcatggcatatatctagtgctcaataaatgtgtattgtacggaattgactgaacttctctcactggcagccccctctatccaaatcacccacctctttttgaaggtgggtgatgatcttgtgtggtactgaggtgacctctccatgactggtccaaagggcaggcagggttcctgatactgagagaaaagtataccaaccaggaccttagctgcctatccatacgtagttgcaacacattcctgcctatctcctgcttctcctcttgtacacacccttcctcacccccaagggatactgggtacctgaagggctctgccaggggttgctgatcttgtgctatatggtgcacaagaaacttttaagaaaaaagaaactttcaagacacactttccaaccacgaattctatctctgctccttttcatagcaataggttttctttttcttccctccacacttaaacatccattctcttatcacccacccccatcagactccttcccctgtgtttcttcagccactgctctgaccaaaatttgagtgaccaaaagtggtgtcagacccagtgaccatttctctgcctgcatttcacttgaccttgaagcagcaattaatctccataatcagcatcttcttgaatttttccctttgaggacattgctcttctactttgtgctctggttatcctttacaaacttttacacctctcctgaactggttaacagtagagggccccaagggtctcacgtaagccttctttgtttttgttttttttcttttcttttattttttatatatttttttgagacggagtcttgctctgttgcccgggctggagtgcagttgcacgatctcggctcactgcaagctctgcctcccaggttcatgctattctcctgcctcagcctcccgagtagctgggactacaggtgcctgccaccatgcctggctaattttctgtatttttaacagagacagggatacaccatgttagccaggatggtctcgatctcctgacctcgtgatctgcccacctcagcctcccaaaatgctgggattacaggcgtgagccactgctcccagccgtcatttttattttattttatttatttttttgagatggagtcttgctcttttgccaggctggagtgcatggtgcgatctcggctcattgcaacccccgcctcccaggttcaagcgattctcctgcctcagcctcctgagtggctgggactacaggtgcctgtcaccatgcctggctaattttctgtattttagcttgagacacggttttcaccttgttagccaggatggtctcgatctgtgagcctcgtgatctgcctgcgtcggcctcccaaagtgctgggattagcaggcagtgagccactgcacccggccatcaattttttttttttttaaatggagtcttgctctgtcacccaggttggagtgtaacagtgcaatcttggctcattgcaacctccgcctcttgggttcaagcgattctccagcctcagcctcctgagtagctgggactacaggtgcatgccaccacacccggctagtttttgtatttttagtagagacggggtttcaccatgttgtccaggatggtctcaaactcctgacctcaaatgatgtgcctgccttgaccttccaaagtgctgggattagaggcgtgaaccacattgcccaccgtaagccctcttttctacttccactctttctgtaggtggccctactactaacgtccatggctttaagtaccatctttctatgtgttaatgcataagtccagccttgacctctcttgagcgccatccaactcagcatatctggttggatgtctaatgagtatttcaaattcaacatggccacaactgaactaactgaactcttttttttttttaggcagagttttgctcttgttgcccaggctggagtgcaatggcgagatcttggctcactgcaacctctgcctccagggttcaagcgattctcctgcctcagcctcccgagtagatgggattataggccccgctacccggctaatgtttttgtatttttagtagagacagggtgttgccatattgaccaggctggtctgcaaatcctgacctcaggtgatccccctgcctcggcctcccaaagtgctggaattacaggcgtgagtcactgccccggccacacaactgagctcttcattcccaccccagcaccggttatttttccactgttcccatctcaatggcacctccattacccatttgcacattccaaaagcccaggaaccatggtgacttcttttcccatatccaacacaaccaatcctatcttgaattcatccacgtcccaccacctccccagctacctagttccagccaccctctctccacaacctctgaatcaatctttcacttttcccagcaatccattctccactcagcaaaatgatgataaagcacgtcacatcaaggctctgcctcaatttaatggcttcccattgtatttagaatcatctccaagctctcagagactatggtcagctacaatctggcccaccttctgttccagccaaatttcctcacagcacaaggacgtttgcacctgctattttccaagcacgaaaccctcgggcagatatatctggtgctgtcacctaatttcaggttttaactccactctcaccatttcagtgaggacctaatccccatcgcagtcattctatcacatagctttattttattttattttatttttttttgagatacagtctggctctctcacccaggctggagtgcagtggtgtgatctgggctcactgcaaacttccatctcctgcgttcaagcgattctcctgcctcagcttcccgagtagctgggattacaggtgtctgccatcacgcctgactaagttttgtattttcagtagagacggggttttgccatgttagccaggctggtctcgaactccttgacctcaagtgatccacctgcctcagcctcccacaatgttggatttacaggcgtgagccactgctcccggccacatagccatgttttaagcatgtatcactatctaaaattattttttgtttatacgtttgtgtcgtcctgtagaatgtaaggtcacaagatcagggacttgctcattgcactgggtctaacacacagtgcttcaacaaacactcgttaagatactaacgtggcagagtggggccttgtaaacagtttcaggaccctgtgcttgtaagagcaacgtggtgccctcccaaggaagacagggaggatgcaggagcactgcccagagatggcgtcaggctgcaagacatcttgaataattcaccatcgtaacaacccagcctcaggaagagatggggcaaggccagaacgaaacattaggtaagaggcggtggacaatgggattcccacagggcagcttttgggcactggacgttccctaacctgaggctctctgaagaggaaggttaggaatcctctcagcttcggtgggctggactcactgtgggaattcaatcgcccccccccacccactaagggtgtgctggcgggaaagcgctgagacgcatgcgtagttctcgcgtctggcacccgctccctttccaatacgcttgcgccccgtctgtgctacggatggtcagggagagttgtccgtcttcaaatggaccaatgagacttgtggaggggctctgagtcccgcctctggatgagtgaccgtctcttttccaagtgaggcccgcccgcctccccagggctgcttttctcgcggcacgggtggtggggctgcttcttgacttccgcgcctagtgcgcagggccccattctccagtcccgcccacgcgcctttggaggctgcggtgggatttccttttgccttcggttggggctgctgtttctcttcgccgacggtaggcattataaatatttcgccctttgaattttagctctcccctcccggcgttcgcacttagcctttttcatcattatcattatttttaatggtaaggatggtcaaattttactaatgaagcgattataaaatcttcaagtctttgtatccacttgctttttgagggctggagtgggaagaaaggtatataattcattcattcttcggacatgtgacaaacgttcacggagcgcggcaacgagcgccggtgtcgcgatgcgcactggggctgcacatgggagccaggatggactggactggtccctgccctgcccgctgacgattggcaggccactgcctttgatgagctgggcgctataactgccattaagccatttgtacaattaatcacaacagtgataagagcgacaaaggagctattcgggtggctgaggcggaggatcttttgagcctaggagttcgagaccagcctggggaatagagcgagatcctgtctcaaaaaaagggggagaaaaagtgacaaagaagttgtgagggctatgagtttgcgttagaggaggtgtgtgaggtggggaggcggcagggggcgcggttgttcttagagaaagtgacatccgggctaattttgaaagaataagtgttaactaggctaagcggtgggaaagagtagtgtgtgctgaaggaagggaagaggaacctggcaagttcatggcaggcctgtaattggatgctggtctccctccacacttgactcctacagtctgatttctacacagcacccaaagtgatctcttaaaaatacacatgtgatcttgtcacttcccagcaccaaactctacagtgaatttccatcttagaacaaaattcagactccttaccatggccaccaagaccctacacaatctggcctcccaatttccttttccaaggtcaccttttaccactatccatctcactcacactgctccagcactctctatgcttttatttttctttcttcctctttctttctttctttctttttctttttctttctttctttccttccttctctctctctctctttcttttcttttctctttcttttttttttttttgagatgcagtcttgctctgtcacccaggtgtgtgatcttggctcactgtcaacccagagcagtgggggtgatcttggctcactgcagcctccgccttccaggttcaagcaattctgcctcagcctcctgagtagcagggattagcgccatcagtcccagctaatttttgtatttttagtagagatttcatcatgttgtccaggctggtctcgaactcctgacttcaagtgatctgcccatctcagcctcctaaagtgctgagattacaggcaggagccaccacacctggctcagtatttgttttatttttgttgtgtttatttatttagagacaaggtcttgctctgttgctcaggctggagtgctgtggcaggaacacagctcactgcagcctccactacctcaattcaggcgatcctcccacctcagctgagactacaggtgtgcatcaccatgcctggttaattttttcgttttaccatgttggccaggtttgtctcgaactcttgggctctgctgtcctcctaccttagcctcccaaagtgctaggattgtaggcgtgagccactgtgcccagctggtgttcagtatttgaatccatatttcctgtagccgcaaccaaagttccactgttaggtctcactttgactttaataattgtgttcaggctgggcacactggctcaagcctgtaatctcagcagtttgggaggccgaggtgggtggatcacatgaggtcaggtgtttgagaccagcctgtccaacatggcgaaaccctgtctctactaaaaatacaaaacattctccgatcgtagtggcgggcgcctgtaatcccagctacttgggaggctgaaggaggagaattgcttgaacctgggaggcagaggttgcagtgagcggagatcacgtcattgcactccagcctgggctacagagcgagactctgtctcaataagtaaataaataaataaataaataaataaataaataaataattgtgttcggagtcagcatcattcttcctgaagttcaccactcctttgccaagaacacttcctgaaacactgacaagcaggaccttgaataatggggtatggttggtaacaactcactcattcaacaaacattgagcacctattttgtgcttgcctctaaatgaagagctggttgtattatttatttttttaggtgacagggctttccctatgttgcccaggttcgtctcaaactcctgggctcaaaagatcctcatcttctcaagtggttgaatatacacgctccagcgaccatgcctggctgaatgaagagctttgagattttgaagaaacaggaaccatgaaatttgctttgcaactgtttgcaacctttaaggaagactgaaaaggcattcctgaagcatgtgagaagcagtctgtgtgacctgatgactcagaactgcttggaatttagattaggacagatatgagcttaggcttcactctgccacatatttaacttctctaagtcttagttttcttttctttttttttttttttgagatggagtctcgctctgtcacccaggctggagtgcagtggcacgatcttggctcactgcaagctccgcctcccgggttcacgccatcctcctgcctcagccacccgagtagcggggactacagtcgcacaccgccacgcctggctaaatttttgtatttttagtagagacgggtttcaccgtgttagccaggatggtctcgatctcctaaccttgtgatccgcccgcttcggcctcccaaagtgttgggattacaggtgtgagccatcgcgtctggcctctaagtcttaattttcttatctgtaatgtagagttgtcaggctagtgcatgtaataagcactcatgaaagactgactattatcttgcgaaaaattggaagagatcatatgaggtacaaggaccttccatctgcactgggctgtacattgaatgttgtggttactgttgaagcattggtaaatcacatgaatccaatggtaaaaccacaccctaaggtcagactcagtggctcacgcctgtaattccagcactttgggaaaccaaggcaagaggattgcttgagctcaggagttcgataccagtctaggcaacctgtttctataaaaagttaaaaaattagcttggtgtggtggtgtgcacttctggtcccagctactcaggaggctaaggtgggaggatcccttgagcccaggtggtcgaggctgcagtgagccaggatcacaccattgcattccagcctggatgacagtgtgaggccctgtcttaaaaaagacaaaaacaaaccaaaaaaacccacaccctagtgggtaaggggcagcagaggtcccacccaagagtgaaatcatttttggtgtcagtaatcagggagagtaatataccctcaggccagaaactagaggtgagtgatggctcacgcctataatcccagcaccttgggaggctgaggcaggtggattgcttgacctcaggaattcgagaccagcctgggcaacataggaagaccccatctctaaaaataaatttcaaaaattagttgggcatggtggcatgtacctgtagtcccagctactatggaggctgaggtgggaggatccaattgagcctgagaggtcaaagctgcagtgaattgtgattgtgccaagaccctgtctctaaaataaaataaaattacaattaaaaactagagctgaaaggacaggttctaggttaactggtagtagttgttcattcatctgtataaaaagtacttttttgagcacctactctgtgctgtgcatggaatgaacaaatgtctttatttgacttgaacacagaccatagaagtaactaacagtggaactgggagtggcactctccatgggacctaaagacctaggagcctgtgatatgatacctgtcagtgtgaaagggctggagtttgctatctgagccagacctacactccaagacaggtcttgctgggatgggatcaaaattgctgctgggtcagccgaactatttttgtacttctgcttttcacttatatttatgtcttccctaggtatatagctgtctttttttgtttgcttgtttttctgagtcagagtcttgctctgtcactcaggctggagtgcagtggcgcgtctcggctcactgcaacatccacctcgggttcaaacgattctcctgcctcagattcccgagtagctaggattacaggtgcccaccaccatgcccggctaattttttgtatttttaatagagatggggtttagtagagacagggttcactgtgttatccaggatggtctccatctcctgacctcgtgatctgcccgcctcagcttcccaaagtgctgggattacaggcatgagccactgcgcccggccactggagaccccttttctaccaaaaaaaataaaaataaataaataaatatatatatatatttgtaaagacggagttctctatgttgcccaggctggtcttgaactcctggcctcaagggatcctcttgtctcagcttcttaaaatgatggggttacaggcatgagccaccgtaccaggccttagcaaactctttttcaagtgctatacaaaggggacagaggaacgtgattgtggccacctagtatgcccctattggccactgcagtgaggcctaggtgtttgaagagaggcacctagggtagtggctctcaggcacaccctaggggcattttggaaatttgtggggcatctttaatagagacaatgattaggaggcactttgagaatttagtggatggagcccaggaaaggtagacattctgcaacatgtagtacattcatacacaaggaagaattcactcatttcacctgacttacaaatataaaatcaaatataaatcagtaggactttattataaaatattgcagaaaagtttcacaagaattttttgtagaaaaagcccaatcagggccgggcatggtggctcatgcctgtaatctcaggactttgggaggccgaggcgggtgaatcacctgaggtcaggagtttgggacaagcctggccaacatggtaaaaccccgtcttgactaaaaatacaaaaatcagccaggcatggtggtgtgcgtctgtaatcccaggtactcgggaggctgaggcaggagaatcgcttgaacccaggaggcggggtttgcagtgagccaagatcaagccactgtgctccagcctgggtgaaagagcaagactccgtcgaaagaaagaaaggaagggaggaagggaggaagggagggagggagggagggagggaaagaaagaaaaaagagaagagaggggaggggagggaagaggagaaaagaaggaaggaaggcaggaaggaaggaatccagtcgagatcgttaaatttgttgtaattttgtctttggcacaataaacattagtccttattaaaactaactttacttagaaaataaaatagaaaatcctcaaggacaaatcacattgtacaggaaatatgaaatgtgaaataatatccaccttggaaattttttttttttgaaacagagtgttactctgtctcccaggctggagtgcagtggcacaatcttgggtctctgcaacctctgactcctgggttcaagtgattctcgtacctcagcttcccaagtagctgggattacaggcgtgcaccaccacacccagctaatttttgtattttcatttcagatgggattttgccatgttggccatgaacacctgtcctcaagctatccactgcctcagcctcccaaagtgctgggattataggcatgagctaccgtgcccagccaccctggaaaaattttacaaaatgaagtataaaaagaagaaaagaggggcgggcatggtgccttgtgcgtgtaatcctagaactctgcaaagccgaggcaggagatcctttgggtttaggagtttgagaccaacctgcacaacatagcaagaccctatttctacaaaaaatacagacactaggctgggcgtggtggctcacgtgtaatcccagcactttgggaagctgaggccagcagatcacgaggtcaggagatggagaccatcctggctaacatagtgaaaccctgtctctactaaaaatacaaaaaattagccgggtgtggtggcaggcgcctgtagtcccagctactcaggaggctgaggcaggagaatggcgtgaatccgggaggcggagcttgcagtgagccgagatcgtgccactgcactccagcctgggagacagagcaagactccgtctcaaaaaaaaaaaaattttgctcagtacctggccaaaaaagaagcagctcactccctgtacacagaggggtaagagaaaggagatggttgaacttctaaactcgctaaagcaggagaggcaaatgtggaatgtgctcaggaaatatctgtgagatgaatgaatttgagggaagtaaggtactagataattacctgccctacccagaacaaatcctgtgcaacgtttccttgaagagcaggaagtcaggccgggtgctgtgctcacgcctgtaatcccagccctttgggaggccaaagtgtgcgaatcacctgaggtcaggagattgagaccagtctggctaacatggtgaaaccccatctctactaaaatacaaaaattagccgggcgtggtggtgcgtgcctgtagtcccaactacttgggaggctgaggcaggagaattgcttgaacctgggaggcagaggttgcggtgagctgagatcggccactgcactccagactgggtgacagagtgagacaacatctcaaaaaaacaaaaaaaaaagagaaaagcaggaagtctggaaggggtggctactgacatagtgaagcaactagttcaattctacaacttgacaactacccctgtgccaggctgtctacaaggatatttagaatgtgtaagacattccttcaaggaactccaggaacagaggcctgacatgttgcaatgtttagtgtcaagcagtgtactagagacacattatcacactcaaacctcacaacagttctatgaggtaggagttatcactccccttttatagatgaaatagaggcttagagtgattgatttactgaaggtcaaacagccagtaaatggtgtagcaaggattccaaccttgccgtctcactaaaactgtacaaaaaaagatacaaacaacagacaaatagttcccaggcgcctcccaagttgccaggcactgcatttacctcactgacccctttgaggttgtggcattgcctccattttctaggtgaggaaataggctgagagctggggttagtctggtcatgactgtgtgtgccactcccaccaaatctcatttgatgtggttcatgaggcaaatggcatggacaacttccttcacatgtccactaagcatatggccttttacaacactttctggtttctgaactactttaaaacctcactgtcctgtgaggaaggaagaacagttattacaatctgcatctggaagccaattgccctttagagatatggctgcaattgcctcactgcctgtgtcatgtgactctccgaggcccttaatgagtaaatgaggggtgctgcaggggagccaagctgaccactcccctccctccagtcctgccaccccactgccagtgtcccaccctccttgcgccctacacttcactggctaataacccccctcactttttcctgtgttgaaggcatcctggataattccccacccacgaatggtccctcctcatctcagagagctctccatgcacacctgttactgtttctgtttttacctgtaaatatctgtgtctgacttccatgcttcatgcacctctatagggcaaagactgtgtcttaaacatcacggtagcctcagcatgttgtgcaatgaaggtttttttgtttttgttctttgttttttttttggtattagctttatttgtatcattttgaaatttttatcaaaaaagcagcgtgcctgctgtggttcccatcctctgggatttaggaatctttacccgattctccatccaagtctgtctttcgtattctaggctcttcctaaagttgtcattcacatataccctccagaattttatagggtgtataatctgtaacaactcggaggaagccaattgccctttagaaatatggctgcaattgcctcacttcctgtgtcatgtgactctcctagtcatcacatgacccatccacattgggaagccagaattacttgcaggagtaacctagtgcctatagctatggcaggtatcctgcatccttgttttttgtttagtggatcctctatccttcagagactctggaacccctgtgctcttctcctcatctagtgaccctgaggtgatggagttttcaagtccttccagagaggtaagagagagagctcccaatcagcattgtcacagtgcttctggaatcctggcactggaatttaatgaatgacagactctctttgaatccagggccatcatggctctttgagcaaggcacagatggagggaggggtcgaagttgaaatgggtgggaagagtggtggggagcatcctgatttggggtgggcagagagttgtcatcagaagggttgcagggagagctgcacccaggtgtctgtgggccttgtcctaatgaatgtgggagaccaggccatgggcacccaaaggcagctaagccctgcccgggagagtagttgaggggtggagagggacttgcttttcagtcattcctcattctgtcctcaggaatgtcccaagccttcgggtagggtaagcatcatggctggcagcctcacaggattgcttctacttcaggcatgtcgtgggcagtcagatgagtgagtcaaggcagtggggaggtagcacagagcctcccttctgcctcatagtcctttggtagccttccagtaagctggtggtagacttttagtaggtgctcaataaatccttttgagtgactgagaccaactttggggtgaggatttttgaaaccgtcttcagtctctccaaacagctgtgtccgttctccacatccttgtcagacctcacctctgcttgtgctccctccctcccaggtggtgcccctgcatccctaaaagcttcagtacagctcggtggtctgtgtctgcaatgccacatactgtgactcttgaccccccgacctttcctgccctaggtgccttcagccgctacaagagcagaagcagtgggcattggatggagctgagtacaggaccatacaggctaattgcaccggcacaggtaaccattacacccttcaccccccgggccaggctgggtcctcctagaggtaaacggtgtcagtgatcaccatggagtttctccctgggcactgataaccctgtggatgtcctcaggcctgctactgatcctgcagccagaagttccagaaagtgaagggatttggaggggccgtgacagatgcaggtgccctcaacatccttgccctgtcaccccctgcccagaatttgctacttaaatggtacttctctgaagaagatgaggaggaaggggacaggatgacatagagccactgacacttttctttgccaattcttgtggaccctgacttctgcccatccctgacatttggttcctgtcttaatgccagtgaaataagatttcgccgcctatcatctgctaactgctacggactcaggctcagaaaggcctgcgcttcacccaggtgccagcctccacaggttccaacccaggagcccaagttccttttggccctgactcagacactattaggactggcaagtgataagcagagtcccatactctcctattgactcggactaccatatcttgatcatccttttctgtaggaatcggatataacatcatctgggtacccatggccagctgtgacttctccatccgcacctacacctatgcagacacccctgatgatttccagttgcacaacttcagcctcccagaggaagataccaagctcaaggtaggcattctagctttttcaggccctgagggccctgatgtctgggggttgagaaactgtagggtaggtctgcttgtacagacattttgtcccctgctgttttgtcctgggggtgggagggtgggggctaatggctgaaccggatgcactggttgggctagtatgtgttccaactctgggtgcttctctcttcactacctttgtctctagatacccctgattcaccgagccctgcagttggcccagcgtcccgtttcactccttgccagcccctggacatcacccacttggctcaagaccaagggagcggggaatgggaaggggccactcaagggacagcccagagacatctaccaccagacctgggccagatacattgtgaagtaagggatcagcaaggatgtgggatcaggactggcctcccctttggccatgctgatctgtgtcccaaccctcaacctggttccacttccagatctgcctgtcctcagctcacctttctaccttctgggcctttcaaacttggatctgtcagtcttgcccactccatcaggcttcctgttctctcggtctggcccactttcttggctggatcactcatgacctttctcttgccaggttcctggatgcctatgctgagcacaagttacagttctgggcagtgacagctgaaaatgagccttctgctgggctgttgagtggataccccttccagtgcctgggcttcacccctgaacatcagcgagacttcattgcccgtgacctaggtcctacccttgccaacggtactcaccacaatgtccgcctactcatgctggatgaccaacgcttgctgctgccccactgggcaaaggtggtaaggcctggacctccatggtgctccagtgaccttcaaatccagcatccaaatgattggctcccaaacttagagggatttttctacccaactatggatcctagagcaccattccccgggacctccagggtgccatggatcccacagttgggacttgaaacctctctaggctgggggtggtagctcatggctataattccagcactttgggaacccaaggtgggtggatcacttgaacctaaggagttcaagatgagcctgggaaacatggtgaaaccctaactctacaaaaaaaaaaatagaaaagttagccgggtgtggtggtggcacgcctatagtcccaagtattctggaggctaaggcgggaggtttagttgagcctagaatttcaggctgcagtgagctatgattgtgccactgtactccagcctgtgtgacagagggagaccctgtctcaaaaacaaaaacaaaaaatccctcccaaaacctctgtagttgcattcttcccaccacctaattcaggattcctacaagaggaactagaagttccagaagcctgtgggcagggtccagggtgacttgttcttcctttgcaggtactgacagacccagaagcagctaagtatgttcatggtattgctgtacattggtacctggactttctggctccagccaaagccaccctaagggagacacaccacctgttccccaacaccatgctctttgcctcagaggcctgtgtgggttccaagttctgggagcagagtgtgcggctaggctcctgggatcgagggatgcagtacagccacagcatcatcacagtaagccaccccagtctcccttcctgcaaaggaggacctcagacccattagtagtctcaccaaagactgatagaagcccttcctgtccagctttccccaggtagcctgcccttttgggcaactctggggaaccatgattccctgtcttgcctttccttcacaggtctgcacacctcattgccccttttgcaactactgaggcacttgcagctgcctcagacttctcagctccccttgagatgcctggatcttcacacccccaactccttagctactaaggaatgtgccctcacagggctgacctacccacagctgcctctcccacacgtgacccttacctacactctctggggacccccagtgttgcgcctttgtctctttgcctttgtccttaccctagaacctcctgtaccatgtggtcggctggaccgactggaacccatcattgtagacatcaccaagcacacgttttacaaacagcccatgttctaccaccttggccacttcaggtgagtggagggcggggcacccccattccataccaggcctatcatctcctacatcggatggcttacatcactctacaccacgagggagcaggaaggtgttcagggtggaacctcggaagaggcacacccatccccttttgcaccatggaggcaggaagtgactaggtagcaacagaaaaccccaatgcctgaggctggactgcgatgcagaaaagcagggtcagtgcccagcagcatggctccaggcctagagagccagggcagagcctttgcaggagttatggggtgggtccgtgggtgggcgacttcttagatgagggtttcatgggaggtaccccgagggactctgaccatctgttcccacattcagcaagttcattcctgagggctcccagagagtggggctggttgccagtcagaagaacgacccggacgcagtggcactgatgcatcccgatggctctcctgttgtggtcgtcctaaaccggtgagggcaatggtgaggtctgggaagtgggctgaagacagcgttgggggccttggcaggatcacactctcagcttctcctccctgctccctagctcctctaaggatgtgcctcttaccatcaaggatcctgctgtgggcttcctggagacaatctcacctggctactccattcacacctacctgtggcgtcgccagtgatggagcagatactcaaggaggcactgggctcagcctgggcattaaagggacagagtcagctcacacgctgtctgtgactaaagagggcacaacagggccagcgtgagcttacagcgacgtaagcccaggggcaatggtttgggtgactcactttcccctctaggtggtgccaggggctggaggcccctagaaaaagatcagtaagccccagtgtccccccagcccccatgcttatgtgaacatgcgctgtgtgctgcttgctttggaaactgggcctgggtccaggcctagggtgagctcactgtccgtacaaacacaagatcagggctgagggtaaggaaaagaagagactaggaaagctgggcccaaaactggagactgtttgtctttcctggagatgcagaactgggcccgtggagcagcagtgtcagcatcagggcggaagccttaaagcagcagcgggtgtgcccaggcacccagatgattcctatggcaccagccaggaaaaatggcagctcttaaaggagaaaatgtttgagcccagtcagtgtgagtggctttattctgggtggcagcaccccgtgtccggctgtaccaacaacgaggaggcacgggggcctctggaatgcatgagagtagaaaaaccagtcttgggagcgtgaggacaaatcattcctcttcatcctcctcagccatgcccagggtccgggtgcctggggcccgagcaggcgttgcccgctggatggagacaatgccgctgagcaaggcgtagcccaccatggctgccagtcctgccagcacagataggatctggttccggcgccggtatggctcctcctcagtctctgggcctgctggtgtctggcgttgcggtggtacctcagctgagggtcaaggaaggaaggtgtgttaggagaactagttcttggatccctgcccactctccccagggctgcccctcccatctgccccttacctccatcccaggggaagtagagactgagaatgtgggtacaataggcacagaggttgtgcagcccacgcaggtggacctgcagcttcccactgggcagctttgcctgcagcagcagggccaagtagctgaagacgaaggcgtccaaggaggcagggctggagcagagagagaagggtgggatggaggagaaccactggggtagaaggggtaaagatggagctggaggaagagtcagccttgggaggtgggctctgggcagcaggcggccaccagggaaggacaggacacacagttctagacctggtatggggagagatccccaggtggcgccagctggccctgaatagggctctatcccagggctgcataaagggcacattcagtgccccacagctcttcaggcccctcctgtgcctggctgccctcccaccctacccttttgtacctctgagaaggctctggcccccacacagtcacactgtcactagggccagtttctatcccagggacctcctatccagagcctgagccagccccagccccagccccagctccagctgctccatctgaacctgtatcttcttccaagccacccattaccctcttggagtcagactcacgcatctccaaagaagaacttttgagagcccaggcgctgagagagcagggtcagacactcccgagcctctcggtacagctgtaggggcgacacaggtaggcttgcagctgtgggaacagtgccacctccccacctaagcactcccattcctggccagcatccttggggctcatctcatacaatagcccccggtctcagagctacctccttctccagctcttcctcgtcctcaggcctgtgctccccagtcagcagctgtagccgttccatgtactgccgctgcatgcggccaggcaggaagaagttgaggggaaagggcatagcctctgcataccacttccgggtcacttccacgtagttcttggtgtctatccaaaaagtatgtacctggattgggtgggcaggaagaaacaggtaggtctgagccagtgcacctgtctgattcaaggtgggcttctgacccccatgctttcctgagcctgtgtgtgggtctgtgtgttcccgaaccctccccggctggccatggatgctgggaggtctgggcacactcaccagcaccgggagcaacttctcctccaggagagacatgaaggccagggtgtctgccccttgccgagctgacagatcataatcagcattgtacttctgtggaggaaatatccatggcgtggacactagggagctgcaagggcacttcaccagggaggaaggagtcctgtctggtacccccctcactggcctctgagtgcagtggaggtacagcaaggaacttttcctgccaaggcccccttgcctgggcccagccagtagcctgttgctgttggcgaaaagcctgggccttggagcctcctggccgtgaaggtccagcgcccaatgcagggaaggaaggaaggctccgccgcaaactaggagcagctcccagaatttccatggaaagctggaacaacgcccgctgacggcaactttctaacagtaacttccccgacccagacaccacaaagctagcacaacggagctcagatgcaggctaggactcggtccatgcctcaggaaccagagaaagccatcctcacactccctggatccagggaacccacgcccagggccccccagcttgttccctcagtgcccagctcttggctatttctttcacttcattccatcgctcagacaccattaccacatacacattccacccatacccccaggtctcagcctgccctaccttcccaggctccagtccctgttcctcagcatccccctccacatcctgagtaagctttgtccccagataacctcttcagcatgatccttaaatctccctaagcctcagtttctcccctgtggaatgggggtaagaatctctttctctgaatgcccctgtgttaggaaataatttagaatactttggaaactggaaaagctctgttcacacctaagcaatcagggcagtggcctcggctctgccaggaactttggcttttatctggatcctctctttccaggcctctcaattaattccccaggtcctcaacctttgggaagttagaaatgaggaagagtgtcctacttctgacactgttccctcttggaacctgaccgtcaatgctagaagaacccttggaaaacatgctggcccagccctctagttttacaaataagggagtgcacagccctgagaggttacatggcctgcccgagatcacatagtcaatggcagagtaaagagcatagcctaggcctccccactcctctagtaatgctctttcatcttctccaacctggctctaagccttgtccatcctgagccccatatctagcccaacctagtccctgaaaacaggaagtggcccttagaaatctctctccagtcccaccatcagaggccaactgctgtcttccactctccttcagcctgtgctcctctccctccctgcctcacagtgccctaagtttcatctcttgccgactgctttaatacatcacagtgacattgtgtgtgtctctgccacaagactgttgctccttgatgctctgggtcacctgcatctagcatggcatatatctggtgctcaataaatgtgtattgtatagaattgactgaacttctctcactggcagccccctctatccaagtcacctacctcttttcgaaggtgggtgatgatcttgtgtggaactgagatgacctctccatgactggtccgaagggcaggcagagttcctgatattgagagggaagtataccaaccagacccttagctgcctagtcatacatagttgcaacacattcctgcctatttcttgcttctccccttgtacacacccttccttacccccaagggatactgggtacctgaagggctctgccaggggttgctgatcttgtgtaccttcagtggagcaccagtaaatctggcataggtctgcagggaaggaagcagaagtcagagaggcagagccatgtcccccacagtggtatcaagaagagaaataacatttattgaataccttatgtgccattccctatacttagtatcttagtctcgaaaaaaaagggggagtcactaccatttctattttacaaatggacaacacagggctcagagagattccggacatgtctgtgattacaggacagccaggaaaatcctttcctctatctcctctcttgccatctacctggtgaacatctatcctcagaagcttttcctaaccagtatccctcttcttggaagcactgataatgcccttctctttggcagtatctgtggtctgttcctactttaacttatatgtgaatattttattatatttatttgcttacctatctgcctttctgtaaactcgaagggaggaaccaaattttattcatctttgcctggcaatgtttaatatttggaagaaatctaatagatcctctttaaagcaaggagtcaatgaataaatgaagcaaaggaagtctgattgctaagctctttatacaaagcctggctgtgagtcgtttggtctaacaaacaatagcctcagtaaatgctgttaagtgaggaggaagaggagaagggggctgaggagaaggcaggaattccaagctagagtaggtccctgagacagtccagcctagtaaacctccgaatggagaaaaaaaatgcccaaagagaaaggatctccgcaaggtcacacagccagtgaatggatgagcaaggactagaacccatcacctgaactcccaaccaggcgtcttttcattgctgcattaagcctagaaaactacagcatagggcactgaggccatatcggccacgtacgctctttgactgcctcagtttcccccactgcgcccgtgctgagtagccctggcaaggtttggatgcttggctagttcggccccctccccagtcatcagggcacagcagagggcgccggcgccacccctcaccagcacggccaggctgtccaggtccactgacggcagcccccagccccctgaccagcagaacagctccatgggcgccgccatcttgcccaccctctgtcccggaaacacttccttgtgtgcttctgccctcccctgcctgggcccgccccccgccaccgcccctccgatcgttgcggtcagggggcctggggagatccccggggaggcgaggcttcttctggcccgactggcagctgaactgcgggggactgggccgcgggcctcgggggagggcggccgccggcccatccagaggtggcccacgtagcgggacagcgctgtcggcccggcgcgcctcggagtgtcacggcgcctcgtccaagtggagccccgaacccctgaaggcgcggcaggctctggagagcggggtcttgtgcgcctgggccaggtctgggggctcttgccaaactgcacgtggcctgtactgctccagggccccttggggctcgtccccgagcggggactgcgggggggtcccccgagcagcatgttttccacagcgcgttatgtttggagcgggccctgcgccgcctgtcgccatggaaacaaaacaggggcggtggcggcggccggagcggaggccgggctggggcttgggtgggggaggggaagagaggctcgcaggctgtcgcttaggtgacgggaactcaggcgcccctctgcttcatccgggtcacggcccgtccgctagtacccacagtgttccacagtctggtccttggctcctcgcctgtacccctggtcttctgcgcctgtccctggtgtccctttcctcttttttggtttcttcactctgacctcactgaccactgctttagattctcccttcagttcccgtcagacgcttccagactcccaagctttcctacgaatgagggaaaatggagaaacaggcacttgtcaggggacccccaccctaataaagagcacttgctccgccagaacagcaaaattcatgccatgtgggcatccctgggcactatagcaagctagttgcggccactcccttggcatcctttcctgccagctgtggaataatgcccactgtctagcactgcccctgccaggggttcttgccttccacaatcgtggcttccagaaaacagtggcattcggtagcgctgtgtgccgagacccccaacaatgatgactgcggagagggaggcacctggggggaggatcattagggagaggtagaaagcagggaggcctccaggattctttcccagtgcccctggttcccagagctgatgatgcctccagggtgattggcagctctttgtttcagccccccctcacccgcctgctggccccccctccaattctgtccctccgccccccggctcctgctctctccgcctagccttttcccctcccagctgcctgcctgccaggggtagtgagccggctgagaggcatggagacgcaggaacttcggggggccctggctcttctcctcctttgctttttcacatctgccagtcaggatctgcagggtaagcctgtctccatcctcttagaccgctctctgcttcttccccatttgccctcagcccaagtagcagagaacatgtgggcaaggggagaggggaagagtccagaaattgagccagaggaaaacttaagactgcctagagttggtgaaattatggcctggtggagaggagtgggcaccggagagtagtgggggagctggaacaggacagggtcaggcatgaggccagggcagaggactcaggaactggatgctcaggctgcctggctggggtggttcctgagcatctgtaggcaccctagggtctgggagagcagcctgaaggtgggcgtactgtaggtccctgggcttcgtccccctgggctcctggctgcccaaggacagggcgggggtggggaccaagaagcctgggctctcccggaggtctggtggtgggatgggccgatggatgtgggagaggtagctggagcagatgacacaggcatagattctttactggctggagggaaaaccacagattggccaggacacaggaggcagaggagctgggtcctacattcccgtgggagatagcccagatggtgggagggttagagtcctcagtgggcagctgttcttatccagagcgagtgtgctgcgcccctaggatgggaggaggggaactagggtgtggaacgagccaaacccaggagtggaaagagaagctgccttccatttctacgttgtggacaccaggtgccactcctgtgggggatcagcacagcatctcctttgcgccacctggtgggggcatctcaaatttgtggggtgctgtttctgtgtttccaagtgagtctcaaacctgcaggttcctggaaggtagtaataggcaataatggggaaaggaaggcacagtgcctctgtcctctgagagcaacaagggttgaggtttttttttgttttcgttttgtctttttgagatggagtttcactcttgttgcccaggctggagtgcaatggcgcgatctcggctcactgcaacctccacctctcaggttcaagcgagtctcctgcctcagcctcctgagtagctgggattacaggtgcccgccaccacgcccggctaggtggtttttttttcttttttgttgttgtttttgtatttttagtagacacggggtttcaccgtgttggccaggctggtctcgaactcctgaccttaggcgatccacctgcctcaacctcccaaggtgttgggattacaggtgcgagccaccatgcccagccaagggttgaattttgaggtgactaacgctgcctggtggtgggggtagggggtgatgtgggctcggggagggcataccttagcatttgatcccattctctaaccttgataacccctgcctgaccagtaattgacctgctgactgtgggcgagtctcggcagatggtagctgtggcagagaagatccggacagccttgctcactgctggggacatctacctcttatccaccttccgcctgccccccaagcagggtggtgtcctctttggcctctattctcgccaagacaacactcgatggctggaggcctctgttgtaggcaagatcaacaaaggtgactggtgggcatctcctttcttgcaatggtgacctccttaagcactctccctcatccctacttcccaagtgcttcctcattctccttggcctccattagggaccaaggtcccatcaggctgtgcccagacatcaggggcacctggtatggggtgcttataaggtgctttaggagcccatgtaccaaacaatagggtgaggcttgagtcctgatatttatagggatgggaggttgtacttggggatgcctggaaggagggtgaggcatgtctctgtgcctcagcggtgatacagaaaggtctttcagatccctggaacagtcagtggccacaaaaccagctgtcaccctaggagaggatacagtcatctgataccaatgaagactaagaaagtatttgtctctaaaccaattatttttttaaatggagtcttgctttgtcacctaggctggagtgcagtggtacaatctcagctcactgcaacctctgcctcctgggttcaagcaattctcctatctcagcctcctgagtagctgggactacaggtgcccaccaccatgcctggctaacttttgtatttttagtagaaacagggttttgccatgttgaccaggctgttctcgaacttctgacctcaagtgatctgcccaccttggccttctaaagtgctgggattacaggtgtgagccaccgtgcctggcctctaaagcaatttcaaaaacatttattgtgtacctattaaatacaaggtgttgagagccacatagtagaattagggataggggccctagagatgtggtatctagcagagttgatccaaggctcagctgggaggcagggggtgggggatagcgcccatactgatctcccctcctgggcagtactggtgcgataccagcgggaggatggcaaagtccacgccgtgaacctacagcaagcgggcctggctgatgggcgcacacacacagttctcctgcgactccgaggtccctccagacccagccctgccctacatctctacgtggactgcaaactgggtgaccaacatgcaggccttccagcactggcccccattcctccagcggaggtcgatgggctggagattaggactggacagaaggcgtatttgaggatgcaggtgagccgggaggagcctctgagttctgtggaaatagagtttgcaccagctggggaaggggttggtagaccttcccaccttactctgctgctatccccccagggctttgtggaatctatgaaaattattctgggtgggtccatggcccgggtaggagccctgagtgagtgtccattccaaggggacgagtccatccacagtgcaggtaacacagagacttgtttgctgacattggaccacggatcctgtggcctttggtgactcctgtcttcttgatctccctctcccttaaaacccattcctttggctcacctgttcctagggtttctaaccctgttattccaaatctttcacctgactccacaatctccaatacacccatccgagaaaaaaagtgatctaagagaagaattggttaattgcttggccttggctgaccaagagatactggtctcgagtattttttttttttttggtgatggagtcttgtcctgttgcccaggccggagtgcagtggtgcaatctgggtcactgcagtctccactgagttcaagtgattctcctgcctcagcctcccaagcagctgggattacaggcggccctccaccatgcctagctaattttgcatttttagtagagatgggatttcaccacgttggccaggctggtctcaaacacctaatctcaagtgatgcacccacctcggcctctcaaagtgctgggattacaggcgtaagccaccgcgcccggcctggtctcgagtcttttatagttctcactggcagctgtcaccagcaatttctctgagtgttgcccatctgcctggtctctctgacagggatgttcagaagctctcacctaaataaaagacccacctttcccagatatttgagggagagctcttgaagaagggaatgggatggcgggtgtggtggctcacacctgtaatcccagcactttgggaggctgaggtgggctgatccctcaaggtccggagttcaagaccagcctggccaacactgtgaaacctcctctctactaaaaaatacaaaaaattagctgggcatggtggtgggcacctgtagtcccagctacttgggaggcggaggcaggagagttgcttgaacccaggaggtggaggttgtggtgagcagagatcacgccactgcattccagcctgggaaacagagcaagactccgactcaaaaaaaaaaaaaatggggatatactggggccctggccctgctttgggtccatcccttctgccactaccatgcctaggaaccaggaggatttgggttctaacttcctgtgaagcaactcccttagagggccttttgccccatagaaggagctggcactgcttgtctgccagctctgccctcccagcatccagcaccccatctttattctggggctccagccctgtccctgtcctcaccttccttcctccttctcaccaaccaggcctctcttcacttcacctcacccctctgactatgttttcttctcctctccagtgaccaatgcactgcactccattctaggtgagtaggccacactgaagcggaagcggggagcggggaggaggccccaggctctggcagctgcctgaaactaagtcctcttcagtcaggaatgtagtaggtttaaaggcaggggtgggcagccgtggcaggtactggcttattgcccatggagggcccaggactggtgctccagtactgaacccctcacaccctgggtcccgacaggggagcagaccaaggcgctggtcacccaactcaccctcttcaaccagatcctggtggagctgcgggatgatatacgagaccaggtttgggtgggctggcgaagggtggcactgattctggggtagggtggcagatgtcaagtgctgactcctccccatccttctccaggtgaaggaaatgtccctgatccgaaacaccattatggagtgtcaggtgtgcggtgagtgggagagcaggggaggctccacatgaccgtgccacgttcccaccattggctttggctttcccttctggtggcttaaatagtgaccaccgggtagctctgactgtgtccacccctcaggcttccatgagcagcgttcccactgcagccccaatccctgcttccgaggtgtggactgcatggaagtgtacgagtacccaggctaccgctgtgggccctgcccccctggcctgcagggcaacggcacccactgcagtgacatcaatgaggtgagggaggtcagagcccagaagggtacagaaaactggggtgaggatgtcaggaggcacccaagagggtgggataaatgctggtccggaggagaggaatctggagtttaggagaggtcagaggcaagagaaatgcaagatgggagagacagaaggcctggggcaaagactgaaggccatacagggaaggagctggggaaactgcaggggaggcttgagatggcgaccagtggcatggggagggagagagggaaccccgagggaagtggggtggggaccaggagcacaaggcagttgtgtggggagagctgcacaaaggggagacctggagcaatggttcctggatcacaggcagggacctgagtttcccagagggcggcctgacctctgccttctcatctggtccccagtgtgctcacgctgacccctgtttcccgggctccagctgcatcaacaccatgcccggcttccactgtgaggcctgtcctcgagggtacaagggcacacaggtgtctggtgtgggcattgactatgcccgggccagcaaacaggtcagactgggtagtgtgtgtggacaagggatcttggccttgtagaggccaggggcttctgggttggacatgggacccttgtgatgaatgggacatggatggctttgcatcggctttgggtctgggcttaatgttgatgttcacagataaggccataccagtgtcctctgctgtatctgaggagacccaccataggtctggttccacccaaagtctgccccttcaggtctgcaatgacatcgatgaatgcaacgatggcaacaatggtggctgtgacccaaactccatctgcaccaacactgtggtgagctgaatatcctgagtgtattctggggtggtgggaatggtaaaaccccaacccccgccccttcttaccttcaaatttcctgctgcctttcctcctccccagggcactacacagattaggtgttcacatggacttggtttggaatactggtttgcctcttgctagctctttagcaggttatttaacttttctgagcctcagcttcctcatctgaaaactgaggctgttatccaccctgaaaggttgtcatgataacctaaaggagatactgatatgcctggcataactgagtgcccagcccacactccgcaggtggagcagtgctggtcctgggtgcctggtgggctcaccctccttcctaagatgctgcctctccactcttagggctctttcaagtgtggtccctgccgcctgggtttcctgggcaaccagagccagggctgcctcccagcccggacctgccacagcccagcccacagcccctgccacatccatgctcactgtctctttgaacgcaatggtgcagtgtcctgccaggtgagctaggcttcaggcgtggaaggaaaagggagggtctggggaaaggagtagggctatgtttagggcctgggttgggggtcttcataggagagaaggtgggcctgggcccaggaactgtttggtggggagaataggacctgaagcagggaaaatatagggaggaggggagccagaccaaactgctagctcctaccctttgtgttgccctagtgtaacgtgggctgggctgggaatgggaacgtgtgtgggactgacacagacatcgatggctacccagaccaagcactgccctgcatggacaacaacaaacactgcaaacaggtgcagggagcaggcgggcaagggggcgtagtggggagcccaagctgggtcaggccagaactcatccatcctcttcccctgaactttaggacaactgccttttgacacccaactctgggcaggaagatgctgataatgatggtgtgggggaccagtgtgatgatgatgctgatggggatgggatcaagaatgttgaggtgactcccagactgccctgccccttgaagctcctctcccctcctcctgtcctctctgtgcctcacttacctcatctggcagctctctagtaagggccaaatactccaaatcagggaggcaaaaacctcgtgcccaggacaaggaggctgggtgggtgggactgtactgagcagtttgtccatcacaagggtgtgatcttagaaaaggatacagagacaaggtaggtgcaagatgacaagtgatttaggggagacctgacccttcccctcccaccctctgcccaggacaactgccggctgttccccaacaaagaccagcagaactcagatacagattcatttggtgatgcctgtgacaattgccccaacgttcccaacaatgaccagaaggacacagatggcaatggggaaggagatgcctgtgacaacgacgtggatggggatggtgcaggcctggggctgaaggggtggctgggggacctgtgagaatttggatcaggtggggatgaagcagggaagctaggaagtctctgtgaaatagggaggcaggcttgtggacgttggcctgggtgaggagagattacctgcagcagatgtcaataggaatgtgaggtagggcgtagtgttaggcagagtgtggactagagggtgagacaagaaacaggcagatttcctggccagttgtcctctgggtggggagacaaagttcgggactttcaccaacctagaagagagaatatggcatgttctagtaacaaccttgtgctacccatgtcttctaggcatccccaatggattggacaattgccctaaagtccccaacccactacagacagacagggatgaggacggggtgggagatgcttgcgacagctgccctgaaatgagcaatcctacccaggtacagggagatggtaaggacaggggagggatgagggtactgatggatgaagccccagccctttggatggaaagtggtcagatcaccctcttcagagttatcaagaggagatggtgagaacaggtccctctctctcagacagatgcagacagcgacctggtgggggatgtctgtgatactaatgaagacaggtaaggtcttggtcaagagacgcaaggtctttcttttttttgtctttctgagacggcttgctctgtcacctaggctggagtacagtggcacgatcttggctcactgcaacctccgtctcccagggtcaagtgattctcatgcctcaacctccctgagtggctaggattacaggcatgtgctaccaagcccagctaattcttgtattttcagtagagacagggtttcaccatgttggccaggctggtctcgaactccttacctcaggtgatccgccagcctctgcctcccaaagtgctgtgattacaggtgtgagccactgtgccagcgaaatgcaaggtcttataggggatattttactttcctctagtatatccttttttttttttttttgagacggagtcttgctctgtcgcccaggctggagtacagtggcatgatctcggctcactgcaagctccacctcccgagttcacgccattcttctgcctcagcctcccaagtagctgggactacaggcgcctgccaccacgcccggctaattttttgtgtttttagtagagacggggtttcactgtgttaaccaggatggtctcgatctcctgatctcgtgatttgcctgcctcagcctcccaaagtgctgggattacaggcgtgagccaccgtgcccggcctcctttttttttttgagatggagtcttgctctgtcactcaagctggagtgcagtgatatcggctcactgcgacctccacctccagggttcaagcgattttcctgcctcagcctcccagtagctggattacaggcgcgtgctaccaagctcagctaatttttgtgtttttagtagagacagggtttcatcgtgttggccaggctggtctcgaactcctgacctcaggtgatctgcccgccttggcctcccaaagtactgggaatacaggcatgagccactgtgcccaggccatagtatattctaaattccttctatgatttagccttaattctctattgctattcagcaggaatttattcttacagtcatccctccattcctactgccagaccttcacctcacctggctgactgccaggggtctgattgtatggagagcaggctccagagactcccaggcagaagcgaagggaaggacaaggagtacctttaaatcctttatttggtacctgttcttctgattagcgatggggatgggcatcaggacaccaaggacaactgcccacagctgccaaatagctcccagctggactctgataacgatggacttggagatgagtgtgatggggatgatgacaatgatggcatcccagattatgtgcctcctggtcccgataactgccgcctggtacccaatcccaatcagaaggactcagatggtaagcctgcggacccagagcacgttagactggtgttgcctttgcccaggtggaggcagcaagccctgttgggaagtgaggaagggcaaggtgggaaagatgtcaggaatgcaggcccaacagatggtattgttgcctaatggcagtggccagggccttcctgagcacccagcctcactctgcccaggcaatggcgttggtgatgtgtgtgaggatgactttgacaatgatgctgtggtcgaccccctggatgtgtgtcctgaaagtgcagaggtaacgcttacggattttcgggcctatcagaccgtcgtcctggatcc

SEQ ID NO: 2364 - DNA, 480 bp, Homo Sapiens
  misc_feature (282)..(282): n is a, c, g, or t
tttttttttttttttttagaatttgaatattttaatttgggaatgacttagaggtccagattcctcccctccaccccccctcccccaataagttcccctcctctggccagagcttcatgagaagccacatcctggagcaccaggctccacagataagtccccagtgacgtctcaggccagactgctgtgtagggctggggtggggtttggcgggctgggggctagtgaatcccaaggagacgtgtctgggctccactgtcctctctggctggctgggcctangagccaggtagccccagagtcactgctggtccccctggctggccccgggtgccatctcagtccggtagatcttgaaggcatcataggcaaagatggaaaccaggatgatgccaaaaacaaaagcagcaatggcagctccgtcccgggaggtcacagctgcaaaggagaccaccaggaagatgatgatggcactgacac

SEQ ID NO: 2365 - DNA, 3314 bp, Homo Sapiens
gaattccggcaggcgcccatggcgggctgagtcctgcccatgccctggtggcctggaagcctgcatgggcgccgtgcaaagatcaacgttttccagaggagcttttgggctcatcactggcctggggagggcttgacacggggttcccacagcttgccccacaccaccttcacacccacacacagcaggtccccgcggggccggtgcaggctgtggctgcccgcgctgcgctgttgctctgtcccggctggctggctccgagtgtggggcgctctgggccggggccgctggggcgcgcacagtggggtgacaggcggcctggctgcagaaacgttgcaccggtgcctgaggtgggaggatgtgatgacgcggcccacgcagcgggaacccaggcctttaaaaagcccaggaaacagcctcagctcaagcggtggctccactggaggaaaacacaccccggtctcacattaaagaagccaaactgtcggcttcaaagagaaaaggcaacatcctgtcacaggccatgctctggcaaaaacccacagctccggagcaagccccagccccggcccggccataccagggcgtccgtgtgaaggagccagtgaaggaactgctgaggaggaagcgaggccacgccagcagtggggcagcacctgcacctacggcggtggtgctgccccatcagcccctggcgacctacaccacagtgggtccttcctgcctggacatggaaggttctgtgtctgcagtgacagaggaggctgccctgtgtgccggctggctctcccagcccaccccggccaccctgcagcccctggccccatggacaccttacaccgagtatgtgccccatgaagctgtcagctgcccctactcagctgacatgtatgtgcagcccgtgtgccccagctacacggtggtggggccctcctcagtgttggcctatgcctctccgccactcatcaccaatgtcacgacaagaagctccgccacgcccgcagtggggcccccgctggagggcccagagcaccaggcacccctcacctatttcccgtggcctcagcccctttccacactacccacctccaccctgcagtaccggcctccggccccagccctacctgggccccagtttgtccagctccccatctctatcccagagccagtccttcaggacatggaagaccccagaagagccgccagctcgttgaccatcgacaagctgcttttggaggaagaggatagcgacgcctatgcgcttaaccacactctctctgtggaaggcttttaggcgtggctcccacctgagtcctgttccctgaaactgggattttaaaatgagcctggaattgagccccaggttcatgcttgtttggagtagtcatttcatgactactctttctacgcacagctagaattgtagacctgtaaaccttccttcccttcttccttcccctccctccctcacttcctccctctcccccatccttccattcttcccctccctcccttcttcctttccaaccccttccttccttttcctccctcccttccttccctccttcccttctccctttccaaccccttccttccttttcctccctcccttccttccctccttcccttctccctttccttctttacctccctccctccctcgcttcttctctctttcttacttcttttttcaattctgttccattttgggaggtaattatagggattttagcaataacattttatgtcaaatgttgccaagtctgtggtccatgggctttcatttctgtcacatttcatttcttggaaaaggcctccttcctccagtgcctgctgaaccatcttagggtcactcacaccctctgtaattttaagatgtatgtggtggccggcgggaagaccagccccgacagcacctcctgagaaagtcagccaagggcctaccctgatgccagagtccttgagctgtcagttcccacagttgctcctttgtttgctcttctcagcctcggccagatttacagtccaggcagcaaaatctcaaggcctggggctcagagtagtaaggggtgggaagtgggtggcagggagaaaagaacatcagggtgggtggggacaggccagtgacgaagagagggacagaggagggatgggaacaggctgtgcatcttagttggagagaggggtgtgggaggaagcttgagtttgatgcagggaggaggaaggctgaggaatgacttggctccagattacttggttattaagaagaacaataaactaaaggaaagcattgcttgaagagatggttttgctgctctccttgaggatacgtgcaagggaagttgggctgttgtaaacagggtgaagggtgtgtttggtcggccatttctctctcacctctaggccctctgctggtgctgtggaggccaagaccccattaagcctaaaggtgatgggtcctcgcctaggcttagtgctaccatgtgggttttgtttctttccttccttccttccttccttccttccttccttccttccttccttccttccttccttccttccttctttccttccttccttccttccttccttcctctctctttctttcttttttttggttttttttgggacggagtctcactccattgcccaggctggagtacaatggtgcgatcttggctcactgcacctctgtctcccaagttcaagtgattctcctgcctgagcctcccgagtagctgggattacaggtgcatgccaccatgcctggctaatttttgtatttttagtagagacggggtttcaccatgttggccaggctggtctcgaactcctgaccttgtgatccgcgcgcctcagcctctcagagtgctgggatcacaggcgtgagccaccgcacccagccttttaccatgtgggtttctttagtgtcttaaaagcgtccataagccaccattctgtggaaccaaggccccctccacgcaaacaccctccctcctggggacctctggagcctcagccagaagtaccattaggtttaattttaatttgttttgctggagaaacatcaggtttgtaggagactgagttgttagcaggtgtgcttagctcttgatagtgaacgtgtaccttgggaactggctcacccacctgctaatagcaccatcgtcactattaagcagacatttcagttggtagaatccatgtagaagtcatggacttttctgggaaatgacttttctgggaaatgacagtttctttgacatattttctttgcccactttaaataaaaactctggagaaaaaaaaaaaaa

SEQ ID NO: 2366 - DNA, 2103 bp, Homo Sapiens
ccttcacaggactcttcattgctggttggcaatgatgtatcggccagatgtggtgagggctaggaaaagagtttgttgggaaccctgggttatcggcctcgtcatcttcatatccctgattgtcctggcagtgtgcattggactcactgttcattatgtgagatataatcaaaagaagacctacaattactatagcacattgtcatttacaactgacaaactatatgctgagtttggcagagaggcttctaacaattttacagaaatgagccagagacttgaatcaatggtgaaaaatgcattttataaatctccattaagggaagaatttgtcaagtctcaggttatcaagttcagtcaacagaagcatggagtgttggctcatatgctgttgatttgtagatttcactctactgaggatcctgaaactgtagataaaattgttcaacttgttttacatgaaaagctgcaagatgctgtaggaccccctaaagtagatcctcactcagttaaaattaaaaaaatcaacaagacagaaacagacagctatctaaaccattgctgcggaacacgaagaagtaaaactctaggtcagagtctcaggatcgttggtgggacagaagtagaagagggtgaatggccctggcaggctagcctgcagtgggatgggagtcatcgctgtggagcaaccttaattaatgccacatggcttgtgagtgctgctcactgttttacaacatataagaaccctgccagatggactgcttcctttggagtaacaataaaaccttcgaaaatgaaacggggtctccggagaataattgtccatgaaaaatacaaacacccatcacatgactatgatatttctcttgcagagctttctagccctgttccctacacaaatgcagtacatagagtttgtctccctgatgcatcctatgagtttcaaccaggtgatgtgatgtttgtgacaggatttggagcactgaaaaatgatggttacagtcaaaatcatcttcgacaagcacaggtgactctcatagacgctacaacttgcaatgaacctcaagcttacaatgacgccataactcctagaatgttatgtgctggctccttagaaggaaaaacagatgcatgccagggtgactctggaggaccactggttagttcagatgctagagatatctggtaccttgctggaatagtgagctggggagatgaatgtgcgaaacccaacaagcctggtgtttatactagagttacggccttgcgggactggattacttcaaaaactggtatctaagagacaaaagcctcatggaacagataacatttttttttgttttttgggtgtggaggccatttttagagatacagaattggagaagacttgcaaaacagctagatttgactgatctcaataaactgtttgcttgatgcatgtattttcttcccagctctgttccgcacgtaagcatcctgcttctgccagatcaactctgtcatctgtgagcaatagttgaaactttatgtacatagagaaatagataatacaatattacattacagcctgtattcatttgttctctagaagttttgtcagaattttgacttgttgacataaatttgtaatgcatatatacaatttgaagcactccttttcttcagttcctcagctcctctcatttcagcaaatatccattttcaaggtgcagaacaaggagtgaaagaaaatataagaagaaaaaaatcccctacattttattggcacagaaaagtattaggtgtttttcttagtggaatattagaaatgatcatattcattatgaaaggtcaagcaaagacagcagaataccaatcacttcatcatttaggaagtatgggaactaagttaaggaagtccagaaagaagccaagatatatccttattttcatttccaaacaactactatgataaatgtgaagaagattctgtttttttgtgacctataataattatacaaacttcatgcaatgtacttgttctaagcaaattaaagcaaatatttatttaacattgttactgaggatgtcaacatataacaataaaatataaatcaccca

SEQ ID NO: 2367 - DNA, 463 bp, Homo Sapiens
ttttttttttttttttttttttttttgatttctgatgcataattttattaaagccagagatggacattttttctagagaaacagatctctgaggttagaatggaagataatgaaacaagagatttcactttataatttacctttgtcaaactatcccagagcatgtcaattctattatgaaagtattactttgacatcatataaccaattattaatagaaaacacacatgccaaaaaaccttaaattttgtaatcttcaagtcaatcatcaacttttcttgaatttttgaagacccgaaaagaaaaataatttcaaacaacagcactcaaacatcatatgcatttgtaatgaggcacagcaatcaatttttggtttttttttttttagttagagtctccagtcacccggctggaatacagtggtgtgatctcagctcaccgcaacctcacctcccggttcaag

SEQ ID NO: 2368 - DNA, 433 bp, Homo Sapiens
ttttttttttgagatgcaacaatatctctaattttatttcttttaagcagtcttcattaataatgttctcttcgatgtgttgcaataatgttggaaacatatagtagctagggcggttacttttaagtcttgcttgccacaataataacgtcttttggaatcctagaatatgttcaagatactgaaatatatcattgtttttcccctgcattttcaggcttaattcattaagaatgccaaaaatatcacttaaatatgccaattttgttacccaaatgtcgtcttcaaaaatatttgccaaatgagattgcttttcaacgagaaaaatgtaaatctcgttcctgagttcatatactctgctcaatacttttccttgagaaagccaacgaacttctgtatgaaacaataagtgggtgtggttcactccaatctc

SEQ ID NO: 2369 - DNA, 43527 bp, Homo Sapiens
gatccgcctgtatcagactgccaaagtgttgggattacaggcgtgagccaccacacccagccttttgtatttttagtagagatggggtttcaccatgttggtcaggctggtcttaaactcctgacctcaggtgatccatccacctcggccacccaaagtgctgggagtacagatgttagccaccgtacccagtgagagtttcagtgctctatcggattccctgcctactccatgttgcatgtaatgttccacctcagggatgtttctctcctttctgtctccttcctcttctccttttccttttttctttctaatttttatttttttgagacagagccttgctctgttacccaggctagagtacagtggcacgatcccagctcactgcaacctctgcctcctgggttcaagagattctcctgactcagcctctcgagtagctgggattacaggcacccgccatcacacccagctagtttttgtatttttagtagagacgaggtttcaccatgttggccagactggtcttgaactcctgccctcaggtaatccacccgcctgtggccccccaaagtgctgggattacaggcgtgagtcaccactcccagccctgaatgatctttcctctttagtgtgttctcacaaccacctctcactgagctttcttgttttttgtttttgtttttgtttttgtttttgtttttgtttttggcagagtctggctttgttgcctatgctggagtgcagtggtgcaatctcagctcactgcaacctccgtctcctgggttcaagcgattctcccacctcagcctcctgagtagctgggattacaggcacccaccaccacacccagctaatttttgcatttttagtagacacagggtttcaccatgttggtcaggctggtctcgaactcctgaccttgtgatctgccagcctcagcctcccaaagtgctggaattacaggcatgagccaccactcccagccctggattatctttcctctttagtgtgttctcacaactacctctcactgctgggttttctctctttcttttttttttttttttttttttttttttgagacagtccggctttgttgcccaggctggagtgcagtggcgcgatctcggctcactgcaagctccacctcccaggttcaagcgattctcccacctcagcctccctagtagctgggattacaggcgcatgccagcacacccagctagtttttgtatttttagtagagacaggggtttcaccatgttggtcaggctggtcttgaactcctgaccttgtgatcttcctgcctcggcctcccaaagtgctgggattacaggtgtaagccactgcacccagccagctttctcattcttatcccttagttctctgccagggaataagatagaaaccattccctcaaccacattctagtcatggtccctattctcatgtttccacttctctctctttggtaataaatcaattaattgagaaacaagtagctaaatgttcatcttctgctagtctgcatccccttattttcccagagcctcccctaatgaaactgactttatttactgaacgcaggaaatgggtctctccagatcaggatgactttctgctgggaaatatttgtctttgcatcagtggggaaaaagaaagccgatgtcatgagtggaggctctgagaaaataagggctgtgttttcagtttagacccagctaagttgggagctgacatagatatgatgttgggtccaccctccacgggcaggttttcagacaaaggatccctggcaatcaggggacacctcaggtctgggctgagatgtgtgcagagggcctgggtcctcctgagcccctgcactggggggggaataagagacaggcccagcaaggggctgtccacttcctgtgggttcacagctgtggggacccaggcaggcggcagcaggctctgacttaaccacatccgtgcatctgtctgtcatggagggccatgtggtcacctgtcccacagctggagcacgcagagcaggcatcatggtgtccatcctcactgttcttctgtgcctcagtcagtggtggagagacgagggacaggaggggcactgggctgaggtggggagggtcccacagcagccttgttcaccagagagcctcagggctccagtggctactggtgctccaacaggaagggaagcagccacacctctgtgttccaaatcccccacaggaaactcttctccatggctgagtctgggccagaaagcccaagcacttgcaggtgagtctctgctaacctcccatgcctgacctcacactcagcacctggactctcatctcaggggcttctgaactgagggtgagaaaatcaagagggtctgtgacctgagctgggaatgaggagcgggggaggtctgtggaccccagcctgtggtttcttccagggaccctccccaaacccagcctctgggctgagccaggctctgtgattacctgggagagccccatgaccctctggtgccaggggaccctggatacccagggttactatctcaccaaggaaggaaaccccatgacctggtaccaacagagcccaccagagcccaggaacaagaccaacttcttcatcccatccatgagagagcaccatgcagggagataccactgtcactatctcagccctgcaggctggtcagagcgcagcgagcccctggagctggtggtgacaggtaagaggacactcaggggtcccagccccaggctctgcctgcaggaagggggtcggctctcaagggcatctccgttctaataactcagccctgggggatgatgtgggacgcgtgagccccatttaagacagtgtctccttctctcctaggagcccacagaaaacccactctctcagccctgccgagccctgtggtgacctcaggagagaacgtgaccatccagtgtagctcaagggtgggatttcacaggttcattttgattgaggaaggagaaaacaagctctcctggatgctggactcacaggaactctccaaggggctgtcccttgtccctggccctgttccctgtgggccgtgtggctgccagtcaccggtggatgttcagatgctatgggcattacacgaacttcccctgggtgtggtcggaacccagtgataccatggagatcctggtcttaggtatggatgtcttcctccttgccctatttatttttgagaacttactctcacggagccccatgtaggagggtggaacaagggaagtttgggactcctgagcccagagacactgagtatgagagacagtgagacctgcagggccaggaggggagaaggaaggggtgtgggaggaaccagccctcctagtcccgactcttctttccctccaggcgtgtctaggaagccctccctcctgaccctgcagggccctgtcgtggcccctggggagaatctgaccctccagtgtggctctgatgtcggctatgacaaattcactctgtacaaggaggggggacatgacctcgtccagggctctggccggcagccccaggctgggctctcccaggccaacttcaccctgggccctgtgagggtctcccacgggggccagtacagatgctacggtgcacacaacctctcctccgagtggtcggcccccagtgaccccctgagcatcctgatcgcaggtgaggagcccagcaggttcagtcagggacccacgctccgcacaggccctgctgggggagcccaggtggtgatggccaggatgaggggtgggggtcccaagggagggagagacagacagagacaggggatgggcgggtagagggagactcagagaaaacagagacagagactgagggtcccagagagaggcctggggaggtgtcagctcagaacgaggtggggcagcccctcacccatccttcttctctccaggacagatccgtggcagaccctccctctcggtgcagccgggccccacggtggcctcaggagagaacgtgaccctgctgtgtcagtcacgggagcagttggacactttccttctgaccaaggagggggcagcccatcacccactgcgtctgagatcagagcaccaagctcagcagcaccaggctgaattccccatgagtcctgtgacctcagcccacgcggggacctacaggtgctacagctcacgcagattcttcccctacctgctgtctcaccccagtgaccccctggagctcgtggtctcaggtgaggccgctgaccctgtcctctctgagctcaaacctcagctcaggccctgcccccaggagagctcaggacgctaaggaaagaggggagtaaagggggagggtcggcaggggagggcccagcccatgagagggtggaaatagtcagggacctcctaatcctgggctcccaccccagagacctcagatggggctaaagaccagggagggctgaaatgagatatggagaaaccttggaggaatcatgcttaggctgagggtagaagatggaggccccacccactccccacctgggctcccctggcggccccaaaatactcagtgcatacctgagacgaaggggagatcatgcacctgctcactgcagcaatgcaggcaaattattcaacagcaaacctcgtgtgcaattcctttctgtcctttattttttatgtccacatatctagtttctctttctgtttctgaagatttcaaagcaatgctggcatttataatttacacatttaatttgttaggtagcgttatgatgtaaaataactgtgctctgattttctttgggattaaattaaatatgtgcattcatgatggagaataacttctcattaataatgtctttgtatccaatacatttaaaattaaactttatacagttagcagatgcttgaagttgtattcataaaaattgtggacattgtgaattttaagcattgttttactacttgaataatttgaaagtctttgattcctttctattttctaaaattagttacgtatggatgagaaagctattggtttgggtatgctaattttagttcctattaacttaccacagacacactccctttcaatcctttccgaaatgatctcttctgatttattgataataattacattaaccacaagaaaatggaggacaaacttgtttgtttctaaattatataatactcttctcacttcaaatatatatgtatgtgtttatatatactcacacactattatatatcttataatatatattatgtattatatatttatatatacactattatatatcttatatattatgtattatatatttatatatacccacacattattatatcttataatatatattatgtattatatatttatatatacccacacattattatatcttataatatatattatgtattatatatttatatatgcactattatatatcttatatattatgtattatatatttatattacccacacattattatatcttataatatatattatgtattatatatttatatatacacacactattatatatcttattatatattatgtattatatatttatatatactattatatatcttataatatataatgtattatatatttatatatacacacactattatatatcttatatattatgtattatatatttatatatacatactattatatatcttataatatattatgtattatatatttatatatatacactattatatatcttattatatattatatatttatatatgcacacactattacatatcttattatatatttatatgtatacacacactattatatatcttattatatattatgtactatatatttatatatactattatatatcttataatatataatgtattatatatttatatatacacacactattatatatcttatatattatgtattatatatttatatatacatactattatatatcttataatatattatgtattatatatttatatatacacactattatatatcttattatatattatatatttatatatgcacacactattacatatcttattatatatttatatgtatacacacactattatatatcttatatattatatatttatatatactcacactatatcttataatacatattatgcatacacatatgcataatacatattatctatacacatatgcataatacatattatgtatacacatatgcataacacatattatgtatacacacatatttacacctatgcatatatgtatgtatgtatgcgaatgtacctctgccacggcagggaaaggttctatcacacaactacagagcagttaggagaagtgtagacacaaaggaatgcagcaactgagggacatgttggcttaagtctcttcaactcctcacacacctcccccttttttggttgattctcaggagcagctgagaccctcagcccatcgcaaaacaagacagactccaagactggtgtgtaaggagatgctctcggttatggggctggcacagagggtcaggtcctgtgaaggggaggtgggtgccctgggtggacatccaggggtcccgggtgatgttgatctgccctgacctctgagacctcttggtccaccatccccagcctcacacccccaggattacacagtggagaatctcatccgcgtggctgtggctggcttggtcctggtggtcctcgggattctgctgctttaggattggcacagctagagaagtccccaagatgcagcaaggaggtaaatacatgagagaacaatgcacccttcagagtgccagagccttggcaatgagtctgatagtcctaggaggttctggaagaaagtctggaccatcattcgggaaaccgtctactgagaaagtcgagaaggggaggcttgggtcaggttcagggagatgtctgggtgcctgtagagaacgcttcctccattaaacttccattaaatggcagtgctttcagtccagctgttgtggaccctccgtgtctgcccctcccttcctttcgctctctgtgatgtgaaggcacgtcccccatggtgggtttgcatccacacccctgcgatcacgtgctctggtccactgtcctgtaatacatttgtctttgtttccaactaccgcattctctaaagtgaactattgattctccatcttttcagttctgagcatagatctggattaaataactggaataggtgggcagatttgtatttgggactttgaaacatgagtctgaggccaggcacagtggctcacacctgtaatcccagcactttgggaggctgaggtgggcggatcacttgaggtcagaagttcgagaccaacctggccaacatggtgaaaccctgtctctactaaaagatacaaaaattagctgggtgtggcagtgagcacctgtaatcccagctgctcaggaagctgaggtgggagaatagcttgaacccgggaggcggaggttgcagtgagccaagatcttgccactgcactccagcctgggcaacagagcaagactctatctccaaaaaaaaaaaaaaaaagggaaatatgagtctgaaatgatgccctagcaccctctctggaccctgaattcccttcactcttcatcggatgatacctgtgtacttcgtccagaaatatcatctctcagaatgagcacactaacgctcgaaggctcagcctcatggtattctgttaaactggctctctgaaaaaattattttcttaagaaaactctgaacatataaagccccagatttatggtatttgctgattagtgtggtataaatacgtcctttatggccaacttcagggtgcccatatgacgccattgaatgcacagttgggaagtagtcaaaagaattgtcgttcacacgagtatgaaccagttgtaaagtttatttaaaggttataataatttctgcttcattcttatggtgtagtttcagtaaaattgtaatgtcaaaaatcatagcacaatggagggaaaagaaaaaaataggccgggtgtggtggctcatgcctgtaatcccaacactttgggaggccgaggcaggaggatcacctgaggtcaggagttcgagaccagcctggccaacatggtgaaaccctgtctctactaaaaatacaaaaattagccagacatggtggcgcctgcctgttaatcccagctacttgggaggccaaggcacgagaatcgcatgaacccaggaggcggaggttgcagtgagccgagatcactacagcctgggtgatagagcaagactcagtctcaagaaaagaaaaaagtagcaaaatcattttttggaaagaatattgaacatgtagaattttagtacattaatagtaagagtacaaattgctttaatcaattaaggaagtgtattggaattatctagttaaaaagaggaggcacacggctgtgacccttcttaattatgtacttaattatgtaccctagagataaatgtctacttatgtgtcatgatacactcacaactgttataggaatgctgttcctattagccaaagctataaaataccaaagtccacctacgaaaaaaataaacatagtgtggtaaatagactcagtggaatattacaaggtagtaaaatgcataaatgaaaataacaaacagcaccatacttcaattttcaagcataaagtcaagtaaatgaagtattatttgaaaatgtgtgcatggttatttcattacataaaggtcaaaaggagggtacatttattatttaggaaaacacacctaagatatctttgtaaaatctgtaaaatcaatagtactgtttcccctctttcattccttatcttgaaaatgcttgtctctttttctgccatggctttctaccttgcttgatatattacaattttgtaacctgcttatttcatcatatgtcataagttcacatgtatatcccatgaattattgagggtcttattcatttcaagtggcatttaggtttttaaaaatatcttttggcgaccaggtgcagtggctcatgcctgtaatcccagcactttgggaagccaaggcaggtggatcacgagttcaagagacagagatcatcctggcgaacatggtgaaaccccgtctctactaaaaatacaaaaaaaaaaaaattagctgggcatggtagagggtgcctgtagtcccagcttctcaggaggctgaggcgggagaatggcgtgaacccgagagacggaggttgcagtgagccgagatcgtgccactgcactccagcctggcaacagagtgagactctgtctcaaaaaaaaaaaaaaagaaagaaagaaaggaagaaaaaaaaatcttctggcattaactattaagaaattgcactataaaaagagaatataatgcataagacggcaatttgaaaagattcagatataattttttcttatctagtaaatacttagtaatttgtctaatgcatgccttaaatacataccactttatgcagaggttgccatgagccgagatcgcgccgttgcactctagcctgggtggcagagcaagactccatctcaaaaaaaaaaaagaaaatctcacagaaggagacccagagcttccagcctcgcccagagtcttggctcactccctgtgtgtgtggaccctagggagcctcttctgttccccacagaggtggaaacttcctccttaataaccccttgatggtcccaggcactggtgaccactgagctttgctctctcttttttcttatggttccctgtctacttccagggctatcactttactttttgtgcattagaccatgaataatgttttagaaacattctatcaaatttctcagtgctaggaacaactgaggtttttgattgggtgcctcaaatgtctacccttactgtggagtccgacaacaggattctaacaagtcccaaccccttcatgccttaacctggtctggaaataaattatgtttaagccatcccataccccagccacatcaagccccacaaccactctgagaagtgagatttatagcaaaatgctccaaacaaggtaactaaggttcagacaagggatgttaatgtgtccatttacataaacaaaaaatggtagatgatcagctttccctttgaaatcagagtactaatctgactcattgttccctgaattttagaggcaggacctcaggaggagctaagaatcctaccccaggaaaattaccaatatcagaaaggaaacaatgacatcagtacagatcctacagaattcaaaagattctaagtggacattatgaagacattattcagcttagatgaagtggtcacatatcacaagaaaacaaactgtctaaaacaatctctgaaatacctagacattccctgaatcattgagttattaaataaaatacattttaaaattaaactcttttcaggaaataaacttcaatgtcccctagtgcactctccaaaacatgtagataggaataaatactgttctgaaagacatttccctggaattacaaccattcaatatattttaaaaggcaatcataaaaatataaaaaggatatatcaggagaagaaatgtaaatggcctaaattccccacataaaaggcatagagtggcaacgtggataaaaagccaagagccaactgcctgctgtcttcaagagacccatctcacatgtaatgacacccacaggctcaaagtaaaaggatgaagaaatatttactaggcaaccaggaaacaaaaaaaaggaaggcattcctattcttatatcacatgaaacacactttaaatcaacagcaatcaggaaggacaaagaagggcattacaaaatgataaagggttcaatttgacagaagacttaactattctaaatatatatgcacccaaatttggagcaccccgattcataaaacaagttattcttcacctatgaaaagagttagacagccacacaataatagtaagggacttcagtatcccactaacaacgtcagatgaatcactaaaacagaaaactaacaaagaaattctggtcttaaagacaacacttgaccaattggacctcatagacatctacagagtactccacccaacaactgcagaatatagattcttcttatctgcacacacaaaaaacatatcatattctaagactggccacaaagcaagtctcaataaattcaaagaatcaaaatcataacaaggcacacaataaaaatagaaaaaaataccaagatgatctctcaaaactacagaaaaacatggaaatttaacaacttgtttctgaatgaatattaagagccatctatgacaaatccacagccaacatcatattgaatggtcaaaagctggaactgtaccccttgagaactcttgggtgaacaatgaaattaaagcagaaatcacaaaacattatttaaaattaataaaaatagaaacaaacttaccaaaacctttgggatgcagttaaagcagtgataagaggaaaatttatagcaatacatgcctcatcagaagtttagaaagatctcaaattagtgacttaacactgcatctagaggaactattaaaaaaaaggaacagtccaaacccaaggccagcaaaagatgagaaataactaaagtcagagagaactgaataaattgagaccaaaaagtccatacaagagataaataaaaccaagagtttttctttgaaaaaaaataaacaaaattcatagactgttagctagattaacaaagaaaaagagaaaagatccaaataaacacaaatagaactgacaaaacaatgttacgaacaatcccacagaaatagaaaagatcgtcaaagactattatgaacacctctatacaaacaagctagaaaacctagaagaaatggataaattcctggtaacacaaaatttatcatatttcaaccaggaagaaagtgaaaacctgaacagaccaataacaagttcagaaatttaatcagtaataaaaaccctactaactaaaaatagcccaggaccagacggattcacagccaaaatccaacagccatacaaagaagaactgataccgatcttactgaaacttttggaaaaaatcaaggagtgggggcttcttcctaactcattctatgaagccatcatcaccatgataccaacatctgtcagagacataatgaaaaaaagaaaactacaactaaatatccttaatgaacatagacataaaatcctcaacaaaatgctagcaaattgaatctgtcagtgcatcaaaagttaattcacatgatcaagtaagctttatttttgggatgcaaggttggttcaacctacaaagtcaacgaatgtgattcacctcataaacataattaaaaacaaaaactatatgatcatctcaatagatgcaaaaaaagctttctgtaaaatccaacatcccttcatgataaaaactgtcaataggcatcaaaggaacatacctcaaaatattaagagccatctatgacaaacccacagccaacatcatattgatgggcaaaagctggaaccataccccttgagaaccgaaacaagaccaggatgaccactcccgccattttaattcaacatggtactggaagtcctagccaaagcaatcaggcaagagaaggaaataaaaggcattaaaattggaaaagaagtagtgatactgtctctctttgctgatgaaataattttatacatagaaaaccctaaagactctgtcagaaggctcctgaaactgataaacaaattcaataaagtttcgggattaaaaaaatgtacacaaattagtaacatttctatgcaccactaacattctagctgagaactaaatcaagaacacaattccatttacactagccacaaagaaaataaaatacctaggaatccatctaaccaagaaggtgaaaattctctacaaggagaactacaaaacacttctgaaagaaataagaaatgatacaaacaaatggaagaatattccatgctcatgaattaggagaacaaatagttaaaatcgccatacttccaaaaacaaattgcagagtcaatgctatccatttcaaaatgcaatgtcatttttcacgaaattataaaaatttattctaaaatgtatttggcaccaaaaaaagagcctgaatacacataggaatcctaagcacaaagaacaaagcccaggcatcacattacccaacttcaaactatactacaatgctatagtaacccaaacagcatgatactactacaaaaacagacacatagaccaatgagacagaatagagaacccagaaatgaggctacatacctacaatcatctttgaaaaaattgacaaaaacaagcaatgtggaaagtaccctttcttcaataaatagttctgggataactgactactcatatgcaaaataatagaactggacccctaactctcactatatacaaaaattaacccaagatagtttaaagatttaaatgtaaaacctcaaaatattaaaattctagaagaaaacctaggaaatatccttctcaagatagactttggcaaagaatttatggctaactccccaaaaccaattgtgacaaagacagaaattgggacctaactcaactgaagagcttctgcacagcaaacgaaagtatcaacagagtaaacagataacctacagactgggagaaaatatttgcaaactatgcatctgacaaagttctaatatccagaatctataaggaatgtaaacaaatcaacaagcagaaaaccaaaaaacctcaattaagtatgacatgaacagacacttctcaaaagaagatgtacacatggccaaaaaacatatgaacaaatgcttattatcagtaatcatcagagaaatgcaaattaaaaccacagtgagataccatctcacaacaatcagagaagcagaagcaattactaaaaagttttttgttttttttaataacagatgctgacaagattgtggagaaaagggaacacttatacactcttggtgggaatgttaactagttcagccaatgtgataagcagtttggagacttctcaaataacttaaaatagaactactattcaatcaagcaatcccactactgggtatataccaaaaggaaggtaattaactatgtcaaaaagacacatgcactagtatattcattgctgtgcaattcagaatagcaaagatttgcagtcaacctaagtgctcaccaacagtggattagttaaagaaaatgtgctacatatacacatggaacattacatggccataaaaaataatgaaatcatgtcctttgcagcaacatgaatgtagcaggaggtcaatctcctaagtgaactaacccaggaacagaaaaccaaataccacatgttatcacttataactgagaaccaaacattgaatacacatgaacataaagatggaaacaacagataccgaggactacagatggggggaggagtagggaggtataggctgaagaaacacctgttggattctatgctcattgcctgggtgatggcattgttggaaccacaaacctcagagtcacacaatatgcctatgtaacaaacctgcatgcatacctttaatctacagtaaaggttgaagttatttaaaaataggaagaagaattaccctatacctaaagctaagatttttccctttgaatattcgtttcttcatcactgtagataagcagggaaagaaaaattattatactatactagccttttatgtgaccatgaggatttggggtaggtaggtggacagcttagataattcaccaggatattgatacaggctccatggctggaaataaccaaggatgagtgctgtgttttgagtggtctcccccagaaacgtttgttgaaatcctaacccctggtatgtatgaatgtgaattcatattatataaaaaggaataaatagcctgagcacagtggctcacacctgtaatcccagcactttgggaggccaaagcaggtggatcatttgaggtcaggagttctggccaatatggcaaaacttcatctctacaaaaaaaaaatacaaaaaaaaaaattggctgggtatggtggcgcatgcctgtagtcccagctactcaggaggctgaggcaggaattgctgaaacctggaaggcagaggttgcagtgagccaagatcatgccactgcactccagcctgggtgagacggcaagatattctgtcaaaaataaataaataaaaaacagaagaagaaatacaagaatgacagcaaactttgtattcaaaactatgaaagtaagaaacaggtggaccaacatttttaaagtgctacaagaaaatatttcaaactagaatctttcaacctgaaaaggaaaacattttcctgcaataaaggtgccattaaaaatgtctcacaatttattacatgaagcattgttctacaataaatgttaagctcttgaagcaaagattaatgataccatttagtaacttgaaattcaaaaaagtggaagtatcccaagaggcaaatacgtgtgcaattattaaatgtttcatatcaacacccaaccttatgctgtctacataagctgcacttcaaatactaatccacaagatgtaaatattgaaagaatgacattaccttgtcatgataatgcccagtgcaaaatatgcttctagtcagttgtatacatagaataggtaaatgtttgtaataaaaagtattcctcaatagaagtttcttaactcaaagaatgaaatatttcaccatgcacatacaaagaagagatatatggagatatgaagaggagtacttcataatgacaaagaggcaaattcataaataagacataatcatcctaaatgcctacacacctaaagctggaacctcaaaacacattaaattaaaggcataattcaaaacataatcaatcacatccaaattgcagctagagatagcaacattcacctcacttccagaacaagtacacagaaaattattaagcatatgaaagacttgaaaaacatttgtgtaggcggcgggtgcataaggttgggtgttgatatgaaacatttaataatttcaataatcctagcactttgggaggccaaaatgggaggatcacttgaggccaggagtttgagaccagcctgggcaccatagtgagaccccgtctctattttttttaaataaagaaaaacatttgaatgatttttttcttaactgacatttagaaagcatccacctcaaatcttcctaatccacaaacttgtctagcacccctggaacattcaccaaaataaatttttaaatgctgaatcataggtaatatgatagatgaaacagttgaattaaattataaatgtacaacaaggaaatgctggggaaattatcaaatattttaaaattaataaacacacatagcaataaacaatgagtggaagaaaaacatttcaaagaaaggtggaaaatattttgtatcaattaaaaatgaaaacacatctcggcaaatgactggggatacagatagaacagcgttaagggacaataagcctcaaatgtctgtgttagaaaagaaggaagagctgagtaaataggtaactttcacttgcagaaatactacacatcagcaaattaattccaaagtaacgtcgaggaaaaacataaaatggcaagcaaatatatacgtgcatatgtacatacattcataaatgacaaacaggacagaaaaatcagtgacatcaattttgttccttagaagaaacaggaaaattgaccccaaaaaactttccaggccacatttggtcatgatggaaatattttggcacttcctggttaagctcaacaccaacttgcacccaaaaccaataatttcatttctaggtaaatatgtctaattaattcagcatatgtatgcaagggatcacacagaaacacgattatcaaggcccgagttataaaagagaaaatccggaaacaacacaaatgtccatgataaaaagaatggataattacatgttgataaagttatgcatggactattaaactgcaatccaaaagaataaaatagagctataaaattcaatatgtatatggtgtcatagaaacacaaatgtgagaaaaagaaagaaaaatacaaaatttatattttttaaaatttgaaacaactatatatgtgagtgcttagggtgtgtgtgtgtgtgtgtgtgtgtgtgtataaccatatgtatataaatgcacacatacgcacacatatagaatgtcccggccaggcatggtggctcacacctgtaatctcagcactttgggaggctgaagtagacagatcacttgaggttaggagttcaagaccagcctggccaacatggagaaacctcctctctactaaaagtacaaaaattaggtgggcgtggtggtgggtgcctgtaaatccagctacttaggaggctgaggcacgagaattgcgtgaacctgggaggtggaggctgcaatgagccgaggtctcaccactgcattccaaactgggtgacgaagtgagattgcgtctcaaaaaaaaaaaaagttctaaaagttgtgacttgggtgtggcagattgtgacatactgccagctgctagaaatgctggggcaggaggattgcttgaactctgaagtcaaagaacagcctggggaaaatagcacatgaagaagagtttgaatctcagataaaaacaacaaaaatacatcaaaagtctttaatgtaagccaagcattcagtcatctcctgtatgagagattggatctgagacgtgttttgagttggttatagtgaaggatgcaaggtgtcaattctagttggaacaatttccaggaagccatgttctgctcttgaccaaacagccactgggcctcatgcaaggtagaaatagcctgcatacgtcatcctcccatgatgtggtcagcatgtaaactgcatgagcccctcacaacatcctgtgtgctgctgaactgagctggggcgcagccgcctgtctgcaccggcagcaccatgtcgctcatggtcgtcagcatggcgtgtgttggtgagtcctggaagggaatcgagggagggagcggtggggtggagatctgggcctggagtggagatatgggcctggagtggagatatgggcctggagtggagatataggcctggagtggagatatgggcctggggtggagatatgggcctggagtggagatatgggcctggaactgtagatatgggcctgaagtagagatatgggcctggagtagagatatgggcctggaactgtagatatgggcctggagtggagatattggcttggagtgcagatatggacctggaattgagatacgggcctggaggtggagatatgggcctagagtggagatatgggcctggaggtggagatatgggcctggaactgtagatatgggcctggagtagagatatgggcctggagtggagatgttggcttggagtgcagatatgggcctggaatggagacacgggcctggaggtggagatacaggcctggaggtggagatatgggcctggagtgtagatatgggcctggagtagagatataggacagaggtggagatataggcctggagtggagatatgggcctggagtagagatataggacggaggtggagatatgggcctggagtggagatatgggcctggaggtgatgtacagatggatcatccatcatgatctttctttccagggttcttcttgctggaggggccctggccacatgtgggtgagtccttcccccaaaccttaggttgtcatctccccacataagatgatgttcctgaaacgggaggcaggcgacacagggggttgactgatgggctgaccatgggaagccatgtgggaatctctcatgaactaggaaaaggaagccaggggaagcttcgccacagttctgtcctagccctccccggcctttctttcccttggctgagtctgtggggacccagggggagactgaagtgctcaaaggagtggtgtgcagggaggaagtggtgtcaccggcagaggaagggagagaagcagtgcaaggaacaacaggcctctgaggacaagagcataactcacaccctccagcgtttccatgacggtaggggctgcaatgtggctgctgtcattctacctaagaggtgggggaaccacagtcatgaccctgacattccagatcttctaataggggctcagttgtttattatggttcatgcattagctgatcatgccctccatcctgtgtctaccttgtgttcttttatgtaagtaattttgcagtgttaaaatctagtaagagtcgcttcttcagcacctgctcaaagttctcagctgacacttgctgtagggagacgccatgtctatgcgggatgggtccttcctgtagccctgggcacccaggtgtggtaggagccttagaaacgtggaaatgggagaatcttctgagcacagggagggaggggcggctccacatcctcctctctaaggtagtgcctccttctcccccaggtggtcaggacaagcccttcctctctgcctggcccggcactgtggtgtctgaaggacaacatgtgactcttcagtgtcgctctcgtcttgggtttaacgaattcagtctgtccaaagaagacgggatgcctgtccctgagctctacaacagaatattccggaacagctttctcatgggccctgtgaccccagcacatgcagggacctacagatgttgcagttcacacccacactcccccactgggtggtcggcacccagcaaccctgtggtgatcatggtcacaggtcagaggctttctgtctgggcttctcactgtcccacctcctgaatcccagagcttctggtgggggcgtccatcagggtccaatcatccaggcccagactgtatttggggtaaagggggattcagtacagagaaatagttgctgtggtgggaagaataattgtccccagtgatggctacatggtaatccatgaaccctgtgactatttatgtcatagggcaggggactgaaggggaagatggagctcaggttgttgatgggttgaccttgcgatggggagacagcctggactgtcctgctgtgctcagagtaatcacaagggtcctcatgagaggaggaggaagaggaaagtggggttagagcaacgtcgtgggagggagactccatcagccacagcgggctttgaagatgggggaaggccatgagccacaaaggcagttggcctctaagggctggagaagtcaagggaactgattcttccctgagtctccagaggaaacacagccctgtagatgccttgattttagcccagagagaactgggtccgatttctgttctccagaagtggaaggggtcattgtattctctcctgccccatgtttgtgacaattttctccagcagcaacaggaaaccaacacaggaacccaggtgaagcacaagttaagaaaccaaacaaggagaaggttggctacactgattttagcatgggtgggatactgatgctaccaccaggctcgatccacatagggaggggttgatgctcctggaaccagcaccaggggccaccctatggaagctggggccatggagaaggcacagacatgacaggagaggctcccaatccccatcaggaacagggacactgatgcctgccttactgatgagttcgtacctcctgccagcctttccaatctgtccaaaagagattgattcaggctgctaagagcctggacatgcagcctgtcgtggttcctcttccacccccacataaacaccaggaaagagattagtgggaaacagatacaacagcataagaggtgacactgagcacagtgggaagggaatcagggctactagagacagagagacagggaagagggagggagacagatggagggacctgcaacaggggttatgggcacaaaagaacacggagacacagagaggaaggagagagatagacaccatggaggggaagcctcacttatttcaggtcccatgaatgggatgagaaagggagacgccttctgaactcacaacctctcttcttaggagtccacagaaaaccttccctcctggcccacccaggtcccctggtgaaatcgggagagacggtcatcctgcaatgttggtcagatgtcaggtttgagcgcttccttctgcacagagaggggatcactgaggaccccttgcgcctcgttggacagctccacgatgcgggttcccaggtcaactattccatgggtcccatgacacctgcccttgcagggacctacagatgctttggttctgtcactcacttaccctatgagttgtcggctcccagtgaccctctggacatcgtggtcgtaggtgagagaatacagacctgcctctcacccttgctgggagatggagtgaatgatctaggactggaagccccaggtggtcatgaggaagatgagtgtggggttcctatggagagaaagtgacttggtgaggtctgtaccaacaaaggcagagaaacaggagacacaagtacagacctcatgtcataacatagaagccagacacaggggccatacaaggtgttagaaaaagagataaagaggtaaagaagacacagagagacagatatatcccagagagaggtgtccttctatgctgactttgttcagagaccaggcacaggttagaaggttccattctgttttacctctacaaagtgttctctcccaggagaacccaaagagacacatctatctggcctgagttgggccgtgtggccccaggctggtggcacctacagatgctgtgtttattcttaaacctctgccttccgtgcagtggagctgtcgtcgtcgcaggacaccatggccccaggtgagggagcagaacaccaacccctgtatgttgtgagttcctggagtccccatactggattctgaggctcatattcaaatagcaccacatgttataggattactgagaacaaaagcccacagagagacacggagtgaaatcagggaaatcaaaaagcaaagacatgaacacacacacagaatgagccagaagaagggaattgagagactcacagacacataaagagatagaaaaagagggcagagaagtggagcgtatgatggaaggaagcagagaaaagccctaaaatcagagccctgagggaggggcacaaagacagggaaagataaagatgtggggatggattgcagagactccaaaagggaactagagagactgagaggcagagaaagacaaggagatggagagagacagatgatagatggatagatagatatagatagatgaaagataaaaggtagatgatagataatagagagacaggtgatagacaaatagatgatgaatgactgatagatgatatagatagacaagtagaaagacagacagatgatatataaatagatatagagagatagaaagacagataaacacatgatgatagatggatagatgcatacatacatacattgattgatagatgatagataacagagagataggtcatagatacacagatgatgatagatgatagatacatacatagataaatgatagatcgatcaatagatagtagatagaaatatgcagaaagttatgagcaagacagaaagtgagagactcagaattaaagaaagaggaagatcaagtcaaccagtccaaggagggtcagagagaataaaatggtacaaaaaaagaaaacatagctagggatggagaagtgaggtcagagacctagagagacagagaaggtggaaggaggaaatagacatgaagagagatgggggtggagggtgagagagagaaagagagcattaagtcatagagcaggggagtgagttctcagctcaggtgtgaggagagctgtgacaacgaagaacctccctgaggaaaccacctcttctccttccaggtctatatgggaaaccttctctctcagcccagccgggccccacggttcaggcaggagagaatgtgaccttgtcctgcagctcccggagcttgtttgacatttaccatctatccagggaggcagaggccggtgaacttaggctcactgcggtgctgagggtcaatggaacattccaggccaacttccctctgggccctgtgacccacggagggaactacagatgcttcggctctttccgtgccctgccccacgcgtggtcagacccgagtgacccactgcccgtttctgtcacaggtgagaaaacaccatgcctgtcccatgtcttgtgatcctagagccatagctgaggagcttcctgctgatgatggagagaagcatggacagatgccgagacagaacacacagcatgggtgtaagggcggggtcagggggcaggatggcagacagggcacctccaaaccctcctgtatggcctgcaaggaggcccttgatcagggttccaggcacccaggcagatggagaaagaggtcagaacagacccagaggagggagactgggctctgcctggggagatcagaggttctctcagcccctcaaccttacccacttcccagaagcccatcctggcctgtcacccacagagagatgtcatcaccagcaacgcctacacccttttctttttgtttgaagaaatatttattgaggtgaaatatacctatgtaatttaccacctttaccatttttaagtttgaagtctactgttcataaatacatttataggctgggcacggtggctcactgttgtaatcccaacactttgagaggccaaggcaggtggatcatttgagatcaggggctcaagaccaccctggccaacatggggaaaatccatctgtactaaaaatacaaaataataataataatgataataattagccgagcatggtggcacatgcctgtagtcccagctacttgggagggttgggcaggagttgcacttaattgcaggaggcggaggttgcagtgagctgagatcatgccactgcactgcagcctgggcaacagagagagacactctctcaaaattaattaattaattaattagtattcttttttttttaccctccacccttcccttcctggcctctggtagccaccattctactctctacctttgtgagatccaccttttagctcctgcatatgagtgagaaatggaaatacttgtaatgacctccagttccattcatgtggctgtaaatgacaggatgttactctttctatggatgagttgtccctattgtgtgtgtgtaccacattctctccatccattcacccactgatgggcgggtaggttgatccacatcttggctactgtgaacactgctggaacagtcatgggagtgcagatgtcacttcgatacgctgatgtcctttcctttgggtttacacccagtcatggaattgctagatcctctggaagtgtctttttacattttgttttatggtttttgtttttgtttttgttttttttagacagtttcactcttgttgcccaggctggagtgcagtggtgccatctgggctcactgcaacctccacctccaggattcaagagattccccagcctcagcctcccaagtagctgggttactggctcccaccaccacactcggctaatttttatatttttagtagagacagagtttcgctatattggccaggctgctcttcaactcctgacctcaagtgacctacccacctcggcctcccaatgtgctgggattacaggcatgaaccactgtgcccgacctcattttattttttgaggaacttccatactcttctcctctgtaatggctgtactaatttgcattcgtatcagcagtgtaccagatgcaaccctggttgactcagcagagcaagagacgtgcagtaagagagaatttagcttatttatgcacacgacacttccactcactcactcgttcagccaatgccccatgctctggctgtgcagtgtggaatcttttcctattgttgccataacaaatttccacaagcttcgtggatgaaaacatgtttttcttaattatctcacagtgctgtaactcagaagtatgaactgcatttcactgggctgatatcaaagggacagtaaggctggatttctttttaaggttccaagcaagaatctgctccttaacgtttcccagctcctagaggctcccacgttcctgggcccctggtccccttcctccttcctccttcctcaaagcccacaaaggctggtcacgtctcacatggcatcattcagactcttcttctttacccatacctttttctctgaatcctgctctgccttcttcctcatcttttaaggactttgggattctattggggtcaccaagataatccatctcaatctccctaaaatcatccagcgtaccctctttttaagttcagctgattagcaaccgtaatgccatctgcaatcttcattcctcctttcctgtaaaataacatattcacaagctatggaggctaagacagggacattttgggggtggggcagcattctcctgccttccacaaatggtaaacaggatgcatttggcctctgctcttgggacgctgatattgcagatgggtaaatgcgagggcagagaatgaatgcacaagggtaccaataaatgaatgatccattgggaagcatctgtgcaccaaatctggggttttttgtgtgtgtgtgtgttttttgttttcttttttttttttgagtagagtctctctctgttccacaggctggagtgcagtagcacaatctcagctcattgcaacctctgcctcctgggttcatgcaattctcctgcctcagcctaccgagtagctgggattacagctgtgcgccaccacactcggctaatttttttggtatattttttagtagaaatgaggtttcaccatgttgtgcaggctgtctcaaactcccaatctcaagtgatcccaccgccttagcgtccctaagtgcaaagattacaggcgagagctactgcgcccagccaggatttaaaataagtaatagataatgctgagtatataatttcaggtgacagagaaggtctcactgatcagataatatttgtgaccttaatggaaaaaatggattcaacccttggaagattggcggaaggattttccacactgagctctcagccgtgaaggcacaaaggtggaaacattcttagttcaaggaagaggctctgcctcaaatgctgggaatgagatggggagaatgacaagacaactgtagagagatggagagcacactgggtacacaggaaactaaggaggaacaaggagcatgtttttgatactcacagcccttggattcaactcagagctaactaggaatccctacctgattaacagtgaccgacatgaaaataagggaggcccaggtgcgtaactggaatctaggagaccgtggaaaaggcaattcccgccccactggtgaaacgtagggttgatttacacactaaatgaatgaaagatggatataagctatgcttgtgaggtagaatcatttgcagggagggcttgctgggtttgatttttcctagtagtttaatccttgtttcattaatttctttctgagatgtgttttttttctacatctaaatcaatacctggcagaggagcgatagacacatgaggggtggtgcaaatgaagggacctagtataatataatatacaagactgtggatgggggctcacacctgtaacccaacactttgggaggccaaggcgggtagatcacttaagggtaggagtttgagaccagcctggccaacatggtgaaaccccgtctgtactaaaaatacaaaaattagcctggtgcattggcacctgcctgtaatcccagcgactggggaggctgaagcagaagaatggcttcaaccctggaggcagaggttgaactgagatcgcatcactgcactccagcctgacacagggggactctgtctcaaaaaataaaaataaaacatacataattatgacacacagaaattacaaaggcaactggataccaaccatcatttttctatttctctgtgtttaattctttgaccctttatcttatccattaaacaatcaggttaaacctcttccttatttggctttctgtgagcttgggatcatatggaaaatgtgaaagcctcctgaacccaccagcacaggtcctggaatagagaacgtgctctgttcatggcataaaacttgccccttcacccaaatcccccaattcatctctacttccaatcacctatggagatacagatagatcatggggaggtaaacactaatactctttggagtgagctcagatcttggactcagagaccagtgccagcactagcccctggtcacatttcgtactaactcacagaaggacaggctgtattgaaacaataaacgacggagagggcggtccttccccgtgcttctcgggtggaatagcagcctaatatatgtctcagcagatcacaaaaagtagcatgttgttcctgggctacatcattatttcatggctgtttgatttaagtcagttctacttcactttttttatcttgatttcattttttctttcttttcttggagaatgtaattttttttgagtcaagagggttgtggtggtagaaactgtaaagcacattcgctgtgtatcaatcccaatccagtcttcccagagaagattctaaacacctcctggaatgcacctgggcctataccaattcctatcactcaccgtcactccagggagacagaacacacagagaacacattacacaggcaggttcattactaacagataagcagcgagtgacaacagaaacctacatttcaatgtgagccagtccctcaaggctcagaaaagctgctcgagacatgtggagtcaccccatatgcagtgtatctgggggaaatcaaaaagcagcccagcctgggttttgtaccctggagccacaggaagcactcagctaaagcactgcatgacgtcctcctccaggaagaacaggaagacagcccaggctgttctgggatgttcctcctgatctcaggacgttgctgtcttagtccatttttgttgctctaaaggaacacttgagcctgggtaacttctaaagaaaagaaatgtgtttgcctcacagttctgcaggctgtactggaagcatggcaccagcatctatttcttgtgacggcctcaggctgctcccactctggcagaagggaaggagggtctgtctgtgcagagaccacagagatcacacggcaagagagggaccaagggggagggggagcgatggagcttccaagctcttttaacaaccagttctccaggaactaatagagggggaacttgctaaccccgtctccttggaacagcattgatctgttcatgatggatccacctccatgacccaaacaactcccaagaggcccaacctcccaccctgggggttacatttcaatgtgaggtttgaaggggtcaaacatctaaactaaagcagttgtatcctcagcacgttctatggttactacaactgagaaagcaggaggaagctaggtctcccgccatctgggtgcttgtcctaaagagacgttgtatgtggttacctgtcaatcaagaaatgtgagacaattcatatagaggaactgctatgattagcttcttattggtgtcttgtcttcctccaggtaactccagacacctgcacgttctgattgggacctcagtggtcatcatcccctttgctatcctcctcttctttctccttcatcgctggtgtgccaacaaaaagagtaagtctcacgaagcagaagccagagagctcagggccatgtggggaagcaggatgggagcactcaggtgtgtgttcctcacaggcaggatggtccctggcccaaggcaggagccacagaggcaggactttctagagagagcaccagactccctgcctctgccttcagctcacagaccattgcctgattctgaaccgtatcctcacatcccctgcagccactcacatccaggagaaggttccatgacaggcagaaagtgggacacagaatcaataggatgggaactcagagctatacatgggatggatccttgagctcagagagatagaatgtctgagtctgctgttggcaactgagggacctcaggcacctatggcctccccctgtatgttggtatctgcttatgaaatgaggacccagaagtgccctccgagctgttttgacgacttccgtcttctacagatgctgttgtaatggaccaagagcctgcagggaacagaacagtgaacagggaggtaggtgctcctccgcccagcctcgtggctagtcttattcccaaagagtcctggaaaatgtgagcaccctccctcactcagcatttccctccctccaggactctgatgaacaagaccctcaggaggtgacatacgcacagttgaatcactgcgttttcacacagagaaaaatcactcgcccttctcagaggcccaagacacccccaacagataccagcgtgtaacacggaacttccaaatgctgagcgcagatccaaagttgtcttctgtccactagcaccacagtcaggccttgatgggatcttctagggagacaatagccctgtctcaaaaccgggttgccagctcccatgtaccagcagctggactctgaaggcgtgagtctgcatcttagggcatcgctcttcctcacaccacgaatctgaacatgcctctctcttgcttacaaatgtctaaggtccccactgcctgctggagagaaaacacacttgcttagcccacaattctccatttcacttgacccctgcccacctctccaacctaactggcttacttcctagtctacttgaggctgcgatcacactgaggaactcacaattccaaacatataagaggctccctcttaacacggcacttagatacgtgctattccacctttcctcagagtatctttcagccttctgtcagcagtaaaacttataaattttttttataatttcaatgtagttttctcttcttcaagtaaacatgtctgccctcatggtttcgtcaatgggactcttttcttgcctaaggcttccggtgttatcattaccacgtccacataaccccatctgttctccgctgggttctcacccctggactctgagcttctggaagcagggtggagcctgaattgtctctgagactccaatttccatccaaagatgcagcacataggaggttccaaggatggtgaatcagatgaacaagtgatattcttactctctgcagatctggaaagctggcagagtcattccacgatgaaacatttgtagagtcataggccttgttagtctcatctccacagggacacgtatcaacacatcatctttcatactactataaatagacagtcactcctccatatctctggggtttacacatgtttattgaatcagcaataaatcaaaaatattttgagaaaaaaaatccccgaagtttcaaaaagcaaaaaactatgttgaatcgacacaaattgagtggcgtgtaggctgtgtcaggaattataagtaatcaagagatgatttcatgtatacaggaggatgtgcatgggttctatgcaattgctatgctattttttttttttttgagacagtctcactctctcacccaggctggagtgcagtggcgtgatctcaactcactgcaacctccgccttccaggttcaagcgattctcttccctcagcctccccagtagcctcccctaggattacaggcacgtgccaccctgcacagataaatttttttgtgtgtatatttttagtagagatggggtttcagaatgttggaccagctggtcttgaactcctgaccttgtgatctacccagctcagcctcccaaagtgctgggattacaggcgtgagccacggtgcccagcttcactatgccatttcatgcaaggggcttgagcatctgcagattttggtatctgaatggggatcctggaaccaatcacccaggtatagtgaaggaccatggtatataatttttatttgtcaatcttaaaaataaagcataaaaaatttacaacaacaagataaaaaataagaagtgtttttatagtgtgaggataagtttagatttattttttcctacgtgtaaccctatggtcctgtgttatttgttgagaaaatattctattccaccttaaactacatggcagcctttgtcaactataaagggactgtgtatccacagatgtattttagacacagttttctgtccagtggttctctgtatcccctctcatgaggatgctgcattttatataaacttatagaaccccttaaaatttggtaacctgagtcctctgatttgttattataggttatttagtttgctttttttttttttcttgagacagactcttcctctgtcacccaagctggagttcagtggcttgagctcagctcactgcaacctccgtctcccaggttcaagctattctgatgcctctggtttagtagtagaaactcaagcaggaaaattagaatggcttcttgtcacaattactctgataatgttaataatacctgttagacattttgcacattacatatgaagaagagtttgaatctcagataaaaacaaaaatacatcaaaaatctttaatgtaagcacagaattcaatcatctcgtgtatgagaggttggatctgagacgtcttttgagtctggtcgtagtgaaggacgcaaggtgtcaattctagtgagaacaatttccaggaagccatgttccgctcttgagcgagcacccactgggcctcatgcaaggtagaaagagcctgcgtacgtcaccctcccatgatgtggtcaacatgtaaactgcatgggcagggcgccaaataacatcctgtgcgctgctgagctgagctggggcgcggccgcctgtctgcacagacagcaccatgtcgctcatggtcgtcagcatggtgtgtgttggtgagtcctggaagggcatcgagggagggagtgcggggatggagatcggggcccagagttggagatataggcctggaagtggagttatgggcctagagatggagtgatgggcctagaagtggagatctgggcctggagtggagatctgggcctggagtggagatatgggcctggaggttgagatatgggcctgcagtagagatatgggcttgtagtggagacatgggcctggagatggagatatgggcctggagatggagatatgggcctgcagtagagataggggcctggagtggagatatgggcctggagtggagatatgggcctggaggtggagatatgggcctggaggtggagatatgggcctggagtggagatatgggtctggaggtggagatacgggcctgcagtagagatatgggcctggagtggagatatgggccaggagtggagttatgggcctagagatggatatctgggcctggagtggagatatgggcctaggaaggagatatgggcctgggtgtggagatatgggactggagaggtgatatgggcctggagtggagatatgggcttagggtggagatctgggcctggggcggagatatgggactggattggagataggggcctagggtggagatctgagcctggattggcgatatgggcctagggtggaaatatcagcctggagtggagatatgggcttggggtggggatatgggcctggaaactgggtctctgcacagccgacagccctgttcttgggtgcaggtaggcactgagggtgagtttaacttcagcccaggaagggcctggctgccaagactcacagcccagtgggggcagcaagggaggcctggtttgcctgcagatggatggtccatcatgatctttctttccagggttcttcttgctgcagggggcctggccacatgagggtgagtccttctccaaaccttcgggtgtcatctccccacataagaggattttcctgaaacaggagggaagtcctgtcggggagtctctcataaactaggaagagaggaccctggggtgctcagcccacatttctgacctcgcctccctggcctctcaaccccttggcagagtcaagttctgtggggaccagggttagactggggtgctcaaagctggggtgtgtggttgggaagtggtaggaacagcagatcctctgaggacaaaggtgttactcacacacttcagcgtttccatgatggtaggggctgcagtgtggctgctgtcattctaccagaagaggtgggaaaccacagccatggccctgacattccaaatcctctgatgggggctcagttgtttattttcgttcaggcatccgctgatatccattcacaaaggacatgccctccacctcatgtctaccctgtgttgttttatgtgagtaatcttacagtattaaaatctagtaggagtctctttactcagcacttgctcaaagttctcagctgaggcttttgttgtagggagacaccatgtctttgcgggatgggtccttccttcagccctgggcaccaaggtgtgatagtagccatagaaacgtggaaagcgaggagaatcttctgagcacagggagggaagggcagttccacatcctcctctctaaggcggcgcctccttctccccaaggtggtcaggacaagcccttgctgtctgcctggcccagccttgtggtgcctctaggacatgtcattcttcggtgtcactcttatcttgggtttaacaacttcagtctgtaaaaggaaggtggggtgcctgtccctgagctccacaacagaatattctggaacagccttttcatgggccctgtgacccccgcacacacagggacatacagatgtcggggttcacacacacactcccccagtgggtggtcagcacccagcaaccccctggtgatcgtggtcataggtcagagggctcctgtcttggattctccttgtcccacctcctgaatcccagagcttctgttgggcatgtccttgagggtcccatcacgcaggccctgactgtatttgtggtaaagggggattgaatacagggaaatgggtgctgtggtgggaagaataattgtccccagtgatgactacattctaatccctggagtctgtgactatttatgttataggggaagggactgaaggggaagatggagctcatggggagacagcctggactgtcccactgggctcagtgtaatcacaagggtgcacatgaaaggaggaggaagaggggagtggggattagagcagtccagtggaagtcttcaccagctttgaaggtggaggaaggccaagatccatgaatgcaggtggcctatagaggctggaaaagtcaaggaactgattctccagagtctccagagggaacaaagccctgcagatgccttgattttagcccaggaaaaatagggtccaatttctgtctccagtactggaaggtgtcagtgtggtctctcctgctgccatgcttctgataattttctacagcagcaacaggaaaccaacactggaacccaggtcaaggacaagttaagaaacaacccaaggaaagccaggcatggtggcaggtgcatgtaatcctagcgactcaggaggctgagggcaggagaatcacttgaacccaggagacagaggttgcagtgagcctagaccacaccacttcactccagcctgggtgaaggagtgagactctgtctccataattaattaattaattaaagaaaccaaacaaggagaaggttggctaccctgagatcagcaagggtgggatgatgatgccaccaccaggctccatccacatagggaggggttgatactcctccaaccagcaccaggagccagcctatggaagctggcaccatggagaaggcacaggcatggcaagagtggctcccagtccccaccaggaacagggtgtgtggacactggtgcctgccttattcatcagttcataccttctgccaaggattgcaattcatccaaaagagattgaaccaggctgataagagcctggatgtgcagcctatcctggttcctctttcacccccacataaacagcaggaaatacattagtgtgaaatagatacaacaccccaagagatgaggctcagcccagtgggaagggaatcagaggctactagagacagagggacagagaagagggagggagacagatggaaggacctgcaccaggagttaagggcacagaaaagaacatgaagacacagagaggaaggagagagacagacaccagcaaggggaagcctcactcattctaggtgccatggatgggatgataaagagagacaccttctaaactcacaacctctcttcctaggagtccacagaaaaccttccctcctggcccacccaggtcccctggtgaaatcagaagagacagtcatcctgcaatgttggtcagatgtcaggtttcagcacttccttctgcacagagaagggaagtttaaggacactttgcacctcattggagagcaccatgatggggtctccaaggccaacttctccatcggtcccatgatgcaagaccttgcagggacctacagatgctacggttctgttactcactccccctatcagttgtcagctcccagtgaccctctggacatcgtcatcacaggtgagagtgtccggacattctcattgtcattgggatgcagagtgaatgatccacgacttggaacccccaggtagttgtaaggaagatgagcttggtattcttatggagagagactgacttgctgaggtttgtaccaacagagacagagaaacaggagacacaagtacagaccaggtgtcataacagaggacagacacaggggccatacagggagttagaaaagacagaaagagttaaaagagacagacagacagacatgtcccagagagaggtgtccctccatgctgactttgctcacagacctggcacaggttagaagtttcatttctgttttacctccacaaagtgttctctaccaggagaacccaaggacacccatatttatgacctgagttgggccctgtggcctcaggccttgtggcacctacagatgccatgtttattctgacacctctgccttccatgtaatggagagtaatcgtcccaggatatcatggccccacaacaccaacccctgtatgctgtgtgaacttgtggtctccagactggattctgtggctcacattccaaataaccccacatatgaaaggatcactgagaggcacagagaaaaatcaggaacaccaaaaagcaaagacataaacacacagagaatgagccagaggaaggagattgagagactcacagacacataaagagagagaaaagagggcagaggagtggtgagaatgatggcagggagcagagaaaagcactaaaattagagtcctgagagagaggcacaaggacatagaaagatggagatgtggggatgaattgcagagattccaaagagaactagagagaccgagaggcagagcaagacagatgatagatggatagatatagatagatgataaataggtagatgatagataataggttaaagatacatagatgatgattgattgattcattaatagataatacatagagatgatgatgatgaagacagataatacgtacagatagagaggcagacagaaatcatagagagagagatgatacatacatataaataacagatgattgatggatagatagacaagtgatagatacatagatgatatatagatatagatgacaggtagagaatttgtagataggcaccgaatagataaatagatagatcgacagataatagatagaaatatgcagaaagttatgaacaggacacaacgtgagaaacttagaatttaaaaaagtaacatcaagtcaaccaatccaaggagagtcagagagaataaaagaatccaaaaagggaaaacatatctagaggtggggaagcgaggtcagagacctagagagacagagaaggtggaagaaggaaatagacatgaagagagatggggtggagggtgagagagagagagagagagagcattaggtcatagagcaggggagtgagttctcagctcaggtgaagggagctgtgacaaggaagatcctccgtaaggaaaatgcctcttctcctccaggtctatatgagaaaccttctctctcagcccagccgggccccacggttctggcaggagagagcgtgaccttgtcctgcagctcccggagctcctatgacatgtaccatctatccagggagggggaggcccatgaacgtaggttctctgcagggcccaaggtcaacggaacattccaggccgactttcctctgggccctgccacccacggaggaacctacagatgcttcggctctttccgtgactctccatacgagtggtcaaactcgagtgacccactgcttgtttctgtcacaggtgaggaaaccccatatctgtctcatgtcctatgatcctagagccttagctgaggagcttcctgctgatgatggagagaagcatggacagatgcagagagaagacgaagcttgggtgtgagggagggatcagggcacaggatggcagacagggcacctccaaaccctcctacacggcctgcatgaaggcccgcggccagggctccaggcacacaggcagatggagaaaacggtcaggagagacccagaggagagagactgggctcagtttgggaagatcagaggttccctcagcccctcaacattacccatttcccagaagcccatcctggcctctcacccacacagggatgtcatcaccagcaacccctacaccctttacttttgtttgaagaaatatttattgaggataaatatacctatatagcttaccacctttaacattttttttttttttgaggcagagtctagctctgtcccctatgctggagtgcagtggcacaatctcagctcactgcaacttccgcctcctgggttcaagtgattctcctgcttcagccacctgagtagctggtgctacaggcgcgcaccaccacgccaggctactttttgtatttttagtagagagggggtttcaccatgttggtcgagctggtctccaactcctgaccacgtgatccacccgcatctgcctcccaaagtgctgggattacaggcatgagccaccacgcccagccacatttaccatttttaagtgtaaagtctagtggtcataaatacatttatatatatatatatatatatatatatacacacacacacacatatataaacatatatatatatatatatatatatatatatatatatatatttttttttttttttttttttaccctccacccttttattcctggcctctggaagccaccattctactctctaccttcatgagatccaccttttagctctgtatatgggtgagaaatgggaatctttgtaatgacttccagttccatccatgtggctgcaaatatcaggatgttattctttctatggatgagtagtctccactgtgcgtatgtactacattctctctatccattcatccactgatgggcaggtaggttgactccacatcttggctactgtgaacagtgctgcaccaatcatacgagtgcagatatcacttcgatatattgatttactttcctttggatataaacccagtagtgaaattgctggatactatgaaagttctctttttagttattcgtttgttgttttgtttttgtttttgagacagtttccctctgtgcccaggctggagtacaagtgaagtcatcttggctcattgcaacctccgcctcctgggttcaaatgattttcctgcctcagcctccctagtagctgggattacaggtgcacgccaccatgcctggctactttttgttttttttagtatagatggggtttccccatgttggctgggctgctctcaaactcatgacctcaactgaggtgcccgcctcggtctcccaaagtgccgggattacaggcatgatccacctcacccaacctctttttagttctttaaaggacttccacacttttctccgtaaaggctgtactaatttacactcctaccaacagggtattagggttctcctttctctaccactttggcaggatttcctttgcctgtcttgcagctaaaagccattttattttatttcattttattttgagatggagtttcgctcttgtcacccaggctggagtgcagtggtgcgatcttggctcaccacaacctccacctcccaggttcaagcgattctcctgcctcagcctcccgagtagctggaattacaggcacacgccaccacgcccaactaaattttgtatttttagtagagacagtgtttcttcatgtgggtcagactggtctcaaactcccgaccttatgaggttcacccacctcaggctctcaaaggtctaggatgacagacgtgagccaccacgcccggcctaaaatccattttaatggggtgagatgaaaactcactttgattttaatttgtgtttctctgatgatgagtgaaactgagcactttttagtatgtggggaaatttcatgtgttttgctcctttttcaattaaatcgtttgttttattgagttgtttgagcttcttatatttctagttattaatcccatctcagatgcatagtttgcacatatttgctcccaatctgtgggttgtctcttcactttgttggtttatttttagcggtgcagaagttgcttagtttgaggtaatcccaatggtctatttttgcttcgattacttgtgttttgaaggtttaaaacaaaatgtcttccttcagacaaatgtcctggagcatttccccaatattttcttctacgtgtttcataggttcaggccttagactcacatctttaatccattttcatttgagttttgtgtatagtgacaggtagaggtgcagtttcattcctctgcatgtagatgtccaggtttccctgcactgtttattgaaaagactgtcctttcctgattgtgagttcttggcacctttgtcaaagtccattggatgggctgggcatggtggctgacacctgcaatttcagcactttgggagcccaaggcgggtggatcacctgaggccaggagttcaagattagtctggccgacgtgatgaaacattgtctccactaaaaatataaaaattagctgagcatggtggtcagcacctgtaataccactactcaggagtttgaggccagagaattgattgaacccaggaggctgtggtggcagtgaaccgagattgcacctctgcactccagcctgggtgacagagcgagactccatctcaaaagaaaaaagaaaaaaacattggaggtaaatgcatggattatatctgtgttcttcattctgctccattgttctacgtgcctttctttatgccaatgtgatgctgttttgcttactacagctctgtaacatattttgagatcaggtagtgtgatgctcctgttttctctttataccttgaagtctcaagacagtgggcgtcacatacaaaaattacggaaaaaaggatcccaggactcccagggcccaatattagataacagagtgttggccatgaaccaacctcaaagatttccattgagtagaggacagacaccctcatttcctcacctctctcctgtctcgtgttctaggaaacccttcaaatagttggccttcacccactgaaccaagctccgaaaccggtgagtacagaaccctcttatatccgcttttggaaacctggggaggtagaaaccttcgatgcaggcattgactcagcatctcgcagctctgacattgtacgcctgtcttctaccatctccgaactccagatactccaacagcgaaagggatctgggcccaacctagggctcagtgaaatctcttaatctctcattttatggagctgagacctcctacaagctagaagaatgattgccaatctgacatccttctcaggaaaaatgcaatgtttgttctgcctgcattcctaactggaggataaattcctgggggcttgagagagggaagggaagggaacatctgatgagggcgaggtgttttagagaagttccacttgccaaggaatgaattactgttggtcatgaagcaaccctggctgactcagcagagcaacagccttgccgtaacagagaacggagctcatgcacgcacacttcgactcactgactcattcagccacggccccatgctcaggctgtgcagtgcggaaccttttcctattgttgccataacaaatttccacaagattcgtgggtgaaaacaaaacggttttttaattatcttacagtgctgtagctcaaagtaggaagtgcatcttactgggctaaaatcaaggtgacagcaaggctgccttccctctgaggattccaggcaagaatctgcttctcacttatcccagcttctaaaggctcccagttcctaggctcctgttccccttcctccttcctcaaagcccacaaagactggtcacatctcacatggcatcactcagtgccttcttccttaccacacctctttctctgaatgctgctctcccttcttccttatcttttgaaaacttggggattctattgggttcaccaagatgaaaatccctcataatctcctggaaatcatccaggatacccttgttttaagttcagctgattagcaaccgcaattccatctacaatcttcattcctcctttccatgtaaaataacatattcacaagctatggaggctaggacagggacattttggggtgggacagcattctcctgccttccacaaacggtgaacaagatgcatttggcttctgcccttgggacactgatattgcagatggttaaatgggagggcagaaaatgaatgcacaagtggatctataaatgaatgatccattgggaagcatctgtgcatgaaatctattttttgtttgttcttttgtttattgagacagagtcgccctctgtcttccaggctacagtgcagtgtcacgatcttggctcactgcaacctgcgtctcctggattcaagtgattctcctgcctccgcctctcgagtagctgggattacaggcaactgccaccgtgcccggctaattctttttgtatattttttgtagagaggatgtttcaccacgttggccaagcttgtctgaaactcccaacctcaagtgatccgaccgtctcagcatgccaaagtaatgggactacaggcgtgagccactgtgcccagccagaattcaaaatcaataatagataatgctgagtgtatgatttcaggtgacaaagaaggtctcactattcagatatttgtgacattaatgaaaaacacggattgaacccctgaaagattggcggaaggattttgcacacacagctgtcagccgtgaaggcacaaaggtgaaaacaatctgatgtggaaggaagaggctctgcctcaaatgctgggaatgatgtggggagaatgacaagacgactgtagagagacggagagcacactgggtacacaggaaactaaggagcaacaaggagtgtgtgtttgacactcacagccattggattcacctcggggtaaccaggaatccctacatgattaatatgactgacatgaaaataagggaggctcagttgcataactggaatctaggagaccgtggaaaaggcaattgccaccccactggtgaaatgtggtgctgatttagacactaaatgaatgaagtagatggatataagatatgtttgtgaggtagaatcattgactggaaacgcttactgggtttgattttcctacttgtttaatcctcgcttaattaatttctttctgagatttattcatcctacacataaatcaatacctggcaaaggagtgacagatatatgagtggtggtggaaatgaagagacttattatagcataatatacaagtctgtgaacagtggctcacgcctgtaacctagcactgcaggaggccaaggtgggtggattccatgaagtcaggagttccagaccagcctggccaacgtggtgaaaccctatctctactaaaaatacaaaaattagccgagcacgatggtgcatccctgtaatcccagctcctattctggaggatgaagcaggagaatgacttcaacccagtaggtggaggttgcagtgagtggagattgcatcactgcactccagcctgggggacacaaggagactctatctcaaaaaataaaaataagaaatacataaatataataaaacacacacgaatgacaaaggcacctgaattccaatcatcgtttttctatttctctataattacttctttgatc

SEQ ID NO: 2370 - DNA, 2447 bp, Homo Sapiens
aagggcaggaaactgccattttaatttcaccctgggtcagaattgtcaggagttagggtgactgcaaagaagccctaggcctgaagcctcaggctctggtgtgccgcaccacaccacaggtcccagcctaatacttcccagaaagggaatgaagcagagagtaggcagagtcagggggcaggggaagggccgtgggaactgatgtagagggctggtgatggtgaagctggtgaagccccgggagagacctgtgggcaggtaggaggcagctcgtagcatggccatggagccaggaggcatcagagcgtgagatggtgccaacctgggaatgcagtgtggcctgtagggaagcaaggttctaattggtcagctgctctaggactttgaggagaaaggactcagagatgtcccttgattggaggaagggtgaaagcaaaaagttgcatggggcattattgaaagggtgtcaagaatgggactgctagaatgaggaagcaaacataaagctggacacccagacaaggaggagccctggaaaaagaggggaagggtaaagagggggcctccttccctggaggccatctgatgagggtcgatgggccagtttgagaaccatttgtggcaagcgtttaaatcccaggctgctttttgccccagtacctggtatccagccatcgattgatgtgctacgagagaagatgaaccaattttattattagcctgaacaaaacataattaggaggagaaatttgcttctgctgttgcagttgctgcagcaaagaagttacataaggttcattcggatgacttgggaacaccttccctacttccctattcctgttcccgtttctctggcttgaaccaagtaaatagaggtccagagcctccactctgccttctagaaattcccaagacagaaatgtgctcaaggagcagatctaagaccctcagcctatagcggacacggaacaagggcacaaatcgaataagtcagtgcattgtcatgatgaacatgtggacaaaggcaagaaaagggagaagggacaagagagaggagcagactggaggagaaggaataaagatctgaggcatagctctgctcctgtgatgttagaggaagggaaggtggaaaaaaaaggcattgaattattctcagacaatttcagaaggaccagatggattctggaaggaattaactctgttatgtcctgtactagtatcattactacactctaagatgggcaaacgaaaggatttggagcattttggcagatactctttgggtgattgagagggggaggtaggagggcatggctgttggggtgactatatgggggtcgcatttgggctgaaagttaaggccacagacacatcccaggctgagctccacactgacccccttagactgaggctttcactcagggcacttaacttgggtggagggaggcaggagtggaaactccaggcctaattgctaggtctctctcagctcttccagggagcacggggcaggaaattcctcaaattccaggcttgtaggatcattgctgagcttaaccgcagagcaagagaaagaggcaggagaggcagagaactgccttctctccatctttttttcccttgcaattttaaagctgcagcaaatcagaagggtttggaggggctgatggctatgagagaggccccaagcataacacccccgaccctggtaaagaaagtcccaagtctgggaatcccagagaaattagtcctgaattgagtaagtttgaagtcaaaaatagactgctgtggcccgggataagcatttttcccagggtgaatttttttagttcttcagaatagccagtggtaaggaagttggtttaggagcaagaactgtcttgctgaaataaatgatggctgcgcagggagcacattggaaggggtcttggggtggacagaatttccttttgctctaagggtgaaaccagtcaggtctctctctttctgagctctcctcccagagcacctggtcaggatatcccagtcatcacctccgggaagatgatgttccctggatagcccatacattttctcacctccatacctagctaacactgctgcatcagtcccaatgaccccacttcccatcctttactctctgagatctggatttgccttagatgcaccccccatgccactttcttaaggtagtcttctcaactccccccaaagaatgaactattatttttggggggcttccaaagcaaattgctttgaaattccaaaagatcatacattctgttttaatcatagtgggttgttaagctcctgcactagactataacgctacttgtggatagggactatgatttgtttatatctgtaacttccgtctcttgcctcttttccccagcatagagcagaacgactgccatacagtaaatcaaaaaaaaaaaaaaaaaaaa

SEQ ID NO: 2371 - DNA, 463 bp, Homo Sapiens
tagaattcagcggccgcttaattctagaagtccaaatcactcattgtttgtgaaagctgagctcacagcaaaacaagccaccatgaagctgtcggtgtgtctcctgctggtcacgctggccctctgctgctaccaggccaatgccgagttctgcccagctcttgtttctgagctgttagacttcttcttcattagtgaacctctgttcaagttaagtcttgccaaatttgatgcccctccggaagctgttgcagccaagttaggagtgaagagatgcacggatcagatgtcccttcagaaacgaagcctcattgcggaagtcctggtgaaaatattgaagaaatgtagtgtgtgacatgtaaaaactttcatcctggtttccactgtctttcaatgacaccctgatcttcactgcagaatgtaaaggtttcaacgtcttgctttaataaatcacttgctctac

SEQ ID NO: 2372 - DNA, 646 bp, Homo Sapiens
ccggctaggtacgaggccgggtgttagagcgtctcagcgcagcgccgcccgctgagagccagcacgaacgagcccagcaccggccggatggagcgtccgcaacccgacagcatgccccaggatttgtcagaggccctgaaggaggccaccaaggaggtgcacacccaggcagagaatgctgagttcatgaggaactttcagaagggccaggtgacccgagacggcttcaagctggtgatggcctccctgtaccacatctatgtggccctggaggaggagattgagcgcaacaaggagagcccagtcttcgcccctgtctacttcccagaagagctgcaccgcaaggctgccctggagcaggacctggccttctggtacgggccccgctggcaggaggtcatcccctacacaccagccatgcagcgctatgtgaagcggctccacgaggtggggcgcacagagcccgagctgctggtggcccacgcctacacccgctacctgggtgacctgtctgggggccaggtgctcaaaaagattgcccagaaagccctggacctgcccagctctggcgagggcctggccttcttcaccttccccaacattgccagtgccaccaagttcaagcagctctaccgctcccgcatga

SEQ ID NO: 2373 - DNA, 488 bp, Homo Sapiens
tttttttttccagtatctctcacgtaaaaaataaaatttatttctttttacacaagcagcaaggcatgccctatcctgacataatttcattccaaatggaaatcagatcaaggccctaaagacacagtgtgaaggtgagagggttgccttggccagcctggcctggaggggatgctgaccgggccgccttcctcctgcagctctgacctggtcattcccttccaggagtgacgccagctcccggaggtgctccagctgctggagacgattgttcgaggtgaggaccagcctgtgcacctcctcatccactcggtcgtacaggcttgtggcggcctccagggtgtcccggctgtcttctgtgccaagctcttctctcctcagccgcgccaggacggtgcccccctccagcctgagagacacaagcagtgggtcttccaggacaagcttcatcatcgtctcatgctggtcaattaactcggcgacttcct

SEQ ID NO: 2374 - DNA, 3762 bp, Homo Sapiens
cccgcgagcgtccatccatctgtccggccgactgtccagcgaaaggggctccaggccgggcgcacgtcgacccgggggaccgaggccaggagaggggccaagagcgcggctgacccttgcgggccggggcaggggacggtggccgcggccatgcagtcctgtgccagggcgtgggggctgcgcctgggccgcggggtcgggggcggccgccgcctggctgggggatcggggccgtgctgggcgccgcggagccgggacagcagcagtggcggcggggacagcgccgcggctggggcctcgcgcctcctggagcgccttctgcccagacacgacgacttcgctcggaggcacatcggccctggggacaaagaccagagagagatgctgcagaccttggggctggcgagcattgatgaattgatcgagaagacggtccctgccaacatccgtttgaaaagacccttgaaaatggaagaccctgtttgtgaaaatgaaatccttgcaactctgcatgccatttcaagcaaaaaccagatctggagatcgtatattggcatgggctattataactgctcagtgccacagacgattttgcggaacttactggagaactcaggatggatcacccagtatactccataccagcctgaggtgtctcaggggaggctggagagtttactcaactaccagaccatggtgtgtgacatcacaggcctggacatggccaatgcatccctgctggatgaggggactgcagccgcagaggcactgcagctgtgctacagacacaacaagaggaggaaatttctcgttgatccccgttgccacccacagacaatagctgttgtccagactcgagccaaatatactggagtcctcactgagctgaagttaccctgtgaaatggacttcagtggaaaagatgtcagtggagtgttgttccagtacccagacacggaggggaaggtggaagactttacggaactcgtggagagagctcatcagagtgggagcctggcctgctgtgctactgaccttttagctttgtgcatcttgaggccacctggagaatttggggtagacatcgccctgggcagctcccagagatttggagtgccactgggctatgggggaccccatgcagcattttttgctgtccgagaaagcttggtgagaatgatgcctggaagaatggtgggggtaacaagagatgccactgggaaagaagtgtatcgtcttgctcttcaaaccagggagcaacacattcggagagacaaggctaccagcaacatctgtacagctcaggccctcttggcgaatatggctgccatgtttcgaatctaccatggttcccatgggctggagcatattgctaggagggtacataatgccactttgattttgtcagaaggtctcaagcgagcagggcatcaactccagcatgacctgttctttgataccttgaagattcattgtggctgctcagtgaaggaggtcttgggcagggcggctcagcggcagatcaattttcggctttttgaggatggcacacttggtatttctcttgatgaaacagtcaatgaaaaagatctggacgatttgttgtggatctttggttgtgagtcatctgcagaactggttgctgaaagcatgggagaggagtgcagaggtattccagggtctgtgttcaagaggaccagcccgttcctcacccatcaagtgttcaacagctaccactctgaaacaaacattgtccggtacatgaagaaactggaaaataaagacatttcccttgttcacagcatgattccactgggatcctgcaccatgaaactgaacagttcgtctgaactcgcacctatcacatggaaagaatttgcaaacatccacccctttgtgcctctggatcaagctcaaggatatcagcagcttttccgagagcttgagaaggatttgtgtgaactcacaggttatgaccaggtctgtttccagccaaacagcggagcccagggagaatatgctggactggccactatccgagcctacttaaaccagaaaggagaggggcacagaacggtttgcctcattccgaaatcagcacatgggaccaacccagcaagtgcccacatggcaggcatgaagattcagcctgtggaggtggataaatatgggaatatcgatgcagttcacctcaaggccatggtggataagcacaaggagaacctagcagctatcatgattacatacccatccaccaatggggtgtttgaagagaacatcagtgacgtgtgtgacctcatccatcaacatggaggacaggtctacctagacggggcaaatatgaatgctcaggtgggaatctgtcgccctggagacttcgggtctgatgtctcgcacctaaatcttcacaagaccttctgcattccccacggaggaggtggtcctggcatggggcccatcggagtgaagaaacatctcgccccgtttttgcccaatcatcccgtcatttcactaaagcggaatgaggatgcctgtcctgtgggaaccgtcagtgcggccccatggggctccagttccatcttgcccatttcctgggcttatatcaagatgatgggaggcaagggtcttaaacaagccacggaaactgcgatattaaatgccaactacatggccaagcgattagaaacacactacagaattcttttcaggggtgcaagaggttatgtgggtcatgaatttattttggacacgagacccttcaaaaagtctgcaaatattgaggctgtggatgtggccaagagactccaggattatggatttcacgcccctaccatgtcctggcctgtggcagggaccctcatggtggagcccactgagtcggaggacaaggcagagctggacagattctgtgatgccatgatcagcattcggcaggaaattgctgacattgaggagggccgcatcgaccccagggtcaatccgctgaagatgtctccacactccctgacctgcgttacatcttcccactgggaccggccttattccagagaggtggcagcattcccactccccttcatgaaaccagagaacaaattctggccaacgattgcccggattgatgacatatatggagatcagcacctggtttgtacctgcccacccatggaagtttatgagtctccattttctgaacaaaagagggcgtcttcttagtcctctctccctaagtttaaaggactgatttgatgcctctccccagagcatttgataagcaagaaagatttcatctcccaccccagcctcaagtaggagttttatatactgtgtatatctctgtaatctctgtcaaggtaaatgtaaatacagtagctggagggagtcgaagctgatggttggaagacggatttgctttggtattctgcttccacatgtgccagttgcctggattgggagccattttgtgttttgcgtagaaagttttaggaactttaacttttaatgtggcaagtttgcagatgtcatagaggctatcctggagacttaatagacatttttttgttccaaaagagtccatgtggactgtgccatctgtgggaaatcccagggcaaatgtttacattttgtataccctgaagaactctttttcctctaatatgcctaatctgtaatcacatttctgagtgttttcctctttttctgtgtgaggttttttttttttttaatctgcatttattagtattctaataaaagcattttgatcgg

SEQ ID NO: 2375 - DNA, 332 bp, Homo Sapiens
ttttttttttcatcccacgatcactgttttaattatggcatttccccactgggaacattccttacaatcaaaagaagtgttatacatacttaacacttctgttcttacaatatattcagcagtatcagttacaaccatttgggtatgtgaactgttcgctaaataaaacatcatacagtaagtttcaagggccacaatggtatggcctcttctaccacagacaaatagattaattttggcaggcgttggaaatctggtaggtcatggtagcttcatcagaaacatgcagtcctttccttcgttagaggcatcaattcttaaactgctggagg

SEQ ID NO: 2376 - DNA, 1697 bp, Homo Sapiens
gaattcctgcctcgccactgtcctgctgccctccagacatgctggggccctgcatgctgctgctgctgctgctgctgggcctgaggctacagctctccctgggcatcatcccagttgaggaggagaacccggacttctggaaccgcgaggcagccgaggccctgggtgccgccaagaagctgcagcctgcacagacagccgccaagaacctcatcatcttcctgggcgatgggatgggggtgtctacggtgacagctgccaggatcctaaaagggcagaagaaggacaaactggggcctgagatacccctggccatggaccgcttcccatatgtggctctgtccaagacatacaatgtagacaaacatgtgccagacagtggagccacagccacggcctacctgtgcggggtcaagggcaacttccagaccattggcttgagtgcagccgcccgctttaaccagtgcaacacgacacgcggcaacgaggtcatctccgtgatgaatcgggccaagaaagcagggaagtcagtgggagtggtaaccaccacacgagtgcagcacgcctcgccagccggcacctacgcccacacggtgaaccgcaactggtactcggacgccgacgtgcctgcctcggcccgccaggaggggtgccaggacatcgctacgcagctcatctccaacatggacattgacgtgatcctaggtggaggccgaaagtacatgtttcccatgggaaccccagaccctgagtacccagatgactacagccaaggtgggaccaggctggacgggaagaatctggtgcaggaatggctggcgaagcgccagggtgcccggtatgtgtggaaccgcactgagctcatgcaggcttccctggacccgtctgtgacccatctcatgggtctctttgagcctggagacatgaaatacgagatccaccgagactccacactggacccctccctgatggagatgacagaggctgccctgcgcctgctgagcaggaacccccgcggcttcttcctcttcgtggagggtggtcgcatcgaccatggtcatcatgaaagcagggcttaccgggcactgactgagacgatcatgttcgacgacgccattgagagggcgggccagctcaccagcgaggaggacacgctgagcctcgtcactgccgaccactcccacgtcttctccttcggaggctaccccctgcgagggagctccatcttcgggctggcccctggcaaggcccgggacaggaaggcctacacggtcctcctatacggaaacggtccaggctatgtgctcaaggacggcgcccggccggatgttaccgagagcgagagcgggagccccgagtatcggcagcagtcagcagtgcccctggacgaagagacccacgcaggcgaggacgtggcggtgttcgcgcgcggcccgcaggcgcacctggttcacggcgtgcaggagcagaccttcatagcgcacgtcatggccttcgccgcctgcctggagccctacaccgcctgcgacctggcgccccccgccggcaccaccgacgccgcgcacccggggcggtccgtggtccccgcgttgcttcctctgctggccgggaccctgctgctgctggagacggccactgctccctgagtgtcccgtccctggggctcctgcttccccatcccggagttctcctgctcc

SEQ ID NO: 2377 - DNA, 232 bp, Homo Sapiens
ggagatataaatacacgaagctttattgcagctgttgggcttacctagtagaagtggccagtcattttaatttgcagttctatttacattcccaaggtaaccacgttcagtaactctctagaggctaagctgttaaaatttccatttttatacaaatagcaaagatatttctttccctttctttctttctttctttctttctttctttcttttctttctctctttccttcct

SEQ ID NO: 2378 - DNA, 444 bp, Homo Sapiens
cgttccacaaacactggaacatcgatccagtgaaggtgtatttcacatggttggcacccagtgacgaagacaaagccaggcaggagacacagaaaggttttcgagaggagttataaatcagggtgacctgtgcgcctagccctgctcagggaatgaactggagactgtggcctcatcccactgtgctgtgctcacaacacttgtgtctgccacatggcattgggtgcttcctgactttagggggagattttatgtatggtattttttgacagaggaagaaaaggggtcacaggagaaacatttttttttctgggaaaaatcacttgcttttgacttatgcagttgttttaacacttaagttgattgactgtgtattctccaagctgtgatacagcagtttttttttattgtcccagggaaataaatggtaccagaagtcccctt

SEQ ID NO: 2379 - DNA, 620 bp, Homo Sapiens
ctttttttttttttttttcttttttgatcaaaatattttaataaagattctttctgacatagatacacatacaaatggtcgtacatagctgtcatagtctgattgacctatttaatatatatatcattctttacacatccaaaacccgccaacagatccatcacagctcccaactcaccatccaacctgacaaactgaatttgtattatctgcaaggagtggaaaatagcaggactccatttttaaaaaagattttcttgattttcatagggcggaaaggcagtcaaacagccatgcaaaactaaaactgaaagctcactttgggtaaatagcttcttgttcttccttagttttctttctttttaaattttatttttttagaaaaataacaaaggatttcacaccataggcaaatcaaaccagtcttttaacttaaataattctccacagttaaaataacatatatgtacatatatattaaaagcaattaaattagaccttttaaaaatgcacagcacagcctggaaaaatatttgcttagcatgttcttacgtatagcaactattgctgtgatgtttttcccttttggaatgtaaaggagtccctttcaaaaagagatc

SEQ ID NO: 2380 - DNA, 7560 bp, Homo Sapiens
accggccacagcctgcctactgtcacccgcctctcccgcgcgcagatacacgcccccgcctccgtgggcacaaaggcagcgctgctggggaactcgggggaacgcgcacgtgggaaccgccgcagctccacactccaggtacttcttccaaggacctaggtctctcgcccatcggaaagaaaataattctttcaagaagatcagggacaactgatttgaagtctactctgtgcttctaaatccccaattctgctgaaagtgaatccctagagccctagagccccagcagcacccagccaaacccacctccaccatgggggccatgactcagctgttggcaggtgtctttcttgctttccttgccctcgctaccgaaggtggggtcctcaagaaagtcatccggcacaagcgacagagtggggtgaacgccaccctgccagaagagaaccagccagtggtgtttaaccacgtttacaacatcaagctgccagtgggatcccagtgttcggtggatctggagtcagccagtggggagaaagacctggcaccgccttcagagcccagcgaaagctttcaggagcacacagtagatggggaaaaccagattgtcttcacacatcgcatcaacatcccccgccgggcctgtggctgtgccgcagcccctgatgttaaggagctgctgagcagactggaggagctggagaacctggtgtcttccctgagggagcaatgtactgcaggagcaggctgctgtctccagcctgccacaggccgcttggacaccaggcccttctgtagcggtcggggcaacttcagcactgaaggatgtggctgtgtctgcgaacctggctggaaaggccccaactgctctgagcccgaatgtccaggcaactgtcaccttcgaggccggtgcattgatgggcagtgcatctgtgacgacggcttcacgggcgaggactgcagccagctggcttgccccagcgactgcaatgaccagggcaagtgcgtgaatggagtctgcatctgtttcgaaggctacgccggggctgactgcagccgtgaaatctgcccagtgccctgcagtgaggagcacggcacatgtgtagatggcttgtgtgtgtgccacgatggctttgcaggcgatgactgcaacaagcctctgtgtctcaacaattgctacaaccgtggacgatgcgtggagaatgagtgcgtgtgtgatgagggtttcacgggcgaagactgcagtgagctcatctgccccaatgactgcttcgaccggggccgctgcatcaatggcacctgctactgcgaagaaggcttcacaggtgaagactgcgggaaacccacctgcccacatgcctgccacacccagggccggtgtgaggaggggcagtgtgtatgtgatgagggctttgccggtttggactgcagcgagaagaggtgtcctgctgactgtcacaatcgtggccgctgtgtagacgggcggtgtgagtgtgatgatggtttcactggagctgactgtggggagctcaagtgtcccaatggctgcagtggccatggccgctgtgtcaatgggcagtgtgtgtgtgatgagggctatactggggaggactgcagccagctacggtgccccaatgactgtcacagtcggggccgctgtgtcgagggcaaatgtgtatgtgagcaaggcttcaagggctatgactgcagtgacatgagctgccctaatgactgtcaccagcacggccgctgtgtgaatggcatgtgtgtttgtgatgacggctacacaggggaagactgccgggatcgccaatgccccagggactgcagcaacaggggcctctgtgtggacggacagtgcgtctgtgaggacggcttcaccggccctgactgtgcagaactctcctgtccaaatgactgccatggccagggtcgctgtgtgaatgggcagtgcgtgtgccatgaaggatttatgggcaaagactgcaaggagcaaagatgtcccagtgactgtcatggccagggccgctgcgtggacggccagtgcatctgccacgagggcttcacaggcctggactgtggccagcactcctgccccagtgactgcaacaacttaggacaatgcgtctcgggccgctgcatctgcaacgagggctacagcggagaagactgctcagaggtgtctcctcccaaagacctcgttgtgacagaagtgacggaagagacggtcaacctggcctgggacaatgagatgcgggtcacagagtaccttgtcgtgtacacgcccacccacgagggtggtctggaaatgcagttccgtgtgcctggggaccagacgtccaccatcatccaggagctggagcctggtgtggagtactttatccgtgtatttgccatcctggagaacaagaagagcattcctgtcagcgccagggtggccacgtacttacctgcacctgaaggcctgaaattcaagtccatcaaggagacatctgtggaagtggagtgggatcctctagacattgcttttgaaacctgggagatcatcttccggaatatgaataaagaagatgagggagagatcaccaaaagcctgaggaggccagagacctcttaccggcaaactggtctagctcctgggcaagagtatgagatatctctgcacatagtgaaaaacaatacccggggccctggcctgaagagggtgaccaccacacgcttggatgcccccagccagatcgaggtgaaagatgtcacagacaccactgccttgatcacctggttcaagcccctggctgagatcgatggcattgagctgacctacggcatcaaagacgtgccaggagaccgtaccaccatcgatctcacagaggacgagaaccagtactccatcgggaacctgaagcctgacactgagtacgaggtgtccctcatctcccgcagaggtgacatgtcaagcaacccagccaaagagaccttcacaacaggcctcgatgctcccaggaatcttcgacgtgtttcccagacagataacagcatcaccctggaatggaggaatggcaaggcagctattgacagttacagaattaagtatgcccccatctctggaggggaccacgctgaggttgatgttccaaagagccaacaagccacaaccaaaaccacactcacaggtctgaggccgggaactgaatatgggattggagtttctgctgtgaaggaagacaaggagagcaatccagcgaccatcaacgcagccacagagttggacacgcccaaggaccttcaggtttctgaaactgcagagaccagcctgaccctgctctggaagacaccgttggccaaatttgaccgctaccgcctcaattacagtctccccacaggccagtgggtgggagtgcagcttccaagaaacaccacttcctatgtcctgagaggcctggaaccaggacaggagtacaatgtcctcctgacagccgagaaaggcagacacaagagcaagcccgcacgtgtgaaggcatccactgaacaagcccctgagctggaaaacctcaccgtgactgaggttggctgggatggcctcagactcaactggaccgcggctgaccaggcctatgagcactttatcattcaggtgcaggaggccaacaaggtggaggcagctcggaacctcaccgtgcctggcagccttcgggctgtggacataccgggcctcaaggctgctacgccttatacagtctccatctatggggtgatccagggctatagaacaccagtgctctctgctgaggcctccacaggggaaactcccaatttgggagaggtcgtggtggccgaggtgggctgggatgccctcaaactcaactggactgctccagaaggggcctatgagtactttttcattcaggtgcaggaggctgacacagtagaggcagcccagaacctcaccgtcccaggaggactgaggtccacagacctgcctgggctcaaagcagccactcattataccatcaccatccgcggggtcactcaggacttcagcacaacccctctctctgttgaagtcttgacagaggaggttccagatatgggaaacctcacagtgaccgaggttagctgggatgctctcagactgaactggaccacgccagatggaacctatgaccagtttactattcaggtccaggaggctgaccaggtggaagaggctcacaatctcacggttcctggcagcctgcgttccatggaaatcccaggcctcagggctggcactccttacacagtcaccctgcacggcgaggtcaggggccacagcactcgaccccttgctgtagaggtcgtcacagaggatctcccacagctgggagatttagccgtgtctgaggttggctgggatggcctcagactcaactggaccgcagctgacaatgcctatgagcactttgtcattcaggtgcaggaggtcaacaaagtggaggcagcccagaacctcacgttgcctggcagcctcagggctgtggacatcccgggcctcgaggctgccacgccttatagagtctccatctatggggtgatccggggctatagaacaccagtactctctgctgaggcctccacagccaaagaacctgaaattggaaacttaaatgtttctgacataactcccgagagcttcaatctctcctggatggctaccgatgggatcttcgagacctttaccattgaaattattgattccaataggttgctggagactgtggaatataatatctctggtgctgaacgaactgcccatatctcagggctaccccctagtactgattttattgtctacctctctggacttgctcccagcatccggaccaaaaccatcagtgccacagccacgacagaggccctgccccttctggaaaacctaaccatttccgacattaatccctacgggttcacagtttcctggatggcatcggagaatgcctttgacagctttctagtaacggtggtggattctgggaagctgctggacccccaggaattcacactttcaggaacccagaggaagctggagcttagaggcctcataactggcattggctatgaggttatggtctctggcttcacccaagggcatcaaaccaagcccttgagggctgagattgttacagaagccgaaccggaagttgacaaccttctggtttcagatgccaccccagacggtttccgtctgtcctggacagctgatgaaggggtcttcgacaattttgttctcaaaatcagagataccaaaaagcagtctgagccactggaaataaccctacttgcccccgaacgtaccagggacttaacaggtctcagagaggctactgaatacgaaattgaactctatggaataagcaaaggaaggcgatcccagacagtcagtgctatagcaacaacagccatgggctccccaaaggaagtcattttctcagacatcactgaaaattcggctactgtcagctggagggcacccacggcccaagtggagagcttccggattacctatgtgcccattacaggaggtacaccctccatggtaactgtggacggaaccaagactcagaccaggctggtgaaactcatacctggcgtggagtaccttgtcagcatcatcgccatgaagggctttgaggaaagtgaacctgtctcagggtcattcaccacagctctggatggcccatctggcctggtgacagccaacatcactgactcagaagccttggccaggtggcagccagccattgccactgtggacagttatgtcatctcctacacaggcgagaaagtgccagaaattacacgcacggtgtccgggaacacagtggagtatgctctgaccgacctcgagcctgccacggaatacacactgagaatctttgcagagaaagggccccagaagagctcaaccatcactgccaagttcacaacagacctcgattctccaagagacttgactgctactgaggttcagtcggaaactgccctccttacctggcgacccccccgggcatcagtcaccggttacctgctggtctatgaatcagtggatggcacagtcaaggaagtcattgtgggtccagataccacctcctacagcctggcagacctgagcccatccacccactacacagccaagatccaggcactcaatgggcccctgaggagcaatatgatccagaccatcttcaccacaattggactcctgtaccccttccccaaggactgctcccaagcaatgctgaatggagacacgacctctggcctctacaccatttatctgaatggtgataaggctcaggcgctggaagtcttctgtgacatgacctctgatgggggtggatggattgtgttcctgagacgcaaaaacggacgcgagaacttctaccaaaactggaaggcatatgctgctggatttggggaccgcagagaagaattctggcttgggctggacaacctgaacaaaatcacagcccaggggcagtacgagctccgggtggacctgcgggaccatggggagacagcctttgctgtctatgacaagttcagcgtgggagatgccaagactcgctacaagctgaaggtggaggggtacagtgggacagcaggtgactccatggcctaccacaatggcagatccttctccacctttgacaaggacacagattcagccatcaccaactgtgctctgtcctacaaaggggctttctggtacaggaactgtcaccgtgtcaacctgatggggagatatggggacaataaccacagtcagggcgttaactggttccactggaagggccacgaacactcaatccagtttgctgagatgaagctgagaccaagcaacttcagaaatcttgaaggcaggcgcaaacgggcataaattggagggaccactgggtgagagaggaataaggcggcccagagcgaggaaaggattttaccaaagcatcaatacaaccagcccaaccatcggtccacacctgggcatttggtgagaatcaaagctgaccatggatccctggggccaacggcaacagcatgggcctcacctcctctgtgatttctttctttgcaccaaagacatcagtctccaacatgtttctgttttgttgtttgattcagcaaaaatctcccagtgacaacatcgcaatagttttttacttctcttaggtggctctgggatgggagaggggtaggatgtacaggggtagtttgttttagaaccagccgtattttacatgaagctgtataattaattgtcattatttttgttagcaaagattaaatgtgtcattggaagccatccctttttttacatttcatacaacagaaaccagaaaagcaatactgtttccattttaaggatatgattaatattattaatataataatgatgatgatgatgatgaaaactaaggatttttcaagagatctttctttccaaaacatttctggacagtacctgattgtattttttttttaaataaaagcacaagtacttttgaaaaaaaaccggaattc

SEQ ID NO: 2381 - DNA, 388 bp, Homo Sapiens
ggaggctgccggaacctccagatgctgcctgcctgcctgcagaagcctgcagtggctgctgctcctgcctctgcagccgcccctcctcctccacccaggccccaactcagaggctccgcggcccggccagccctcagctgctcacaaccgattcagtctccctccctccctcacgtggggaaagcacagcagggatgcgcggcaagaatgtacctgtagatgtgtacataccacagtgctgtaattttgtatgtagcaatcatgtaaatacatgtatggattttataatatacatatataaaaatctataaaggcatatttttagaaaaacagcacaccactgcttcttttgaaaatagtctgaataagaataaaatgaatttctaca

SEQ ID NO: 2382 - DNA, 5869 bp, Homo Sapiens
ctcgaggatctcggctcactgcaacctccgcctcccaggttcaagctgttcttctgcctcagcctcccgagtagctgggattacaggcgcctgccaccatgccctgctaatttttgtatttttagtagagatggggtttcaccgtgttggccagactggtctcgaactcctgacctcgtgatccacccgcctcagcctcccaaatgctgggattacagatgtgagccaccgcacccggcctggcagaggatactttttaaggtcaaagacagtagcagaggtggagttcctgggaacagggtcatgaggggaagagggggttcggagggagcgagtagccactggctacctctagaaagggaaggctttggtgcaacatcgttcccctgcagttttactcatctttgcttcctgccctttcatcatccaatcgggcaggcaggacagggcctgagggggcagggatccagtgggtgcctctctagactaaccccagctcaggactcccagagccccttccctgaggccctgctgcccccaagcccagattggggatcccaagcagcacgtaggcagagccagtgaggtccccgttagtcccattgaaagctctaaaaccagcgaaccctcagtccagcctcaggtcaggcatccaggacggcctcagccctcatgggtgagccatctctgcggacactgcacagggcctacgatccatcgctgcctcccgaggatgccagccaggcccccgttgagataactgcttccctgctggacaaggctgggaccagccatctcggtgacagttccagaacccctggcctgggctgctgggttcaatggaaaaaggctgtgactagagtcagggggatggtctcagtgacctcaaggataaggccagatccttgcactgtcagtgacccaaagcaacaggtgtccagagcagcagtgtggcgccttcacgcccccacacatcagcccaactcacccaggacagggactgtagcctcagcactcaacccatgtgccctgtgtggggtctcttcccactgcactcacaggagaggaagggtccctcaggggtccactggggtcccctcctgcaaatggggcaaggagaggggcaaggggctgtctcaaggcccctggagcacatgcaggtcctggactggggctcctgggagggccatgattctgggctccatgagttcagagcagacgccttgtttttccttgtccactgtcagccaccccacccttccctgacccttaaaagaaccaggaaacagcacatgatctgttggaaggaggcattcattctttcctttctgtgggtgtggggaggggaccacagggcacataccccaccctgggatccagctgagcaggggggtcagagatgacagctcttccggctcacaggccaccggcccacatacagggcaatcagaagaaagaaacagcacaaggaaggcacagagggagtcgttgtccctgccagaggtgcagcactccgggaatgtccctcactctccccgtccctctgtcttgcccaatcctgaccaggtgcagaaatcttgccaagtgtttccgcaggagttgctggcaattgcctcacattcctggccttggcaaagaatgaatcaacccaccctagatcccataaatagggccacccaggtgagcctctcactcgccacctcctcttccacccctgccaggcccagcagccaccacagcgcctgcttcctcggccctgaaatcatgcccctaggtctcctgtggctgggcctagccctgttgggggctctgcatgcccaggcccaggactccacctcagacctgatcccagccccacctctgagcaaggtccctctgcagcagaacttccaggacaaccaagtaaggggccaagaggggcacctgcaggcagggcctggggaagagtgggagcagaggggaggagaggtgaagagactcaggaagagcgttgggcaggacttaggagtccagggtccaggtttcagctcactctgtgccaccagggtcccctggtggaaaccatgccccttccccccatccccaccccctctcagcctgaacagactcccccaggtccacatcccctctcccataacccccattgtccaaagaaggtgggagcacttttagtccccctgcacagatgaggaaactgaggctcaggaaggcccaccagccacatgcctcctccagtgaggaggtcaccctcctccctgccagactcagaaccgcctcttcccccaggactcccttctggactgatggcctcctgctcctgccccttcaccagtgcaggcccagcctgggccctgctgcccagctagaggggctcatggttccaagctgggcggcccagaggtgccacagggacagagctggaggggtggctcctagggccattcctgggttgtgcctcttatcagtcccttgcagttccaggggaagtggtatgtggtaggcctggcagggaatgcaattctcagagaagacaaagacccgcaaaagatgtatgccaccatctatgagctgaaagaagacaagagctacaatgtcacctccgtcctgtttaggtgagggccgacatctcctgggggtgtgagagtcagactgacgtcacaggcaagggatggccaaagctgagggatcctgtcgttcacctcgctgttctgcccggaattcatctgtgttcatccttcctctgttccttagagcaacgtttatagcacatttccatgcagacacacagacagtggtggggatggacatgcacagtcgttagaaaacaagacggagagaggaggggtgcctgggagcgggaggaggggacactggatccagcctggaaccccacccagtgccttcatggaaggcttccagggaggtggccttaaaagagccaacctgcttcaaaaggaaatgtggggtgttcccggcaggggctggagtcagagagagcccccccttcaggaaggagcaagccatcgcagggtcaccctgagcagagctgctgagcagcctggaggggcaggtggccacgctagcacctagcacggtcctcaggccccgccccagcggatctgctgcggagtggcttagagcagggctcttgggccgcagggtggggagacttggtggggtgcagcctagggggtcgggagaccagcgaaagtgaagcggggccgtcacaggtgtgagagaacaggcgcagggtgaagaggcagggagccagggatcagccgcccccagtgggtttctgactctggcagctgagtggattgggattggggcatttgtggagcaaggagcagaatacagacaggttggggagctcagccctggggtgccaggggatgggaagtgggaggactcaaggatggggtcaggtttgacccgagagctaggggaacggctggcatggagcagactggaagtaccgaggtggatccccgggagagggtataggaagggaagcagcaagctgagtgcaggggagaaatgcagggtttcctgtgtgttgggtggcggcgggggtgaaagccacccagggaggcagccaaaggaaagaaggacatcgggtgctggagggtctgagtggggtccaggggccccaggcaggccaggagggacagcctggtgtcagctcagggagaaggcccaggcccatctcggctgggtggggtagggcccctccaggtagtgggggatgagctgtcacgggttgggccggactgagagcaacagaaccctgctgctgccctggccccaccttgtccagcacaggaggcccaagcctgggttgtctcccctctcacccacccatctctccctcccaaggaaaaagaagtgtgactactggatcaggacttttgttccaggttgccagcccggcgagttcacgctgggcaacattaagagtgagtcttgagtgaggtggggcactgagttggggctccggggagctgggtaggggcacagaccttcctgcccctccacacagatgtgttgtatggggagaagcccacgttgatgggctggggagggaggggacagctccctcctcccatccagggcagggctgacccctcaccgtccacgcctgcaggttaccctggattaacgagttacctcgtccgagtggtgagcaccaactacaaccagcatgctatggtgttcttcaagaaagtttctcaaaacagggagtacttcaagatcaccctctacggtgggtcctctcccatcccctcggggactggctcctgatcacacttagtgggaggggaggccggtcccccatgaggaagggatctgaggcctcatctactcattcaacgatatttatgtggtgtctgccggccactcactggccatcttggtcacagggagaaccaaggagctgacttcggaactaaaggagaacttcatccgcttctccaaatatctgggcctccctgaaaaccacatcgtcttccctgtcccaatcggtaatggccagtctggatgaggggacggggacatggggactgttcaggcaggatgcttccctaccagggatcagggagaggagggactccgtcctcagcttcagtcactggagcagtggatggtccaggagctccttggaagccactctgggcccaggaagactgtgccccaccccagggtctatgggactcccagggacccaggccgcaagtgctctttcctggcagtttagcccgggtctgcccagacaaggatttcaggcccaggcctgagtatccatttctcagtctcactggcctgacacctctggccaccctcccaggcccccttgttctgggccatctcccccgaccctcccaggcctcgtcaccctgggttttgctgtcctggctgtcctctctcccctggggacttgctcaccactgacttgggagctgtccttgactccagggagcctggcttgggcaggaggctccagccaggccattcagagagccactggcctcccccaggctgagagactgcctggactggtaaacaggcaggagacctgggtgcccgaggagcctgggagctgggcctcactcagggcagcccctccccaggcctttctcccacatcccctgccctgccatccacccctctgttgccccatctctgaaaggaacccccatatcttctgcagctgggccaggtggggcaggggctgcccaggggcagtgcagaggacctggcagtcagggatcacacacacacactcatacacgcacacacacacacagctgcctgttctgacggactttctccctaacagaccagtgtatcgacggctgagtgcacagtgagtgtggctgggcggctgcgagggggcttgtgggaggccagggtgcagtgggctgggggtcttgggcctgcctttgctcatccccctgccccccagcactgctgctgtctttattctgctgtccccatctcgggtgcctcccatttccccacccatcaccctcatatccacctctgtccagggtgccgccagctgccgcaccagcccgaacaccattgagggagctgggagaccctccccacagtgccacccatgcagctgctccccaggccaccccgctgatggagccccaccttgtctgctaaataaacatgtgccctcaggcctctgagtctacactgtttgacccctgggccttcgaggaaggggaggggcgggaggctcccactggcatcactctcagggtctgcacccccaggatggagcctagcgaacccagcctgggtgttagggctgcagagtgaagacacaagcccctggtcatcaccagcagctttgtgg

SEQ ID NO: 2383 - DNA, 378 bp, Homo Sapiens
gtgggcacgtggaagaaaggggatgcatagtggccagtcttcctcctgggcagtctccctgaacagagccaggagtgaagcattagtagaactggttgccgaaagtctatcaaattccaaaacattccaccatcttccagttcacagtacaactttatgggatggaggtgatatgaaaataataaaacaaaacaaaacaaaaagcaagaaaacgacaacccaggtctctttctggtgtggttccagggagggtggactgcaggttcagatggctcatgcagtcactatggctgtggcgctgtcatttcagagctatctacctcctgatgtgagggagaaaggctggagaagccacaggaagctctgtgaggcatgggg

SEQ ID NO: 2384 - DNA, 648 bp, Homo Sapiens
  misc_feature (82)..(82): n is a, c, g, or t
gggtcggcaaaggtggtagaagctcgtgacaggtgacagacagacacagaacacatcaacagaattctctgatggttcccanggagagagctgctgctctttcttccgaagctctgggagctggcacagcccaggacttcctttgctcagtctccacctggacagtggcagtatggcagcctcagaaaagaaacttttggctggcagggatcatcatgggcagattactggctaaggagaaagaagctccctgtgtatccatggtaggctttgatgagaagatgaaggtggagctgtggaacgaggtgagccaaatatccttatcctttcttggtcctgatgaattctgaagctgttacttgctcttcggtggataccttgactggcagggtggggaaggtgtcacaggaggatatttctgctggcactgctgaggtgggcagggctgtggacactttggtggtgggcagggctcagggcacttcgggggtggacatggctctgggcactttggcgtggggcacacaggaggtggctggcagggctgcttgcactgcagctgttgataagacatcctgctggagtctcaggatcaggttctccaaggtagatcagtgctcagcctttgggcgaaccccctttgggcga

SEQ ID NO: 2385 - DNA, 572 bp, Homo Sapiens
acttcggctagtacgaggctggtgtgaattggccgaggctgcaagtggcggcgcagtctcggtaggcggtatgagtttggctgggggccgggcaccccggaagaccgctgggaaccggctttctgggcttttggaggcagaggaggaagatgagttctaccagacgacttatgggggtttcacagaggaatccggagatgatgagtatcaaggggaccagtcagacacagaggacgaagtggactctgactttgacattgatgaaggggatgaaccatccagtgatggagaagcagaagagccaagaaggaagcgccgagtagtcaccaaggcctataaggaacctctcaagagcttaaggcctcgaaaggtcaacaccccggctggtagctctcagaaggcgcgagaagagaaggcactactgccattagaactacaagatgacggctctgacagtcggaagtctatgcgtcagtctacagctgagcatacacgacaaacgttccttcgggtacaggagaggcagggccagtcaagacggcgaaaggggccccactgtgagcggccactac

SEQ ID NO: 2386 - DNA, 420 bp, Homo Sapiens
tttttttttttttttttttttttttacatctctatatttttattgaaaataaaaaagtcatggtgctttcttcctcataagtggcatatggacacccccagtgctgccggtctcgcttccggtacaaaagtctcagcaggaaaccaaccttaatggcttgttggtggataagacggcatcaacttgtacatttgcccattgagagaactcccaggagcaactgtcctctctccagtacacgcggcacgttgctaaaaaggcagatttcaggatattcacattcatgcattacgtatctcacactacctgggcagtttaactcatactttgtacagatgcagagagtacagtagttgtatttatatatatatatatgtagagatctctttaaatatatatagctatatataatatatatgt

SEQ ID NO: 2387 - DNA, 403 bp, Homo Sapiens
  misc_feature (361)..(361): n is a, c, g, or t
ttttttttgggtacaggtgtgtacattggaaaaaccactttatttatttcctgataatctactgtcattctccatgtcccatcagtctcccacatgggccatacaatggcttggagctgcatcattttgtaaattcctcaggcttctctactggtacacatattaccctagcctatgtttctgagatgccttagtgaaagttgattttctttctatgtcttctcagggaaaacgtcttctgctttcacatttactggagatgggagatgagtggcactgggaattcacaccctgaaccttcagcttcacaacaaaatcgtttgtgaggccaaaggaatcaagacagcaaagctcaaagcanggccagaaggtgcaggggggaccacattggcgggtctcgctc

SEQ ID NO: 2388 - DNA, 501 bp, Homo Sapiens
tttttttttttttttttgaaatttaagaattttactgaaattagaaaagagaaaagtaacccctatacttgctactctacgatagcatttaccccaatgttgatctggtagagcagggtgtgaaaacatccagggagaaaatttttttacctcacagggtctagcatcagctgatccaggcattgttgactcaaaactcatctagtcatctagtcttggcatctccagtttccctctccaaattgtttatcttatttaagtccatattggaagcctatagaaaatgaacctaatcaaagaagcaaacactgttactgaaaaggaagcagaaaaacacttcagtggcaaataaaacggctgttcatttcatttggtgtttcactgtattgatgacctcagtaatggcatgattatatttttctgaggctaatttgaactccaccagatgcttctcataacttttgatggctgcttgaagctgtgttttttccactgctccca

SEQ ID NO: 2389 - DNA, 309 bp, Homo Sapiens
tttttttttttttttttgttgaggaggcataaaaacatggtttattccaaacactgcattgtggaataagagagtgggaagggaagttggtggagaagtgtggactcccagaccctccccttcgaaacccagccccagacccggctggagatctgggcagaggaggctttttggaggtctgctgggtcatcactgaagggtcgcaaataagggttggatttggagaggatgtgcttggtggcaagtggggtggtccggaggtgcggcagggtggaaagttttggcttcagggaggttggcttcatcgcg

SEQ ID NO: 2390 - DNA, 229 bp, Homo Sapiens
  misc_feature (176)..(176): n is a, c, g, or t
tggaaacagtgaaagagaaaaatctgatattggaggaaaaaattacgaccctgcaacaggaaaatgaggacctccatgtccgaagccgcaaccaggtggtcctgtcaaggcagctgtcagaagacctgcttctcacgcgtgaggccctggagaaggaggtgcagctgcggggacantccagcaggagaaggaggagctgttttaccgggtccttggggccaatgcctcg

SEQ ID NO: 2391 - DNA, 433 bp, Homo Sapiens
tctgattatagtcactccctcttttcttgataagacttttctgggaataaacaagactgatacaataatggcccaaactaatacgtacagggcttctatgccccatgaaattgactggcattaggccgtgaaatccgaggtgatgataaacacttgaaaggtggaaagttcttaagtgtatgactaaatgactcactggcccgtgaaacatgcaactattttagcaaagggctagtttctcttcacatataattaaaagcagttgcagtgagacttcagtggagggtattatagtgcaaactaagaaagatcagctcatgtttaaaaaaaaactgagtaaaggaaatctgcatttatggaaactgaaagctctaacactgactcattgaagaagtctcccgaagatttataagtgtaatcaacaaggctactc

SEQ ID NO: 2392 - DNA, 3865 bp, Homo Sapiens
cggcagggttggaaaatgatggaagaggcggaggtggaggcgaccgagtgctgagaggaacctgcggaatcggccgagatggggtctggcgcgcgctttccctcggggacccttcgtgtccggtggttgctgttgcttggcctggtgggcccagtcctcggtgcggcgcggccaggctttcaacagacctcacatctttcttcttatgaaattataactccttggagattaactagagaaagaagagaagcccctaggccctattcaaaacaagtatcttatgttattcaggctgaaggaaaagagcatattattcacttggaaaggaacaaagaccttttgcctgaagattttgtggtttatacttacaacaaggaagggactttaatcactgaccatcccaatatacagaatcattgtcattatcggggctatgtggagggagttcataattcatccattgctcttagcgactgttttggactcagaggattgctgcatttagagaatgcgagttatgggattgaacccctgcagaacagctctcattttgagcacatcatttatcgaatggatgatgtctacaaagagcctctgaaatgtggagtttccaacaaggatatagagaaagaaactgcaaaggatgaagaggaagagcctcccagcatgactcagctacttcgaagaagaagagctgtcttgccacagacccggtatgtggagctgttcattgtcgtagacaaggaaaggtatgacatgatgggaagaaatcagactgctgtgagagaagagatgattctcctggcaaactacttggatagtatgtatattatgttaaatattcgaattgtgctagttggactggagatttggaccaatggaaacctgatcaacatagttgggggtgctggtgatgtgctggggaacttcgtgcagtggcgggaaaagtttcttatcacacgtcggagacatgacagtgcacagctagttctaaagaaaggttttggtggaactgcaggaatggcatttgtgggaacagtgtgttcaaggagccacgcaggcgggattaatgtgtttggacaaatcactgtggagacatttgcttccattgttgctcatgaattgggtcataatcttggaatgaatcacgatgatgggagagattgttcctgtggagcaaagagctgcatcatgaattcaggagcatcgggttccagaaactttagcagttgcagtgcagaggactttgagaagttaactttaaataaaggaggaaactgccttcttaatattccaaagcctgatgaagcctatagtgctccctcctgtggtaataagttggtggacgctggggaagagtgtgactgtggtactccaaaggaatgtgaattggacccttgctgcgaaggaagtacctgtaagcttaaatcatttgctgagtgtgcatatggtgactgttgtaaagactgtcggttccttccaggaggtactttatgccgaggaaaaaccagtgagtgtgatgttccagagtactgcaatggttcttctcagttctgtcagccagatgtttttattcagaatggatatccttgccagaataacaaagcctattgctacaacggcatgtgccagtattatgatgctcaatgtcaagtcatctttggctcaaaagccaaggctgcccccaaagattgtttcattgaagtgaattctaaaggtgacagatttggcaattgtggtttctctggcaatgaatacaagaagtgtgccactgggaatgctttgtgtggaaagcttcagtgtgagaatgtacaagagatacctgtatttggaattgtgcctgctattattcaaacgcctagtcgaggcaccaaatgttggggtgtggatttccagctaggatcagatgttccagatcctgggatggttaacgaaggcacaaaatgtggtgctggaaagatctgtagaaacttccagtgtgtagatgcttctgttctgaattatgactgtgatgttcagaaaaagtgtcatggacatggggtatgtaatagcaataagaattgtcactgtgaaaatggctgggctcccccaaattgtgagactaaaggatacggaggaagtgtggacagtggacctacatacaatgaaatgaatactgcattgagggacggacttctggtcttcttcttcctaattgttccccttattgtctgtgctatttttatcttcatcaagagggatcaactgtggagaagctacttcagaaagaagagatcacaaacatatgagtcagatggcaaaaatcaagcaaacccttctagacagccggggagtgttcctcgacatgtttctccagtgacacctcccagagaagttcctatatatgcaaacagatttgcagtaccaacctatgcagccaagcaacctcagcagttcccatcaaggccacctccaccacaaccgaaagtatcatctcagggaaacttaattcctgcccgtcctgctcctgcacctcctttatatagttccctcacttgatttttttaaccttctttttgcaaatgtcttcagggaactgagctaatactttttttttttcttgatgttttcttgaaaagcctttctgttgcaactatgaatgaaaacaaaacaccacaaaacagacttcactaacacagaaaaacagaaactgagtgtgagagttgtgaaatacaaggaaatgcagtaaagccagggaatttacaataacatttccgtttccatcattgaataagtcttattcagtcatcggtgaggttaatgcactaatcatggattttttgaacatgttattgcagtgattctcaaattaactgtattggtgtaagatttttgtcattaagtgtttaagtgttattctgaattttctaccttagttatcattaatgtagttcctcattgaacatgtgataatctaatacctgtgaaaactgactaatcagctgccaataatatctaatatttttcatcatgcacgaattaataatcatcatactctagaatcttgtctgtcactcactacatgaataagcaaatattgtcttcaaaagaatgcacaagaaccacaattaagatgtcatattattttgaaagtacaaaatatactaaaagagtgtgtgtgtattcacgcagttactcgcttccatttttatgacctttcaactataggtaataactcttagagaaattaatttaatattagaatttctattatgaatcatgtgaaagcatgacattcgttcacaatagcactattttaaataaattataagctttaaggtacgaagtatttaatagatctaatcaaatatgttgattcatggctataataaagcaggagcaattataaaatcttcaatcaattgaacttttacaaaaccacttgagaatttcatgagcactttaaaatctgaactttcaaagcttgctattaaatcatttagaatgtttacatttactaaggtgtgctgggtcatgtaaaatattagacactaatattttcatagaaattaggctggagaaagaaggaagaaatggttttcttaaatacctacaaaaaagttactgtggtatctatgagttatcatcttagctgtgttaaaaatgaatttttactatggcagatatggtatggatcgtaaaattttaagcactaaaaattttttcataacctttcataataaagtttaataataggtttattaactgaatttcattagttttttaaaagtgtttttggtttgtgtatatatacatatacaaatacaacatttacaataaataaaatacttgaaattctcaaaaaaaaaaaaaaaaaaaaaaaaaa

SEQ ID NO: 2393 - DNA, 2043 bp, Homo Sapiens
aattaaagatggctgcgcccatgtaacatcactagcgaccggtgacctctttttcccccttgcctggctcctgtggtggcaggctgggcacgaggaccatgctgggccggagcctccgagaagtttctgcggcactgaaacaaggccaaattacaccaacagagctctgtcaaaaatgtctctctcttatcaagaagaccaagtttctaaatgcctacattactgtgtcagaagaggtggccttaaaacaagctgaagaatcagaaaagagatataagaatggacagtcacttggggatttagatggaattcctattgcagtaaaagacaatttcagcacttctggcattgagacaacatgtgcatcaaatatgctgaaaggttatataccaccttataatgctacagtagttcagaagttgttggatcagggagctctactaatgggaaaaacaaatttagatgagtttgctatgggatctgggagcacagatggtgtatttggaccagttaaaaacccctggagttattcaaaacaatatagagaaaagaggaagcagaatccccacagcgagaatgaagattcagactggctgataactggaggaagctcaggtgggagtgcagctgctgtatcggcgttcacatgctacgcggctttaggatcagatacaggaggatcgaccagaaatcctgctgcccactgtgggcttgttggtttcaaaccaagctatggcttagtttcccgtcatggtctcattcccctggtgaattcgatggatgtgccaggaatcttaaccagatgtgtggatgatgcagcaattgtgttgggtgcactggccggacctgaccccagggactctaccacagtacatgaacctattaataaaccattcatgcttcccagtttggcagatgtgagcaaactatgtataggaattccaaaggaatatcttgtaccggaattatcaagtgaagtacagtctctttggtccaaagctgctgacctctttgagtctgagggggccaaagtaattgaagtatcccttcctcacaccagttattcaattgtctgctaccatgtattgtgcacatcagaagtggcatcgaatatggcaagatttgatgggctacaatatggtcacagatgtgacattgatgtgtccactgaagccatgtatgctgcaaccagacgagaagggtttaatgatgtggtgagaggaagaattctctcaggaaactttttcttattaaaagaaaactatgaaaattattttgtcaaagcacagaaagtgagacgcctcattgctaatgactttgtaaatgcttttaactctggagtagatgtcttgctaactcccaccaccttgagtgaggcagtaccatacttggagttcatcaaagaggacaacagaacccgaagtgcccaggatgatatttttacacaagctgtaaatatggcaggattgccagcagtgagtatccctgttgcactctcaaaccaagggttgccaataggactgcagtttattggacgtgcgttttgtgaccagcagcttcttacagtagccaaatggtttgaaaaacaagtacagtttcctgttattcaacttcaagaactcatggatgattgttcagcagtccttgaaaatgaaaagttagcctctgtctctctaaaacagtaaacatatcttacaaattaaaatgacttttaggctgggtgcagtggctcacacctgtaatcccagcactttgggaggccaaggcgagcggatcatgaggtcagaagatctagaacagcctggtcaacatggtgaaaccccgtctctactaaaaatacaaaaattagccaggcttagtggcgggcatctgtagtcccagctactcaggaggctgaggcaggagaatcacttgaaccctggaggtggaggttgcagtgagccgagatcatgccactgcactgcactccagcctgggtgacaaagcaagactgtgtctcaaaataaataaataaaataaaataaaatgacgtacagagattct

SEQ ID NO: 2394 - DNA, 7642 bp, Homo Sapiens
cggaccctgcgcgcccccgtcccggctcccggccggctcgggggagaaggcgcccgaggggaggcgccggacagatcgcgtttcggaggcggcgcaggtgctgtaaactgcaaaccataatcctgtcttaatactgcaaacaaatcatagtggaactaaggggaacttaatttactgtttccaggttaactaaggtctcagctgtaaaccaaaagtgagaggagacattaagattttcattcttaccgggttgtcttcttcctgaagagcaatggagccgcttttacttggaagaggactaatcgtatatctaatgttcctcctgttaaaattctcaaaagcaattgaaataccatcttcagttcaacaggttccaacaatcataaaacagtcaaaagtccaagttgcctttcccttcgatgagtattttcaaattgaatgtgaagctaaaggaaatccagaaccaacattttcgtggactaaggatggcaaccctttttatttcactgaccatcggataattccatcgaacaattcaggaacattcaggatcccaaacgaggggcacatatctcactttcaagggaaataccgctgctttgcttcaaataaactgggaatcgctatgtcagaagaaatagaatttatagttccaagtgttccaaaattcccaaaagaaaaaattgaccctcttgaagtggaggagggagatccaattgtcctcccatgcaatcctcccaaaggcctcccacctttacacatttattggatgaatattgaattagaacacatcgaacaagatgaaagagtatacatgagccaaaagggagatctatacttcgcaaacgtggaagaaaaggacagtcgcaatgactactgttgctttgctgcatttccaagattaaggactattgtacagaaaatgccaatgaaactaacagttaacagtttaaagcatgctaatgactcaagttcatccacagaaattggttccaaggcaaattccatcaagcaaagaaaacccaaactgctgttgcctcccactgagagtggcagtgagtcttcaattaccatcctcaaaggggaaatcttgctgcttgagtgttttgctgaaggcttgccaactccacaggttgattggaacaaaattggtggtgacttaccaaaggggagagaagcaaaagaaaattatggcaagactttgaagatagagaatgtctcctaccaggacaaaggaaattatcgctgcacagccagcaatttcttgggaacagccactcacgattttcacgttatagtagaagagcctcctcgctggacaaagaagcctcagagtgctgtgtatagcaccggaagcaatggcatcttgttatgtgaggctgaaggagaacctcaacccacaatcaagtggagagtcaatggctccccagttgacaatcatccatttgctggtgatgttgtcttccccagggaaatcagttttaccaaccttcaaccaaatcatactgctgtgtaccagtgtgaagcctcaaatgtccatggaactatccttgccaatgccaatattgatgttgtggatgtccgtccattgatacaaaccaaagatggagaaaattacgctacagtggttgggtacagtgctttcttacattgcgagttctttgcttcacctgaggcagtcgtgtcctggcagaaggtggaagaagtgaaacccctggagggcaggcggtatcatatctatgaaaatggcacattgcagatcaacagaaccaccgaagaagatgctgggtcttactcatgttgggtagaaaatgctataggaaaaactgcagtcacagccaatttggatattagaaatgctacaaaacttagagtttctcctaagaatcctcgtatccccaaattgcatatgcttgaattacattgtgaaagcaaatgtgactcacatttgaaacacagtttgaagttgtcctggagtaaagatggagaagcctttgaaattaatggcacagaagatggcaggataattattgatggagctaatttgaccatatctaatgtaactttagaggaccaaggtatttactgctgttcagctcatactgctctagacagtgctgccgatataactcaagtaactgttcttgatgttccggatccaccagaaaaccttcacttgtctgaaagacagaacaggagtgttcggctgacctgggaagctggagctgaccacaacagcaatattagcgagtatattgttgaatttgaaggaaacaaagaagagcctggaaggtgggaggaactgaccagagtccaaggaaagaaaaccacagttatcttacctttggctccatttgtgagataccagttcagggtcatagccgtgaacgaagtagggagaagtcagcctagccagccgtcagaccatcatgaaacaccaccagcagctccagataggaatccacaaaacataagggttcaagcctctcaacccaaggaaatgattataaagtgggagcctttgaaatccatggagcagaatggaccaggcctagagtacagagtgacctggaagccacagggagccccagtggagtgggaagaagaaacagtcacaaaccacacattgcgggtgatgacgcctgctgtctatgccccttatgatgtcaaggtccaggctatcaatcaactaggatctgggcctgaccctcagtcagtgactctctattctggagaagactatcctgatacagctccagtgatccatggggtggacgttataaacagtacattagttaaagttacctggtcaacagttccaaaggacagagtacatggacgtctgaaaggctatcagataaattggtggaaaacaaaaagtctgttggatggaagaacacatcccaaagaagtgaacattctaagattttcaggacaaagaaactctggaatggttccttccttagatgcctttagtgaatttcatttaacagtcttagcctataactctaaaggagctggtcctgaaagtgagccttatatatttcaaacaccagaaggagtacctgaacagccaacttttctaaaggtcatcaaagttgataaagacactgccactttatcttggggactacctaagaaattaaatggaaacttaactggctatcttttgcaatatcagataataaatgacacctacgagattggagaattaaatgatattaacattacaactccatcaaagcccagctggcacctctcaaacctgaatgcaactaccaagtacaaattctacttgagggcttgcacttcacagggctgtggaaaaccgatcacggaggaaagctccaccttaggagaagggagtaaaggtatcgggaagatatcaggagtaaatcttactcaaaagactcacccagtagaggtatttgagccgggagctgaacatatagttcgcctaatgactaagaattggggcgataacgatagcatttttcaagatgtaattgagacaagagggagagaatatgctggtttatatgatgacatctccactcaaggctggtttattggactgatgtgtgcgattgctcttctcacactactattattaactgtttgctttgtgaagaggaatagaggtggaaagtactcagttaaagaaaaggaagatttgcatccagacccagaaattcagtcagtaaaagatgaaacctttggtgaatacagtgacagtgatgaaaagcctctcaaaggaagccttcggtcccttaatagggatatgcagcctactgaaagtgctgacagcttagtcgaatacggagagggagaccatggtctcttcagtgaagatggatcatttattggtgcctacgctggatctaaggagaagggatctgttgaaagcaatggaagttctacagcaacttttccccttcgggcataaacacaacatatgtaagcaacgctactggttcaccccaaccttccatatttatctgttcaaaggagcaagaactttcatataggaatagaaacatgctggccgaagatttcatccagaagtcaacatcctgcaattatgttgaaaagagtagtactttcttcaaaatataaaatgccaagcacttcaggcctatgttttgcttatattgttttcaggtgctcaaaatgcaaaacacaaaacaaatcctgcatttagatacacctcaactaaatccaaagtccccattcagtatattccatatttgcctgattttactattcggtgtgtttgcatagatgttgctacttggtgggtttttctccgtatgcacattggtatacagtctctgagaactggcttggtgactttgcttcactacaggttaaaagaccataagcaaactggttatttaaaatgtaaaaaggaatatgaaagtcttattaaaacacttcattgaaaatatacagtctaaatttattatttaaattttactagcaaaagtcttaggtgaacaatcaactagtatttgttgagctcctatttgcccagagatggtcatatttaaacagaagtatacgtttttcagtttcaacatgaatttttttatttctgtcagttatgacatccacgagcatcactttttgtgtctgtttttttttttttcttggactaaattcaactgcatggaagcggtggtcagaaggttgttttatacgagaacaggcagaaagtgcccattgttcaggattctaatagctacatctacttaatatcttcatttctaaattgactgcttttacctttttctcatgtttatataatggtatgcttgcatatatttcatgaatacattgtacatattatgttaatatttacacaatttaaaatatagatgtgttttattttgaagtgagaaaatgaacattaacaggcatgtttgtacagctagaatatattagtaagatactgtttttcgtcattccagagctacaactaataacacgaggttccaaagctgaagactttgtataaagtatttgggttttgttcttgtattgctttctttcaacagtttcaaaataaaatatcatacaaatattgagggaaatgttttcatatttttcaaaataggtttttattgttgaatgtacatctaccccagcccctcaaaagaaaaactgtttacatagaaattcctacacatacgtttgcgtatatgttattttaaacatctttgtggtgagaattttttccccgatattctccttctgtcaaagtcagaacaaattcagggaatttattttctggcagttgtgctccagtccttttaaaattgtacatgaacatgttttagaaacaatatggaggatgatgcatacatgtcggtcaagttcagcgctcgacattttatggaaagatttttttaaccttaccacgaaatacttaactactgtttaagtgaattgacttatttcactttagtttttgaactgtgattattggtatactgttatatcctcaacttggatttatggtaaccccttttagttcatggagaccaaaatttggggtatttataatagtcagcgcaggaatgcacatggaatatctacttgtccttttgaacctcacgagtcatccagaatgtatagacaggaaaagcatgtcttatttaaaactgtaatttatgggctcaggatctgaccgcagtcccgggagtaagcatttcaaagggggaaggcagtgtggtccctaccctgtgtgaatgtgaggatgtagacatccatcagtgcaactcgagctccatcctcctccgatttctaaggttccagttttctggagggacagtcatcatgttttgatttatctgggagaaaactgtggtgcacagcttgtgaggagggcaaggttgtgacgttcgagcttagttctggtgttattctgtctcctcttctttgtcatcagccaaaacgtggtttttaaagagagtcatgcaggttagaaataatgtcaaaaatatttaggaatttaataacctttaagtcagaaactaaaacaaatactgaaatattagctcttcctacacttcgtgttcccctttagctgcctgaaaatcaagattgctcctactcagatcttctgagtggctaaaacttatggatatgaaaaatgagattgaatgatgactatgctttgctatcattgttacctttcctcaatactatttggcaactactgggactcttcagcacaaaaggaatagatctatgattgaccctgattttaattgtgaaattatatgattcatatattttatgaatcagaataaccttcaaataaaataaatctaagtcggttaaaatggatttcatgattttccctcagaaaatgagtaacggagtcccacggcgtgcaatggtaattataaattggtgatgcttgtttgcaaattgcccactcgtgataagtcaacagccaatatttaaaactttgttcgttactggctttaccctaactttctctagtctactgtcaatatcattttaatgtaattgattgtatatagtctcaagaatggttggtgggcatgagttcctagagaactgtccaagggttgggaaaatccaaattctcttcctggctccagcactgattttgtacataaacattaggcaggttgcttaacctttttatttcaaactctctcaactctaaagtgctaataataatctcagttaccttatctttgtcacagggtgttcttttttatgaagaaaaatttgaaaatgataaaagctaagatgccttctaacttcataagcaaacctttaactaattatgtatctgaaagtcacccccacataccaactcaacttttttcctgtgaacacataaatatatttttatagaaaaacaaatctacataaaataaatctactgtttagtgagcagtatgacttgtacatgccattgaaaattattaatcagaagaaaattaagcagggtctttgctatacaaaagtgttttccactaattttgcatgcgtatttataagaaaaatgtgaatttggtggttttattctatcggtataaaggcatcgatattttagatgcacccgtgtttgtaaaaatgtagagcacaatggaattatgctggaagtctcaaataatatttttttcctattttatactcatggaagagataagctaaagaggggacaataatgagaaatgttggtgtgcttttctaagcatttaaaacataattgccaattgaaaccctaaatatgtttacataccattaagatatgattcatgtaacaatgttaaattaattataatgggattgggtttgttatctgtggtagtatatatcctagtgttcctatagtgaaataagtagggttcagccaaagctttctttgttttgtaccttaaattgttcgattacgtcatcaaaagagatgaaaggtatgtagaacaggttcacgtgattacctttttcttttggcttggattaatattcatagtagaactttataaaacgtgtttgtattgtaggtggtgtttgtattatgcttatgactatgtatggtttgaaaatattttcattatacatgaaattcaactttccaaataaaagttctacttcatgt

SEQ ID NO: 2395 - DNA, 1015 bp, Homo Sapiens
cgcccgggcaggtggagaccaggacagctgctgagacctctaagaagtccagatactaagagcaaagatgtttcaaactgggggcctcattgtcttctacgggctgttagcccagaccatggcccagtttggaggcctgcccgtgcccctggaccagaccctgcccttgaatgtgaatccagccctgcccttgagtcccacaggtcttgcaggaagcttgacaaatgccctcagcaatggcctgctgtctgggggcctgttgggcattctggaaaaccttccgctcctggacatcctgaagcctggaggaggtacttctggtggcctccttgggggactgcttggaaaagtgacgtcagtgattcctggcctgaacaacatcattgacataaaggtcactgacccccagctgctggaacttggccttgtgcagagccctgatggccaccgtctctatgtcaccatccctctcggcataaagctccaagtgaatacgcccctggtcggtgcaagtctgttgaggctggctgtgaagctggacatcactgcagaaatcttagctgtgagagataagcaggagaggatccacctggtccttggtgactgcacccattcccctggaagcctgcaaatttctctgcttgatggacttggccccctccccattcaaggtcttctggacagcctcacagggatcttgaataaagtcctgcctgagttggttcagggcaacgtgtgccctctggtcaatgaggttctcagaggcttggacatcaccctggtgcatgacattgttaacatgctgatccacggactacagtttgtcatcaaggtctaagccttccaggaaggggctggcctctgctgagctgcttcccagtgctcacagatggctggcccatgtgctggaagatgacacagttgccttctctccgaggaacctgccccctctcctttcccatcaggcgtgtgtaacatcccatgtgcctcacctaataaaatggctcttcttctg

SEQ ID NO: 2396 - DNA, 733 bp, Homo Sapiens
caggagtgcgccgcgtccgttcaccgcggcctcagatgaatgcggctgttaagacctgcaataatccagaatggctactctgatctttgttgataaggaaaatgaagaaccaggcacccgtgtggttgctaaggatgggctgaagctggggtctggaccttcaatcaaagccttagatgggagatctcaagtttcaacaccacgttttggcaaaacgttcggtgccccagccttacctaaagctagcagaaaggctttgggaactgtcaacagagttacagaaaagcctgttaagtccaagggacccctccaatcaaaacagcccacgctttgtgccaaaaagataactgagaagagtgttaagtcaaaaggctctgttcctgcctcagatgatgcctatccagaaatagaaaaattctttcccttcaatcctctagactttgagagttttgacctgcctgaagagcaccagattgcgcacctccccttgagtggagtgcctctcatgatccttgacgaggagagagagcttgaaaagctgtttcagctgggccccccttcacctgtgaagatgccctttccaccatgggaatccgatctgttgcagtctccttcaagcattctgtcgaccctggatgttgaattgccacctgtttggtgtgaaatagatatttaaattttttagtgcttcagagtttgtgtgtatttgtattaataaagcattctttaactg

SEQ ID NO: 2397 - DNA, 4522 bp, Homo Sapiens
  misc_feature (660)..(660): n is a, c, g, or t
  misc_feature (685)..(686): n is a, c, g, or t
cgggtctcagtctggtactgaatgcaggaatggcttaaggtgaaatcgtggtcctctggtgaactcagcgaagaccccctcgccttgtttatgacaagagaacttctgggggcgggaggaagagtccctgttacgatgctgatcatcattgagcttttgctgagaaaactctttagtactaaggtcgagagtctctgtggtctgcctggcaccagcaccttcctacaaccctagttttccaaaaggaaaagcctggggccaggcgacgtcctagctcgcattatgacagggccgcgggccaccagagatgcgcgatgcccaactctttccaagagcacctcgcgtcccgaaccggtgccttcaactcggagaagtcaagagacccgcaagaaacttgcacgactgcacccgccgccgcgctgctgggggctgggcaggggcagctgggctggctcccggggagacgcgacccccccgcgccccgcagaccggctgtctcccatggacccctcggcacctgcagctccgaggaagggtcagcgcgcgtgtccgcaccccgcccccaccgcgcgcccagagccgggggtcgccgtggcccttcgccacctccccaggagggcgtccggggcgtcccctctgggcgacgcgaggcccgggggnctgcggtggccgcggcgcggagccnnactccggcggcggcggcggcgcggctccccctgctctgtgcagctgccgcccgggcttgcgctgggccaggcgcgcggcggccccgggctttgtgtgtgtgtatgtgtgtgtgtgtgtgtgtgtgtgtgtgtgagagtgtgtgcgtgtgagagtgcgagtgtctgtgcgcgagtgagtgagcggcgggcgggcgcgagtgtggccggccggagcgcgagcatgacccggcgggcgcgctccccagcctccgtctccccgccggaaccatgtcgggcaggtcggttcgagccgagacgaggagccgggccaaagatgatatcaagagggtcatggcggcgatcgagaaagtgcgcaaatgggagaagaaatgggtgaccgttggtgacacatccctacgaatctacaaatgggtccctgtgacggagcccaaggttgatgacaaaaacaagaataagaaaaaaggcaaggacgagaagtgtggctcagaggtgaccactccggagaacagttcctccccagggatgatggacatgcatgacgataacagcaaccagagctccatcgcagatgcctcccccatcaaacaggagaacagcagcaactccagccccgctccagagcccaactcggctgtgcccagcgacggcaccgaggccaaggtggatgaggcccaggctgatgggaaggagcacccaggagctgaagatgcttctgatgagcagaattcacagtcctctatggaacattcgatgaacagctcagagaaagtagatcggcagccgtctggagactcgggtctggccgcagagacgtctgcaatctctcaggtacctcgctcgaggtctcagaggggcagccagatcggccgggagcccattgggttgtcgggggatctggaaggagtgccaccctctaaaaagatgaaactggaggcctctcaacaaaactccgaagagatgtagacgatgctttaagcctccgataactgttccatggaaggtacatcagcaattaattctagagcaactttgccccagcgattcctcttgggtgcgaacagaactactaacgtttcaagtttaccaagtgcaaatccaagaagacccagacggcgtcacttctcagacactgaagaactctgctgtgaagcaaaacactcaaacctttaagggactgtccttggggaggcaggcggggctgacagctcaggagtgtctgcacactgtctcggaagccaggattccatttgtgttgctgctgtatttccccccacttctctatgtaacgatataagctatcggagggtggtaccgatcaggaacgctttttggcggggctttccactgttcaaccgattccttccgctttctttttttgtgccttgtgcccttgaggtgacctctggcatgtatcctggtggttcttacatccccctctgcaaagtgccctcttggtttggttcgggcggcggctgccaccctactcaccgctctcctccctgccccaggacttcatcggagcaggcagggtggagcgaaggagctccttagcccacctggtttgcaggtgcagggggaccttaggcacgccccaagcaccaggcaccagggcccaaggacgcgcaggtgttggggcacagtccccaagggctcggccccttggatcaggctgggcactcgctgtgctctcccctccttggggcgtttaggactgggcgtctccaagcccaccatggcccagatggacgtgcaaagcccttggaattttctggcacttcctctctattgcccccaccaccaccacccccatcactgctttctcccagacctccgaatacgaaatggcttctctggctgactgcaaggctgtctccttaaggcactgagtgggccggggaggctgggagccggcggcaggattagctggtgctgaactttctctcataggacgtcgcttggatttcaaatccacggtcacctgctgccctttgcctcccccgacgccccagcctgtgccccggagaggcaggatcgcagtggtcagaatccacgtgctttcctattctcaggctgttctgactctgagccaacagctggaccgtgtctcatccccagaacatgccgtctgtccaccggggagtggccttgatggccggcctcgaaggccacaaacaaggcgtcgaggaattggaaagatttgcacaccctccagaaaggagagacgcaatctcccctccctcccatcccccaccttcgctggaacagcttcctctcactgaacggagacgcccccttggacgaactgcctaatcgtttggttctgaggcctggtttgctcttaattaatatatgaactcctcagaccttaaaccttttcctaagctttctttactgcactggagttctgactccctttgagttgtgtgttactgggggtggggtggggtcatgggttttgttgtttttgggggctaattggtgcatattcaggtaccacctttgacgtgtggctctttctcctgaccatcatgggaagtgtctgctggattccattttctaagagtttctgagggtgaggctcttattttttttttaagggatcctgtctatttcctgcacttcgagaagaatcaaaatgttcctgaatttcaaatacctcatgcaaaatgtgtctcctgaaataagggaaaaaaaaaaaaaaccacaactttgaaaatcttaatgttgaagttagcaatgccgaaaggtttctgtcttaaaaaaaaaaaatccttgtacttatcaattttgccccttaggcagtcagttttgttgagaactgtgtcctgcatcctggcgcagaacctcctgatgcggttcctctccacgcatctcgaggcggcgttacctccagattccgtagagttagagtcacatttttctttgcagcgaaactccgtcttggtgagagatgaatttggatatttatttccttctctgtttttgggaaacgagaggctacaaccaagacagctgaaggagaatgaaacacacatccacagaaacagagaggcgtaggtggccctgccgttgaccgcagcctctctggacaggcaaggggagttggcgcaggtgaggactcagacgacgtccaccgtcccaaggctgtcactagtatttctctgaagtgcctgaaggtaggaatgggccggcgattgggaccagctgggccccaccacggccacgccaggcaaagcgccagcagccctgcactccacgctggccaagaaggccttccacgcagaatgacaagactgcaaaaatccgatgtgcttccttccctggcgcagtcgctcctcgagccgctgccccccacccaccctgcacccctcgccctcccccccaccacagaatctaagacctttcagcttcgagccagggggcgggggatcccgagcaaaagccttccatggacatcaggccccgtggcctcaagggctcccagggcaaacctaattcccccaaaacgtgaagtcggggaagctgcggctacacattccacaaagtgctggcacttacacccacaacccggaaggctgtggaccgattcctctagggtggtgacctcccattagcaaacggtgtcatggtttggaatgttcattatcgccaagaacctggttagaggcataaagaccttttttcaccgttacctaattttttcccctttcaagaattttttttttttttggtgtgttgtacagcagtataatttttcacttatttattcctacagtagatatggtttgtacaatgtacaattgtttcatttcagaaaataaaaatttcaaatcatg

SEQ ID NO: 2398 - DNA, 627 bp, Homo Sapiens
  misc_feature (456)..(456): n is a, c, g, or t
cctgtgtgcccctgggccaggcccgaacccggtgtccccgggtggggggtggggacgccacggccgaagcagctagctccgttcgtgatccgggagcctggtgccagcgagacctggaatttccggtctggttggtctggggccccgcggagccaggttgataccctcacctcccaaccccaggccctcggatgcccagaacctgtaggccgcaccgtggacttgttcttaatcgagggggtgctggggggaccctgatgtggcaccaaatgaaatgaacaaagctccacagtccacaggccccccacccgccccatcccccggactcccacagccagcgtttcccccggggcagacagcgccggtggtgttcagtacgccacaagcgacacaaatgaacacgccttctcagccccgccagcacttctaccctagccgggcccagcccccgagcantgcagcctcccgagtgcagagtgcagcccctgcccgccctggcccagctgcccatgtctaccctgctggatcccaagtaatgatgatcccttcccagatctcctacccagcctcccagggggcctactacatccctggacaggggcgttccacatacgttgtcccgacaca

SEQ ID NO: 2399 - DNA, 1086 bp, Homo Sapiens
cggggcggcggcggcggcgtgaagtcactgctgctctgggttcgggttggcgactgaaggcggtaccggcctcccggaacagcccgggggagggcttaggtgcagaagggcaggctggccgcggccggtttggtctggggaccacgggctggagcaggtggaaatttaaaattgtttacagtcaacactgtttccagccatgggtttgtctccatctgctcctgctgttgcagttcaggcctcaaatgcttcagcgtccccaccttcaggatgcccgatgcatgaagggaaaatgaaaggctgtccagtgaatacagagccatctggcccaacctgtgagaagaaaacatactctgtgcctgcccaccaggaacgcgcctatgagtacgtggagtgtcccattaggggcactgcggctgagaataaggagaacctagatccttcaaatctgatgccaccaccaaatcaaacaccagctccagatcagccatttgcattgtctactgtcagagaagagtcatccattccgagagcagattcagagaaaaagtgggtttacccttctgagcagatgttctggaatgcaatgttaaagaaagggtggaagtggaaggatgaggatatcagtcagaaggatatgtataatatcattagaattcacaatcagaataacgagcaggcttggaaggagattttgaagtgggaagcccttcatgctgcagagtgtccttgtggtccatcattgatccggtttggagggaaagcaaaagagtattcaccaagggcacgaattcgttcctggatggggtatgagttgccttttgataggcacgattggatcataaaccgttgcgggacagaagttagatatgtgattgattattatgatggtggtgaagtcaacaaggactaccagttcaccatcctggacgtccgtcctgccttagattcactttcggcagtatgggacagaatgaaagtcgcttggtggcgttggacctcgtaaagcactgtttcagatggaaaaatataaactatttttttctgagcgatacattaaactattttccccagaaaaaaaaaaaa

SEQ ID NO: 2400 - DNA, 2149 bp, Homo Sapiens
cagctgactcaggcaggctccatgctgaacggtcacacagagaggaaacaataaatctcagctactatgcaataaatatctcaagttttaacgaagaaaaacatcattgcagtgaaataaaaaattttaaaattttagaacaaagctaacaaatggctagttttctatgattcttcttcaaacgctttctttgagggggaaagagtcaaacaaacaagcagttttacctgaaataaagaactagttttagaggtcagaagaaaggagcaagttttgcgagaggcacggaaggagtgtgctggcagtacaatgacagttttcctttcctttgctttcctcgctgccattctgactcacatagggtgcagcaatcagcgccgaagtccagaaaacagtgggagaagatataaccggattcaacatgggcaatgtgcctacactttcattcttccagaacacgatggcaactgtcgtgagagtacgacagaccagtacaacacaaacgctctgcagagagatgctccacacgtggaaccggatttctcttcccagaaacttcaacatctggaacatgtgatggaaaattatactcagtggctgcaaaaacttgagaattacattgtggaaaacatgaagtcggagatggcccagatacagcagaatgcagttcagaaccacacggctaccatgctggagataggaaccagcctcctctctcagactgcagagcagaccagaaagctgacagatgttgagacccaggtactaaatcaaacttctcgacttgagatacagctgctggagaattcattatccacctacaagctagagaagcaacttcttcaacagacaaatgaaatcttgaagatccatgaaaaaaacagtttattagaacataaaatcttagaaatggaaggaaaacacaaggaagagttggacaccttaaaggaagagaaagagaaccttcaaggcttggttactcgtcaaacatatataatccaggagctggaaaagcaattaaacagagctaccaccaacaacagtgtccttcagaagcagcaactggagctgatggacacagtccacaaccttgtcaatctttgcactaaagaaggtgttttactaaagggaggaaaaagagaggaagagaaaccatttagagactgtgcagatgtatatcaagctggttttaataaaagtggaatctacactatttatattaataatatgccagaacccaaaaaggtgttttgcaatatggatgtcaatgggggaggttggactgtaatacaacatcgtgaagatggaagtctagatttccaaagaggctggaaggaatataaaatgggttttggaaatccctccggtgaatattggctggggaatgagtttatttttgccattaccagtcagaggcagtacatgctaagaattgagttaatggactgggaagggaaccgagcctattcacagtatgacagattccacataggaaatgaaaagcaaaactataggttgtatttaaaaggtcacactgggacagcaggaaaacagagcagcctgatcttacacggtgctgatttcagcactaaagatgctgataatgacaactgtatgtgcaaatgtgccctcatgttaacaggaggatggtggtttgatgcttgtggcccctccaatctaaatggaatgttctatactgcgggacaaaaccatggaaaactgaatgggataaagtggcactacttcaaagggcccagttactccttacgttccacaactatgatgattcgacctttagatttttgaaagcgcaatgtcagaagcgattatgaaagcaacaaagaaatccggagaagctgccaggtgagaaactgtttgaaaacttcagaagcaaacaatattgtctcccttccagcaataagtggtagttatgtgaagtcaccaaggttcttgaccgtgaatctggagccgtttgagttcacaagagtctctacttggggtgacagtgctcacgtggctcgactatagaaaactccactgactgtcgggctttaaaaagggaagaaactgctgagcttgctgtgcttcaaactactactggaccttattttggaactatggtagccagatgataaatatggttaatttc

SEQ ID NO: 2401 - DNA, 267 bp, Homo Sapiens
ctcgtgccccgagtytytyyttttyyyttttttttatcagtcattgtatttatttaccagcatttatggcaaatggccagacctgggcagggtggtagcaatgatagattttacaaattaaggcattgttctttatttcaaaattttcatttacctatatttbccttggtcttagaaatatgaataatttagagctggcaatactcaccatcaggatataatamcggrggtttctttbtctgctttctgtagttcttggatttctyt

SEQ ID NO: 2402 - DNA, 5926 bp, Homo Sapiens
ccggctgcctctgctgcagttcagagcaacttcaggagcttcccagccgagagcttcaggacgcctttcctgtcccactggcccagttgccacaacaaacaacagagaagacggtgaccatgggggatgtgaagctggttgcctcgtcacacatttccaaaacctccctcagtgtggatccctcaagagttgactccatgcccctgacagaggcccctgctttcattttgccccctcggaacctctgcatcaaagaaggagccaccgccaagttcgaagggcgggtccggggttacccagagccccaggtgacatggcacagaaacgggcaacccatcaccagcgggggccgcttcctgctggattgcggcatccgggggactttcagccttgtgattcatgctgtccatgaggaggacaggggaaagtatacctgtgaagccaccaatggcagtggtgctcgccaggtgacagtggagttgacagtagaaggaagttttgcgaagcagcttggtcagcctgttgtttccaaaaccttaggggatagattttcagcttcagcagtggagacccgtcctagcatctggggggagtgcccaccaaagtttgctaccaagctgggccgagttgtggtcaaagaaggacagatgggacgattctcctgcaagatcactggccggccccaaccgcaggtcacctggctcaagggaaatgttccactgcagccgagtgcccgtgtgtctgtgtctgagaagaacggcatgcaggttctggaaatccatggagtcaaccaagatgacgtgggagtgtacacgtgcctggtggtgaacgggtcggggaaggcctcgatgtcagctgaactttccatccaaggtttggacagtgccaataggtcatttgtgagagaaacaaaagccaccaattcagatgtcaggaaagaggtgaccaatgtaatctcaaaggagtcgaagctggacagtctggaggctgcagccaaaagcaagaactgctccagcccccagagaggtggctccccaccctgggctgcaaacagccagcctcagcccccaagggagtccaagctggagtcatgcaaggactcgcccagaacggccccgcagaccccggtccttcagaagacttccagctccatcaccctgcaggccgcaagagttcagccggaaccaagagcaccaggcctgggggtcctatcaccttctggagaagagaggaagaggccagctcctccccgtccagccaccttccccaccaggcagcctggcctggggagccaagatgttgtgagcaaggctgctaacaggagaatccccatggagggccagagggattcagcattccccaaatttgagagcaagccccaaagccaggaggtcaaggaaaatcaaactgtcaagttcagatgtgaagtttccgggattccaaagcctgaagtggcctggttcctggaaggcacccccgtgaggagacaggaaggcagcattgaggtttatgaagatgctggctcccattacctctgcctgctgaaagcccggaccagggacagtgggacatacagctgcactgcttccaacgcccaaggccaggtgtcctgtagctggaccctccaagtggaaaggcttgccgtgatggaggtggccccctccttctccagtgtcctgaaggactgcgctgttattgagggccaggattttgtgctgcagtgctccgtacgggggaccccagtgccccggatcacttggctgctgaatgggcagcccatccagtacgctcgctccacctgcgaggccggcgtggctgagctccacatccaggatgccctgccggaggaccatggcacctacacctgcctagctgagaatgccttggggcaggtgtcctgcagcgcctgggtcaccgtccatgaaaagaagagtagcaggaagagtgagtaccttctgcctgtggctcccagcaagcccactgcacccatcttcctgcagggcctctctgatctcaaagtcatggatggaagccaggtcactatgactgtccaagtgtcagggaatccaccccctgaagtcatctggctgcacaatgggaatgagatccaagagtcagaggacttccactttgaacagagaggaactcagcacagcctttggatccaggaagtgttcccggaggacacgggcacgtacacctgcgaggcctggaacagcgctggagaggtccgcacccaggccgtgctcacggtacaagagcctcacgatggcacccagccctggttcatcagtaagcctcgctcagtgacagcctccctgggccagagtgtcctcatctcctgcgccatagctggtgacccctttcctaccgtgcactggctcagagatggcaaagccctctgcaaagacactggccacttcgaggtgcttcagaatgaggacgtgttcaccctggttctaaagaaggtgcagccctggcatgccggccagtatgagatcctgctcaagaaccgggttggcgaatgcagttgccaggtgtcactgatgctacagaacagctctgccagagcccttccacgggggagggagcctgccagctgcgaggacctctgtggtggaggagttggtgctgatggtggtggtagtgaccgctatgggtccctgaggcctggctggccagcaagagggcagggttggctagaggaggaagacggcgaggacgtgcgaggggtgctgaagaggcgcgtggagacgaggcagcacactgaggaggcgatccgccagcaggaggtggagcagctggacttccgagacctcctggggaagaaggtgagtacaaagaccctatcggaagacgacctgaaggagatcccggccgagcagatggatttccgtgccaacctgcagcggcaagtgaagccaaagactgtgtctgaggaagagaggaaggtgcacagcccccagcaggtcgattttcgctctgtcctggccaagaaggggacttccaagacccccgtgcctgagaaggtgccaccgccaaaacctgccaccccggattttcgctcagtgctgggtggcaagaagaaattaccagcagagaatggcagcagcagtgccgagaccctgaatgccaaggcagtggagagttccaagcccctgagcaatgcacagccttcagggcccttgaaacccgtgggcaacgccaagcctgctgagaccctgaagccaatgggcaacgccaagcctgccgagaccctgaagcccatgggcaatgccaagcctgatgagaacctgaaatccgctagcaaagaagaactcaagaaagacgttaagaatgatgtgaactgcaagagaggccatgcagggaccacagataatgaaaagagatcagagagccaggggacagccccagccttcaagcagaagctgcaagatgttcatgtggcagagggcaagaagctgctgctccagtgccaggtgtcttctgaccccccagccaccatcatctggacgctgaatggaaagaccctcaagaccaccaagttcatcatcctctcccaggaaggctcactctgctccgtctccatcgagaaggcactgcctgaggacagaggcttatacaagtgtgtagccaagaatgacgctggccaggcggagtgctcctgccaagtcaccgtggatgatgctccagccagtgagaacaccaaggccccagagatgaaatcccggaggcccaagagctctcttcctcccgtgctaggaactgagagtgatgcgactgtgaaaaagaaacctgcccccaagacacctccgaaggcagcaatgccccctcagatcatccagttccctgaggaccagaaggtacgcgcaggagagtcagtggagctgtttggcaaagtgacaggcactcagcccatcacctgtacctggatgaagttccgaaagcagatccaggaaagcgagcacatgaaggtggagaacagcgagaatggcagcaagctcaccatcctggccgcgcgccaggagcactgcggctgctacacactgctggtggagaacaagctgggcagcaggcaggcccaggtcaacctcactgtcgtggataagccagaccccccagctggcacaccttgtgcctctgacattcggagctcctcactgaccctgtcctggtatggctcctcatatgatgggggcagtgctgtacagtcctacagcatcgagatctgggactcagccaacaagacgtggaaggaactagccacatgccgcagcacctctttcaacgtccaggacctgctgcctgaccacgaatataagttccgtgtacgtgcaatcaacgtgtatggaaccagtgagccaagccaggagtctgaactcacaacggtaggagagaaacctgaagagccgaaggatgaagtggaggtgtcagatgatgatgagaaggagcccgaggttgattaccggacagtgacaatcaatactgaacaaaaagtatctgacttctacgacattgaggagagattaggatctgggaaatttggacaggtctttcgacttgtagaaaagaaaactcgaaaagtctgggcagggaagttcttcaaggcatattcagcaaaagagaaagagaatatccggcaggagattagcatcatgaactgcctccaccaccctaagctggtccagtgtgtggatgcctttgaagaaaaggccaacatcgtcatggtcctggagatcgtgtcaggaggggagctgtttgagcgcatcattgacgaggactttgagctgacggagcgtgagtgcatcaagtacatgcggcagatctcggagggagtggagtacatccacaagcagggcatcgtgcacctggacctcaagccggagaacatcatgtgtgtcaacaagacgggcaccaggatcaagctcatcgactttggtctggccaggaggctggagaatgcggggtctctgaaggtcctctttggcaccccagaatttgtggctcctgaagtgatcaactatgagcccatcggctacgccacagacatgtggagcatcggggtcatctgctacatcctagtcagtggcctttcccccttcatgggagacaacgataacgaaaccttggccaacgttacctcagccacctgggacttcgacgacgaggcattcgatgagatctccgacgatgccaaggatttcatcagcaatctgctgaagaaagatatgaaaaaccgcctggactgcacgcagtgccttcagcatccatggctaatgaaagataccaagaacatggaggccaagaaactctccaaggaccggatgaagaagtacatggcaagaaggaaatggcagaaaacgggcaatgctgtgagagccattggaagactgtcctctatggcaatgatctcagggctcagtggcaggaaatcctcaacagggtcaccaaccagcccgctcaatgcagaaaaactagaatctgaagaagatgtgtcccaagctttccttgaggctgttgctgaggaaaagcctcatgtaaaaccctatttctctaagaccattcgcgatttagaagttgtggagggaagtgctgctagatttgactgcaagattgaaggatacccagaccccgaggttgtctggttcaaagatgaccagtcaatcagggagtcccgccacttccagatagactacgatgaggacgggaactgctctttaattattagtgatgtttgcggggatgacgatgccaagtacacctgcaaggctgtcaacagtcttggagaagccacctgcacagcagagctcattgtggaaacgatggaggaaggtgaaggggaaggggaagaggaagaagagtgaaacaaagccagagaaaagcagtttctaagtcatattaaaaggactatttctctcaaaatcca

SEQ ID NO: 2403 - DNA, 4682 bp, Homo Sapiens
aaggatccaagtgtcacggggtctgggcaatgcaggacgggaggggctgcgtgagtgagtacagaagggaaatgagtgagggggcatgggatctcagagaaaatcagggacctctgagcaaagtggaaaggacgaccgccgcagctcctcgggccgtagctcgaccccgccttcccttttccgcagaatcctcgccttggctgcagcagcgcgctgcccccactggccggcgtgccgtgatcgatcgcaggctgcgtcaggacctcccggcgtataaataggggtggcagaacggcgccgagccgcacacagccatccatcctcccccttccctctctcccctgtcctctctctccgggctcccaccgccgccggggagcaccggccgccaaccaatgagttccttcagctacgagccgtactactcgacctcctacaagcggcgctacgtggagacgccccgggtgcatatcagcgtgcgcagcggctacagcaccgcacgctcagcttactcaagctactcggcgccggtgtcttcctcgctgtccgtgcgccgcagctactcctccagctctggatcgttgatgcccagtctggagaacctcgacctgagccaggtagccgccatcagcaacgacctcaagtccatccgcacgcaggagaaggcgcagctccaggacctcaatgaccgcttcgccagcttcatcgagcgcgtgcacgagctggagcagcagaacaaggtcctggaagccgagctgctggtgctgcgccagaagcactccgagccatcccgcttccgggcgctgtacgagcaggagatccgcgacctgcgcctagcggcggaagatgccaccaccaacgagaagcaagcgctccgaggcgagcgcgaagaagggctggaggagaccctgcgcaacctgcaggcgcgctatgaagaggaggtgctgagccgcgaggacgccgagggccggctgatggaacgccgcaaaggcgccgacgaggcggcgctcgctcgcgccgagctcgagaagcgcatcgacagcttgatggacgaaatctcttttctgaagaaagtgcacgaagaggagatcgccgaactgcaggcgcagatccagtacgcgcagatctccgtggagatggacgtgaccaagcccgacctttccgccgcgctcaaggacatccgcgcgcagtacgagaagctggccgccaagaacatgcagaacgctgaggaatggttcaagagccgcttcacggtgctgaccgagagcgccgccaagaacaccgacgccgtgcgcgccgccaaggacgaggtgtcggagagccgtcgtctgctcaaggccaagaccctggaaatcgaagcatgccggggcatgaatgaagcgctggagaagcagctgcaggagctggaggacaagcagaacgccgacatcagcgctatgcaggtgcggcacggccagaaacacaggggggcggggaactcgagcaagggggggagttggtgcgcccagaaagcgaaaccaggggtggtgcggctgcccagctcttagggatagggcttggctccttggccactgtgtggaggggtggggctcttgaggggcgtgagtgcgggcgccactgtagtccgggagtgactgctccgcgtgctgcaccggcgttccgcattaaagctgcccgacccttgttgggtggggaggggaagacgtgggaattgggcgttgcctccgactgcagtgagatcagctctctactgacctgcgttgaccacgagttactttgcagcgactatcggatcgtctagttaataaatagtacgagtgaactaactctcaattaattctgaaggattactgtgaccagcatgctttatgactagttttaccaaccacctcccttcctttatttagtaggtagacaggaaaatagtcaacattgttttaggtagttaactagtgatgttcatagtaaaccatttccttttaccttttttttttctttttttctttatgtgtaaaatcttctacaacatttctgtttaaacatctccatcttctggggagtagaaaaaatacaattttaaaaagatctccattttaaaacatctccgtcttctggggagtagaaatttttttcttcttctggggagtagaaaaaataatttagatacataggaaatatttcatagaaaataatttttttcttttttttgtttacatctggtattttcttctcataaagaaaggcattagtttcctggcatgtaacccagctaaagaagagtaatcagtgaatgagagacacagtttttctatcaacttagtctgtttttctatcaacttagtctgtttgcatgcattttatgatgatcattaaacagtattaagtaaagaaacagaagaacagaattttcgtccatcttttttttcatctcaggcttcatgaacttgggtattttaggcatgaaggtttttcaaaagatacaggaagttattctaggagagattttatcaaagtgtgcaccttgattttaatcgaaactaggcctttgcaactacactacagtaaaataatagaagggatttatgctcggattttttttttgttttatttttgtcttcaaacaggacacgatcaacaaattagaaaatgaattgaggaccacaaagagtgaaatggcacgatacctaaaagaataccaagacctcctcaacgtgaagatggctttggatattgagattgctgcttacaggtgaaaatagaggggcaaagacagcagccattaaaccttaggaagaaaatcagatcccatttaaagttatgttggatcagaaaccttcaataatagtccttttgaaataatgaagtgttagtttttggcttcttccaagaagagggtatttagatatataagaatttaaccctgtaattagagtcctgtttttatcttgtcattacactttaaatctaataggagtgatttatttatattttttctggtctccatcaaaagatccccaggcattaagtattgataaatcccagccctgctcctgcttgcctttgtgtttagggtactcagagcaagttgtgaaacacaggtgttttttaacctcaccttgcacctgcatccccaggaaactcttggaaggcgaggagacccgactcagtttcaccagcgtgggaagcataaccagtggctactcccagagctcccaggtctttggccgatctgcctacggcggtttacagaccagctcctatctgatgtccacccgctccttcccgtcctactacaccagccatgtccaagaggagcagaccgaagtggaggaaaccattgaggcgtctaaggctgaggaagccaaggatgagcccccctctgaaggagaagccgaggaggaggagaaggacaaggaagaggccgaggaagaggaggcagctgaagaggaagaaggtatgataagaaaaaacccctgcaacttcaagtgtaaactgggtgtggagatttgttaggaggtggataagacaaatgaagccttgctcatttattcatatatgacattagaatcataaataaattttctgtttgtttagcaaaactttcctaaggcatctactctgaatgaggtgattggtcaaaattttcattttttaatataatcatttaacacagcaggttggtgtcctaaagaacaaaaatagataccagacacataatgaaagaaatattgaggttaagtcttggagaggagcagagcttcccatacctagaagtgatctcattcgatttaaatatgtgttcagtggcaaattattcatggcaagctttgtctgttacatgtgcttttggagagagtggagctgggaggttttggtagcattctgacagttgtgtttgcaaataaaacctttgcagacatgttttgactggacttaccctggatttgcattttgtacattttctttttatgttaaagctgccaaggaagagtctgaagaagcaaaagaagaagaagaaggaggtgaaggtgaagaaggagaggaaaccaaagaagctgaagaggaggagaagaaagttgaaggtgctggggaggaacaagcagctaagaagaaagattgaacccccatttccttaattatttcaggaataattctcccgaaatcaggtcaaccccatcaccaaccaaccaaccagttgagttccagattctatgtgaattaaaaagtcaatatatgtataattctgagatgacttaggttggacattcaatgttgtgctatgaatttcctctttatgcagagtatctgtttgcttgcagagtggctttcggcttgctgccagcctgtgcatggtccacgcttatgagttcaggatctacggcaatgtgaatcattcagatgtttacaataaaaaacaccacatgagtaaatgaattcactaatgttaatgttaaacttcatggaaaagtagtcctttgaaccttcggtggttagcaattaaagaccctgagttatgtgcaataaatagtaaataaagttataccgaatgatgtattttttgccgtggttgttacctaattaaaataccttaaagatggcaccaatataaagtgtgtgccagtgaactattgacctccaattttttaaaaagccgaaattttaacaattaccaatactttttt

SEQ ID NO: 2404 - DNA, 2875 bp, Homo Sapiens
gaattctccggagctgaaaaaggatcctgactgaaagctagaggcattgaggagcctgaagattctcaggttttaaagacgctagagtgccaaagaagactttgaagtgtgaaaacatttcctgtaattgaaaccaaaatgtcatttatagatccttaccagcacattatagtggagcaccagtattcccacaagtttacggtagtggtgttacgtgccaccaaagtgacaaagggggcctttggtgacatgcttgatactccagatccctatgtggaactttttatctctacaacccctgacagcaggaagagaacaagacatttcaataatgacataaaccctgtgtggaatgagacctttgaatttattttggatcctaatcaggaaaatgttttggagattacgttaatggatgccaattatgtcatggatgaaactctagggacagcaacatttactgtatcttctatgaaggtgggagaaaagaaagaagttccttttattttcaaccaagtcactgaaatggttctagaaatgtctcttgaagtttgctcatgcccagacctacgatttagtatggctctgtgtgatcaggagaagactttcagacaacagagaaaagaacacataagggagagcatgaagaaactcttgggtccaaagaatagtgaaggattgcattctgcacgtgatgtgcctgtggtagccatattgggttcaggtgggggtttccgagccatggtgggattctctggtgtgatgaaggcattatacgaatcaggaattctggattgtgctacctacgttgctggtctttctggctccacctggtatatgtcaaccttgtattctcaccctgattttccagagaaagggccagaggagattaatgaagaactaatgaaaaatgttagccacaatccccttttacttctcacaccacagaaagttaaaagatatgttgagtctttatggaagaagaaaagctctggacaacctgtcacctttactgacatctttgggatgttaataggagaaacactaattcataatagaatgaatactactctgagcagtttgaaggaaaaagttaatactgcacaatgccctttacctcttttcacctgtcttcatgtcaaacctgacgtttcagagctgatgtttgcagattgggttgaatttagtccatacgaaattggcatggctaaatatggtacttttatggctcccgacttatttggaagcaaattttttatgggaacagtcgttaagaagtatgaagaaaaccccttgcatttcttaatgggtgtctggggcagtgccttttccatattgttcaacagagttttgggcgtttctggttcacaaagcagaggctccacaatggaggaagaattagaaaatattaccacaaagcatattgtgagtaatgatagctcggacagtgatgatgaatcacacgaacccaaaggcactgaaaatgaagatgctggaagtgactatcaaagtgataatcaagcaagttggattcatcgtatgataatggccttggtgagtgattcagctttattcaataccagagaaggacgtgctgggaaggtacacaacttcatgctgggcttgaatctcaatacatcttatccactgtctcctttgagtgactttgccacacaggactcctttgatgatgatgaactggatgcagctgtagcagatcctgatgaatttgagcgaatatatgagcctctggatgtcaaaagtaaaaagattcatgtagtggacagtgggctcacatttaacctgccgtatcccttgatactgagacctcagagaggggttgatctcataatctcctttgacttttctgcaaggccaagtgactctagtcctccgttcaaggaacttctacttgcagaaaagtgggctaaaatgaacaagctcccctttccaaagattgatccttatgtgtttgatcgggaagggctgaaggagtgctatgtctttaaacccaagaatcctgatatggagaaagattgcccaaccatcatccactttgttctggccaacatcaacttcagaaagtacaaggctccaggtgttccaagggaaactgaggaagagaaagaaatcgctgactttgatatttttgatgacccagaatcaccattttcaaccttcaattttcaatatccaaatcaagcattcaaaagactacatgatcttatgcacttcaatactctgaacaacattgatgtgataaaagaagccatggttgaaagcattgaatatagaagacagaatccatctcgttgctctgtttcccttagtaatgttgaggcaagaagatttttcaacaaggagtttctaagtaaacccaaagcatagttcatgtactggaaatggcagcagtttctgatgctgaggcagtttgcaatcccatgacaactggatttaaaagtacagtacagatagtcgtactgatcatgagagactggctgatactcaaagttgcagttacttagctgcatgagaataatactattataagttaggtgacaaatgatgttgattatgtaaggatatacttagctacattttcagtcagtatgaacttcctgatacaaatgtagggatatatactgtatttttaaacatttctcaccaactttcttatgtgtgttctttttaaaaattttttttcttttaaaatatttaacagttcaatctcaataagacctcgcattatgtatgaatgttattcactgactagatttattcataccatgagacaacactatttttatttatatatgcatatatatacatacatgaaataaatacatcaatataaaaataaaaaaaaacggaattc

SEQ ID NO: 2405 - DNA, 649 bp, Homo Sapiens
atcggcacgaggcggaagcggtgacagtatcatcccaggccacacagaggccggcttggtcactatggaggagataggcatcttggtggagaaggctcaggatgagatcccagcactgtccgtgtcccggccccagaccggcctgtccttcctgggccctgagcctgaggacctggaggacctgtacagccgctacaagaagctgcagcaagagctggagttcctggaggtgcaggaggaatacatcaaagatgagcaaaagaacctgaaaaaggaatttctccatgcccaggaggaggtgaagcgaatccaaagcatcccgctggtcatcggacaatttctggaggctgtggatcagaatacagccatcgtgggctctaccacaggctccaactattatgtgcgcatcctgagcaccatcgatcgggagctgctcaagcccaacgcctcagtggccctccacaagcacagcaatgcactggtggacgtgctgccccccgaagccgacagcagcatcatgatgctcacctcagaccagaagccagatgtgatgtacgcggacatcggaggcatggacatccagaagcaggaggtgcgggaggccgtggagctcccgctcacgcatttcgagctctacaagcagatcggc

SEQ ID NO: 2406 - DNA, 590 bp, Homo Sapiens
gcggccgccacccccttccccgctgccagcactcaccctctctccgctcctgctcgcaacctcgcggttcctggggtgcttgtgcccactgtgtggacagcgcgggcggacttttgggccggggccgggcggcgggggaggctctctaaggcctccgcctctgcctctcccgcccccttacccgccccggagcgggaagcggcggaggctccgccatggcctcgggagccggaggagtcggagggggcggtggcggcaagatccggacgcggcgttgccaccaggggccaattaagccttaccagcaggggcgacaacagcatcagggcattcttagcagggttacagaatctgttaagaatattgtgccagggtggctacaaagatacttcaacaagaatgaagatgtatgcagctgttcaacagacacaagcgaggttccacgctggccagaaaataaagaggaccatctggtatatgccgatgaggagagctctaatattactgatgggagaatcacacctgagccagcagtcagtaatacagaagaaccttcaacaactagtactgcttcaaattattcagatgtg

SEQ ID NO: 2407 - DNA, 395 bp, Homo Sapiens
tttttttttttttttttaattaaagtgatttgaaacaatttggtaatgcagactgggacaatgtcactatacccactgaggtaactgagacatgagagctttccaacccaaggtcagaaatcactgaaacagcttatgaaaccctcactattttagtgttttaaattgagaatgctgtatttttctcttgggcaacagataaccttcatttttgacgtaaatgataatggtggcttcacatggcccaggcaaacttcaaaacaaaactgtaggaccacatttttctaacctgaaaataagtcatataaggtacaaataagtaaaattggaattaaattattctaggaaaaatatgtggttatcttgtatctagtcagtaatcagatttattctgt

SEQ ID NO: 2408 - DNA, 354 bp, Homo Sapiens
ttttttttttttttttttttttttttttttttttgggggcaacaggaaatgtttatttatatacaagtacatgggaaagcaatttccatttagtttttttaaaaaattggtacaaataaaaagtttttaatacattcatcctttgcacacaaaatacattcttttttttttactctcagtatgaattatttcttaataataaaaaacataggctacaatgaatggacagtcatatggtttggggatttgacaaacttttttcaagaagcaaagtccaattttaaaagacagacaatatataaaataacttacatatttaaaaggctacttcattgaatcctaaaagattgaatg

SEQ ID NO: 2409 - DNA, 426 bp, Homo Sapiens
gagggttagcccatgactctgagaggaactccgggctattcttttctgtttaagtgggtgaaagttcacctctccagggcatatggtaactgcatccctttgtgtgaattcccggaccttcaccaccagcatgtttgctgggggtgcagtgacaggggaaattttaagaaatgcatgaaatcttccaagaaggttgttgagtttttagacactaccttttatttcagaattttaaagtacacattttttttttctttccaatctccatgccctcactgccctctcacccatctcattcctcccccagtcccaaagggtaaaggaggcaacaaatgcacagaagagttgccatggtctgggccaccaggaaggggatcagcttgaagacttggattgacttctgaatatattgcttatcagtcaggg

SEQ ID NO: 2410 - DNA, 511 bp, Homo Sapiens
ggcacgaggcggacctcagaggttgtctgaaggccgaggccaagatggcggtgctgtcagctcctggcctgcgcggcttccggatccttggtctgcgctccagcgtgggcctggctgtgcaggcacgaggtgtccatcagagcgtggccaccgatggcccaagcagcacccagcctgccctgccaaaggccagagccgtggctcccaaacccagcagccggggcgagtatgtggtggccaagctggatgacctcgtcaactgggcccgccggagttctctgtggcccatgaccttcggcctggcctgctgcgccgtggagatgatgcacatggcagcaccccgctacgacatggaccgctttggcgtggtcttccgcgccagcccgcgccagtccgacgtcatgatcgtggccggcacactcaccaacaagatggccccagcgcttcgcaaggtctacgaccagatgccggagccgcgctacgtggtctccatggggagctgcgccaacgg

SEQ ID NO: 2411 - DNA, 2427 bp, Homo Sapiens
gaatgtaaagagatccagggctcttggagagggacaagtgagagccagccaaaaaggaaaaagcaaaggcagaaacggcatcaggagagacagagatgtgaaggagggaaggagcaggagagcaggaaggaaacgcaggaggagggagcagcatctcctgtgaacacagaggagcacctgtttgctgttaaaatcgatctccctcggcaccctgagcaatggatataatatttggcaggaataggaaagaacagctggagcctgtgagggccaaagtgacaggcaagattccagcatggctgcagggaaccctgctccgcaatgggcctgggatgcacacagttggggagtccagatacaaccattggttcgacggccttgccctgctccacagcttcaccatcagagacggtgaagtctattacaggagcaaatacctgagaagcgatacctacaacaccaatattgaggcaaacaggattgtggtgtctgagtttggaacaatggcctatccggacccctgcaaaaacatattttccaaagctttctcctacttgtctcacaccatccccgatttcacagacaactgcctgatcaacatcatgaagtgcggagaagacttctacgcgacctcagagaccaattacatcaggaaaatcaacccacagactctggaaaccctggagaaggttgattatcgtaaatacgtggcggtaaatctggcaacgtcacatccccattatgatgaggctggaaatgttctaaacatgggcacatccattgtggaaaaggggaagacaaagtatgtgatttttaagatccctgccacagtaccagagggcaagaagcaggggaagagcccctggaagcacacagaggtgttctgctccatcccatcccgctccctgctctccccaagctactaccacagctttggagtcaccgagaactatgtcatcttccttgagcagcctttcaggttggatattctcaagatggcaaccgcatacatccggagaatgagctgggcctcctgcctggctttccacagggaggagaagacttatatccacatcatcgaccaaaggaccaggcagcctgtgcagaccaagttttacacaggcgccatggtggtcttccatcacgtcaacgcctacgaagaggacggctgcatcgtgtttgacgtcattgcctacgaggacaacagcctctaccagctcttctacctggccaacctgaaccaggacttcaaggagaactccaggctcacctcggtccccaccctcaggaggtttgccgtgcccctccacgtggacaagaatgcagaagtgggcacaaatttaatcaaagtggcatctacaacagccacggccctgaaggaagaagatggccaagtctactgccagccggaatttctttatgaaggcttagagcttccacgggtcaattatgctcacaatggaaagcaataccgatatgtctttgctacaggagttcagtggagtccaatcccaaccaagataataaaatatgacattctcacaaagtcatccttaaaatggagagaggacgactgctggccagcggaacccctgtttgtgcccgcgccaggtgccaaggatgaggatgacggagtaatcttatcagccattgtctctactgatccccaaaagctgccttttctgctcattctggatgccaaaagctttacggaattggcccgtgcctctgttgatgtcgatatgcacatggatctccatggattattcattacagacatggactgggacacaaaaaagcaggccgcttctgaggaacagcgggacagggcttccgactgccacggggctcctctgacctgatggtgttggggtttgggtaggggaggggagctcggctgtcagaactccatggatatgtttctttggatggaggggagggcctttgttaccttttgcacttattctttctgtgggtgctttgacaagggcatggcaagagagcttgtcagtatcatttctttcattttattttggctgtaaaaattttgtttgaaagtcaaacatttgaacatcaaatatgtattgattagatccagtccttctaagaaacctcctttcctttaacaaaaagaccttgaccatgaatcagagattgtattcaatgacattatcatcatttttagaacgagccactaacctattagagaagaggcagataattatttatcattgtgccttcctctgtctctttctctttcctttgctccctcccatgtttctggtggactaaattgtgtatctgggagttctcactttctagccaggcctgatgagttaagttacatgaccaggaaggttatgccactttgtggtcattccatgcaagtcatggcgtaatataaaataataaaaactttaaagtctg

SEQ ID NO: 2412 - DNA, 2313 bp, Homo Sapiens
gccttcttcctgtgtggaaatacagcgcctccggcttgaacctgccactcaggtgtcttgatgtgtcgggggtgtggctgcctgccccctgatgctccctgccccaccctgtgcagtaggaacccagccatggtgaacgaagccagaggaaacagcagcctcaacccctgcttggagggcagtgccagcagtggcagtgagagctccaaagatagttcgagatgttccaccccgggcctggaccccgagcggcatgagagactccgggagaagatgaggcggcgattggaatctggtgacaagtggttctccctggaattcttccctcctcgaactgctgagggagctgtcaatctcatctcaaggtttgaccggatggcagcaggtggccccctctacatagacgtgacctggcacccagcaggtgaccctggctcagacaaggagacctcctccatgatgatcgccagcaccgccgtgaactactgtggcctggagaccatcctgcacatgacctgctgccgtcagcgcctggaggagatcacgggccatctgcacaaagctaagcagctgggcctgaagaacatcatggcgctgcggggagacccaataggtgaccagtgggaagaggaggagggaggcttcaactacgcagtggacctggtgaagcacatccgaagtgagtttggtgactactttgacatctgtgtggcaggttaccccaaaggccaccccgaagcagggagctttgaggctgacctgaagcacttgaaggagaaggtgtctgcgggagccgatttcatcatcacgcagcttttctttgaggctgacacattcttccgctttgtgaaggcatgcaccgacatgggcatcacttgccccatcgtccccgggatctttcccatccagggctaccactcccttcggcagcttgtgaagctgtccaagctggaggtgccacaggagatcaaggacgtgattgagccaatcaaagacaacgatgctgccatccgcaactatggcatcgagctggccgtgagcctgtgccaggagcttctggccagtggcttggtgccaggcctccacttctacaccctcaaccgcgagatggctaccacagaggtgctgaagcgcctggggatgtggactgaggaccccaggcgtcccctaccctgggctctcagtgcccaccccaagcgccgagaggaagatgtacgtcccatcttctgggcctccagaccaaagagttacatctaccgtacccaggagtgggacgagttccctaacggccgctggggcaattcctcttcccctgcctttggggagctgaaggactactacctcttctacctgaagagcaagtcccccaaggaggagctgctgaagatgtggggggaggagctgaccagtgaagcaagtgtctttgaagtctttgttctttacctctcgggagaaccaaaccggaatggtcacaaagtgacttgcctgccctggaacgatgagcccctggcggctgagaccagcctgctgaaggaggagctgctgcgggtgaaccgccagggcatcctcaccatcaactcacagcccaacatcaacgggaagccgtcctccgaccccatcgtgggctggggccccagcgggggctatgtcttccagaaggcctacttagagtttttcacttcccgcgagacagcggaagcacttctgcaagtgctgaagaagtacgagctccgggttaattaccaccttgtcaatgtgaagggtgaaaacatcaccaatgcccctgaactgcagccgaatgctgtcacttggggcatcttccctgggcgagagatcatccagcccaccgtagtggatcccgtcagcttcatgttctggaaggacgaggcctttgccctgtggattgagcggtggggaaagctgtatgaggaggagtccccgtcccgcaccatcatccagtacatccacgacaactacttcctggtcaacctggtggacaatgacttcccactggacaactgcctctggcaggtggtggaagacacattggagcttctcaacaggcccacccagaatgcgagagaaacggaggctccatgaccctgcgtcctgacgccctgcgttggagccactcctgtcccgccttcctcctccacagtgctgcttctcttgggaactccactctccttcgtgtctctcccaccccggcctccactcccccacctgacaatggcagctagactggagtgaggcttccaggctcttcctggacctgagtcggccccacatgggaacctagtactctctgctcta

SEQ ID NO: 2413 - DNA, 378 bp, Homo Sapiens
ttttttgacgccagcgggtaaaagcagggccccagaggcatttattgaaaacacagcatccaaaacacgacatctaggccaggcgcgatggttacagtgatgagagggtcactagacaattatccacaattctacgacatgagacagagactcagcaacagtcacagacagaagggtcatgtgttccttcctgggcagggctgaatgtggcaggtgcggcgtggaggctgcgtcctggcggtttgctcccaggcaaggggtacggggggccggcttggcctgggtggggacctcaagtctgagggtgaggatggctgaatctacctcgcttatgtctcagggacggtcacccatacctaggatgaccccagccagacc

SEQ ID NO: 2414 - DNA, 464 bp, Homo Sapiens
tttttttttttttttctcatacataaatgtcacctgatccatgtggcagcatgcctcatcctaatgttaacaatttccattggtaaagttgtcatacttgcctacagagaggctcctcttcatagaaattacaccaggctgatctttagcaggtgcttcagtaaagggactgacagttttaaaagaattaagacagccaaaaaaccactctatctgccaccagagatcaacgggattcacatgctactattttacctagtcacttaaatttaagctggaacaaggaaagaatcaagcatcaggtcaatgtcctaagaaacatgacccccgggagaagaaaggtgccagaacgttttactcgagaggaaatgcttagtcatattcatcctggggattcttaagagagaaccaacacctggaggaggcaaagagaacacgagagagctggaaggggggagggggga

SEQ ID NO: 2415 - DNA, 297 bp, Homo Sapiens
tttttttagagtatctaatatattttattgcaatagattatacaaccccaagtttataaatattaaaatagttccaaagagttagaggaaagtccaggacaaaacaacaaaaattcctttttgtttgggtacaatactctggtaactttttccttttgcacagaaaaggatgtctgagatggaagccatgctgactttcacagaacatgcctgatttttgttgacgggcaacctcaggccttcctgtcagggggttggtctcccaggttcctgtgaatccagtttttgatgtagaca

SEQ ID NO: 2416 - DNA, 2855 bp, Homo Sapiens
gagtggcagttatatagaccggcggcggagcacgcgtgtgtgcggacgcagttgcgtgaggggtttgtactatcctcggtgctgtggtgcagagctagttcctctccagctcagccgcgtaggtttggacatatttgactcttttccccccaggttgaattgaccaaagcaatggtgatggagaagcctagtcccctgctggtcgggcgggaatttgtgagacagtattacacactgctgaaccaggccccagacatgctgcatagattttatggaaagaactcttcttatgtccatgggggattggattcaaatggaaagccagcagatgcagtctacggacagaaagaaatccacaggaaagtgatgtcacaaaacttcaccaactgccacaccaagattcgccatgttgatgctcatgccacgctaaatgatggtgtggtagtccaggtgatggggcttctctctaacaacaaccaggctttgaggagattcatgcaaacgtttgtccttgctcctgaggggtctgttgcaaataaattctatgttcacaatgatatcttcagataccaagatgaggtctttggtgggtttgtcactgagcctcaggaggagtctgaagaagaagtagaggaacctgaagaaagacagcaaacacctgaggtggtacctgatgattctggaactttctatgatcaggcagttgtcagtaatgacatggaagaacatttagaggagcctgttgctgaaccagagcctgatcctgaaccagaaccagaacaagaacctgtatctgaaatccaagaggaaaagcctgagccagtattagaagaaactgcccctgaggatgctcagaagagttcttctccagcacctgcagacatagctcagacagtacaggaagacttgaggacattttcttgggcatctgtgaccagtaagaatcttccacccagtggagctgttccagttactgggataccacctcatgttgttaaagtaccagcttcacagccccgtccagagtctaagcctgaatctcagattccaccacaaagacctcagcgggatcaaagagtgcgagaacaacgaataaatattcctccccaaaggggacccagaccaatccgtgaggctggtgagcaaggtgacattgaaccccgaagaatggtgagacaccctgacagtcaccaactcttcattggcaacctgcctcatgaagtggacaaatcagagcttaaagatttctttcaaagttatggaaacgtggtggagttgcgcattaacagtggtgggaaattacccaattttggttttgttgtgtttgatgattctgagcctgttcagaaagtccttagcaacaggcccatcatgttcagaggtgaggtccgtctgaatgtcgaagagaagaagactcgagctgccagggaaggcgaccgacgagataatcgccttcggggacctggaggccctcgaggtgggctgggtggtggaatgagaggccctccccgtggaggcatggtgcagaaaccaggatttggagtgggaagggggcttgcgccacggcagtgaatcttcatggatcttcatgcagccatacaaaccctggttccaacagaatggtgaattttcgacagcctttggtatcttggagtatgaccccagtctgttataaactgcttaagtttgtataattttactttttttgtgtgttaatggtgtgtgctccctctccctctcttccctttcctgacctttagtctttcacttccaattttgtggaatgatattttaggaataacggacttttaaagaagcaaaaaaaaagactgaatttccttgcttactttgcatatacagactggattttttttttttttttacagccatttccccaaaggaatgtcttgcatattactgacatttggtatgtttcattcattggaatatttcttattttctacgtgtttgaaaagcctgtaagaaatacaggatttgataatattttgaaggcaggaaaaacccaaattgtttcttctttgagagtcatgactaccttctggtgtggagaaattgccattggaaaatttgacaattttgattctcactggtatgtttaaaaactgaataaaaggaatagaatttttttttgataaaggatcacaaaacaattctaaaacctaactgtttttaccattgaaatttaaattgtgataataggttttaaatgtctagaatgcaactgataggcttttcttgaactgttagtttttttgaagtagttttttcatgtttaatttgtatttgtaaaaaaacaaaaagcaaaaaaattcccaaaacccagataacaaccagagcaaaactgttgtgccttctatttatctttgatttcagtcttggcaattgtttaaaaaaaaaatctagatttgttttattaggttcagagtatgtggggaattatagaatccctctttcatcactttgtgtatgtcttttgttaacatatttgttatgccttattctaaaattgagtctcaaactggaatgcctttgaagacagatgcttctatagaggttctttgacctaaatagttcagcatttgtatttttattctggtatctaatcagattcctaatcatagcccgtaagaaggaatgttactttaatattggactttgctcatgtgctcgtgtccgcatttttttttttcttaaaatcatagccatatggtaaattttctattttgttatggttctcttttattgatgggcatgcagtgggtgttacttggaaatggccaatttttattaaaatatttctggaagaaaatttaaaaaaaaaaaaaaaaaaaaaa

SEQ ID NO: 2417 - DNA, 2516 bp, Homo Sapiens
tgattctgaggcattgccgtcgcgcggtgcatagctaaagacgtcgcgcttgcgcaggcgctcggcgcagaggcctgcgggaagccaagatggcgcataggggttctccaggctgcagttggcgccttatcagtatctaagcggagtgttttggaaggagttaaggggctgtggcaaacgccctctccgccgtcatggcccggcatcggaatgttcgaggctataactacgatgaagattttgaagatgatgatctctacggccagtctgtagaggatgattattgtatttcgccgtcaacagctgctcagtttatttattcacggcgtgacaaaccttccgttgagcctgtggaagaatatgattatgaagatctgaaagaatcttccaattctgtttcaaaccatcagctcagtggatttgatcaagctcgtctttattcatgccttgatcacatgagagaggtacttggagatgctgtgccagatgaaatattaattgaagcagttctgaagaacaagtttgatgtgcagaaggctttgtcaggggttctggaacaagatagagtgcagagtttgaaggacaagaatgaggcaacagtatctacaggaaagatagcaaaaggaaaaccagtagattcccagacatcgcgaagtgaatctgaaattgtgccaaaagttgctaaaatgactgtatctggaaagaagcaaactatgggatttgaagtgcctggagtatcttctgaagaaaatggtcatagtttccacacacctcaaaaaggaccgcccattgaagatgccattgcttcttccgatgttcttgagactgcttctaaatctgctaatccaccccacacgattcaagcatcagaagagcagagttcaaccccagcaccggtgaaaaagtctggcaagctgaggcagcaaatagatgtgaaggcggaactggagaagcggcaaggagggaagcagctactcaacttagtggtcattggtcatgttgatgctgggaaaagtactctgatgggccatatgctttatcttctgggtaatataaacaaaagaactatgcataagtatgaacaggagtctaaaaaggctggcaaagcttcgtttgcatatgcatgggtcttggatgaaactggcgaagaaagggaaaggggagtaaccatggatgttggtatgacaaagtttgaaaccacaaccaaagttattacattaatggatgctccaggccataaggacttcattccaaatatgattacaggagcagcccaggcggatgtagctgttttagttgtagatgccagcaggggagagtttgaagctggatttgagactggaggacaaacacgagagcatggactcttggtccgttctctgggagtgacgcagcttgcagttgcagttaataaaatggatcaggttaattggcaacaagaaaggtttcaagagattactggaaaacttgggcactttcttaagcaagcaggttttaaggagagtgatgtaggttttattcctacaagtggtctcagtggtgaaaatctaatcacaagatctcagtcaagtgaactcacaaaatggtataaaggactatgtttattagaacaaattgattcctttaagcctccccagcgatctattgacaaaccttttagattatgtgtgtccgatgttttcaaagatcaaggatctggattttgcataactggtaaaatagaagctggttatatccaaactggtgaccgactactggcaatgcctcctaatgaaacttgtaccgtgaaaggaatcactctgcatgatgaacctgtcgactgggcggcagcaggcgatcatgttagtcttactttggttgggatggatatcatcaaaatcaatgttggctgcatattttgtggccccaaagtacccattaaagcttgcactcgtttcagagcccgaatcctcatctttaatattgaaattcctatcactaaaggatttcctgtgctgttacactaccaaactgtcagtgaacccgccgttattaaacgattgattagtgtcttaaacaaaagcacgggtgaagtcacaaagaaaaagcctaagtttttgactaaaggccagaatgcattggtagagctacagacacaaagaccaatagctcttgagctatataaagactttaaagagctggggaggttcatgctacgttacggtggttctacaatagctgctggtgttgtcactgagataaaagaatgatgggtcagaatttctaccacgtttctggatacagtgaaatagctaacctctgtttcaagaatgcagttattaagtcaaaggaacaatgtgcaattgatatgtttttagatgagagagaaaaattaaagctaaaattagctgcaaagaagtattaataatcacctctgcaaaaattctaagttgccaactggcaaagaaagtctaatgttaaaaacaactttgcctttgaaacgttaataaatggatttactttgctaagaaaaaaaa

SEQ ID NO: 2418 - DNA, 2988 bp, Homo Sapiens
tgagtaaatcgatacatcatacgcgcgctcctctggccgcccctccctccgacgatcggggaccctggcgggcggcaggaggacatggccagcgacgccgtgcagagtgagcctcgcagctggtccctgctagagcagctgggcctggccggggcagacctggcggcccccggggtacagcagcagctggagctggagcgggagcggctgcggcgggaaatccgcaaggagctgaagctgaaggagggtgctgagaacctgcggcgggccaccactgacctgggccgcagcctgggccccgtagagctgctgctgcggggctcctcgcgccgcctcgacctgctgcaccagcagctgcaggagctgcacgcccacgtggtgcttcccgacccggcggccacccacgatggcccccagtcccctggtgcgggtggccccacctgctcggccaccaacctgagccgcgtggcgggcctggagaagcagttggccattgagctgaaggtgaagcagggggcggagaacatgatccagacctacagcaatggcagcaccaaggaccggaagctgctgctgacagcccagcagatgttgcaggacagtaagaccaagattgacatcatccgcatgcaactccgccgggcgctgcaggccgaccagctggagaaccaggcagccccggatgacacccaagggagtcctgacctgggggctgtggagctgcgcatcgaagagctgcggcaccacttccgagtggagcacgcggtggccgagggtgccaagaacgtactgcgcctgctcagcgctgccaaggccccggaccgcaaggcagtcagcgaggcccaggagaaattgacagaatccaaccagaagctggggctgctgcgggaggctctggagcggagacttggggagctgcccgccgaccaccccaaggggcggctgctgcgagaagagctcgctgcggcctcctccgctgccttcagcacccgcctggccgggccctttcccgccacgcactacagcaccctgtgcaagcccgcgccgctcacagggaccctggaggtacgagtggtgggctgcagagacctcccagagaccatcccgtggaaccctaccccctcaatggggggacctgggaccccagacagccgcccccccttcctgagccgcccagcccggggcctttacagccgaagcggaagcctcagtggccggagcagcctcaaagcagaagccgagaacaccagtgaagtcagcactgtgcttaagctggataacacagtggtggggcagacgtcttggaagccatgtggccccaatgcctgggaccagagcttcactctggagctggaaagggcacgggaactggagttggctgtgttctggcgggaccagcggggcctgtgtgccctcaaattcctgaagttggaggatttcttggacaatgagaggcatgaggtgcagctggacatggaaccccagggctgcctggtggctgaggtcaccttccgcaaccctgtcattgagaggattcctcggctccgacggcagaagaaaattttctccaagcagcaagggaaggcgttccagcgtgctaggcagatgaacatcgatgtcgccacgtgggtgcggctgctccggaggctcatccccaatgccacgggcacaggcacctttagccctggggcttctccaggatccgaggcccggaccacgggtgacatatcggtggagaagctgaacctcggcactgactcggacagctcacctcagaagagctcgcgggatcctccttccagcccatcgagcctgagctcccccatccaggaatccactgctcccgagctgccttcggagacccaggagaccccaggccccgccctgtgcagccctctgaggaagtcacctctgaccctcgaagatttcaagttcctggcggtgctgggccggggtcattttgggaaggtgctcctctccgaattccggcccagtggggagctgttcgccatcaaggctctgaagaaaggggacattgtggcccgagacgaggtggagagcctgatgtgtgagaagcggatattggcggcagtgaccagtgcgggacaccccttcctggtgaacctcttcggctgtttccagacaccggagcacgtgtgcttcgtgatggagtactcggccggtggggacctgatgctgcacatccacagcgacgtgttctctgagccccgtgccatcttttattccgcctgcgtggtgctgggcctacagtttcttcacgaacacaagatcgtctacagggacctgaagttggacaatttgctcctggacaccgagggctacgtcaagatcgcagactttggcctctgcaaggaggggatgggctatggggaccggaccagcacattctgtgggaccccggagttcctggcccctgaggtgctgacggacacgtcgtacacgcgagctgtggactggtggggactgggtgtgctgctctacgagatgctggttggcgagtccccattcccaggggatgatgaggaggaggtcttcgacagcatcgtcaacgacgaggttcgctacccccgcttcctgtcggccgaagccatcggcatcatgagaaggctgcttcggaggaacccagagcggaggctgggatctagcgagagagatgcagaagatgtgaagaaacagcccttcttcaggactctgggctgggaagccctgttggcccggcgcctgccaccgccctttgtgcccacgctgtccggccgcaccgacgtcagcaacttcgacgaggagttcaccggggaggcccccacactgagcccgccccgcgacgcgcggcccctcacagccgcggagcaggcagccttcctggacttcgacttcgtggccgggggctgctagccccctcccctgcccctgcccctgcccctgcccgagagctcttagtttttaaaaaggcctttgggatttgccgga

SEQ ID NO: 2419 - DNA, 1446 bp, Homo Sapiens
ggcacgaggtgaaagttttagacaaagcaactgtacctattattaaattaacagattcttttactgaagtgaaagttgatatcagctttaatgtacagaatggcgtgagagcagctgacctcatcaaagattttaccaagaaatatcctgtattgccatacttggttttagtattgaaacaattcctattgcagagggaccttaatgaagtatttacaggtggaattggttcttatagtctctttttaatggcagtcagtttccttcagttacatcccagggaagatgcttgcatccccaatacaaactatggtgttctcttaatagaattttttgaattatatggacgacacttcaattatttaaagactggcatccggataaaggatggtggttcatatgtggccaaagatgaagtacagaaaaatatgctagatggctacaggccatcaatgctttatatcgaagatcctttacaaccaggtaacgatgttggaaggagttcatatggggccatgcaagtgaagcaggcctttgattatgcctacgttgttttgagtcatgctgtatcaccaatagcaaagtactatcccaacaatgaaacagaaagcatactaggtagaataattagagtaacagatgaagttgccacatatagagattggatatcaaagcagtggggcttgaagaatagacctgagccttcatgcaatggaaatggtgttaccttgatagtagatactcagcagttagataaatgtaataataatctatctgaagaaaatgaagcccttggaaaatgtagaagtaaaacctcggaatctcttagtaaacactcttcaaactcttcatcaggtccagtgtcgtcctcttctgccacacagtccagctctagtgatgtagattccgatgcaacaccatgcaaaaccccgaaacagctgctttgccgtccgtccactgggaaccgagtagggtcgcaagatgtatccttggagtcctctcaggcagttgggaaaatgcaaagcacccaaaccactaacacatccaacagcaccaacaaatctcagcatggatcagcaaggctctttcgttcttccagcaaaggcttccaaggtacaactcaaacaagccatggttcctagatgacaaacaaacaacatcaaggcaaatccaataatcagtattaccatggcaaaaagaggaaacacaagagggacgcgcccctctcagacctctgtagatagtcagcgctgcgcggtggactgtcttctctgtgcaatgatctcatgctcaggacagttgcgcagggactcctgggagatattcaggagcctcacactgttcagacgttgacttagcaactgcgttttttcccagctcgccacagaatggatcatgaagactgacaactgcaaaaaaaacaaaacaaaaaaaaaaaaaaaaaaa

SEQ ID NO: 2420 - DNA, 463 bp, Homo Sapiens
gaaaaagcaaattttaagaattttaatgtaataaaaacaatatatagtacatcacagtttattgttgcatatatcacttatttacccttaggacatgaaaggcaaacactgtaattacagaacatagatctatcaggtagagtaaatatggctagctgctatgacaaacaactttgaaatcccagtagcttaacacagtattttccaacatcctagtccaacaagggttggaggtcagaggcacctttgcacaggttcattcagggctgaatcaggcttctttccagcatctctaggccctggggctgtaaaatcctccactcaatcttttgggttggctagcagatgagggaagtgagtatggaagttcccatgagaggtttcagtggcctggccttaatgtgtcacacatcactttctcccacattggtgagctaagactcagtcacatggccctgcctga

SEQ ID NO: 2421 - DNA, 366 bp, Homo Sapiens
tttggaagcacttgaactttttattttattaaaaccttgttataagcagcacccttggcggttttttgttttggcttatgttttgaagggatgtgaggagggtgagaccctcagctgtgctgatgagagggggaggaggcaacacaggccttcagccctgaaagctgtcgggagagggatttgggagcgtgatggactaggggactgaggctggagccccatccccactcaggctgtgcttgtaaaaatgccttgagacccatactctcctaggagtgggtcctcccattttccaggcgaggtcaacatcgtttagcaagcagagtgacttgccaaggccacgtggggacttgagggcccttctcc

SEQ ID NO: 2422 - DNA, 430 bp, Homo Sapiens
tttccaagtacaagatgttaccactgacaaaagggtctcatatgaatgatggaggtttctgttaccgtatgcccataaaggggcctgaaaccaaatatgatttgaatagaaaagaccttgggaaacataagtagcactttggggctaagctgcgaaggcactcgtattgtacaagtaatttcgaagagagcctaaatttgctacccccctgcttctacagggtataccagatttttgctgtcttgggacactgagctcatggaagcctgtggaggaaactaaccggtaagctggggatctaggtagtcatccaagagtctggagggagaagaaatttgttacttccacagctggggtcctgtagaaccatactaatgtacaaatggatgctgaaaaatacctgcatagtttcaaaacaaaactccctctc

SEQ ID NO: 2423 - DNA, 455 bp, Homo Sapiens
gttttgttttgttttgttttgttttttgagtgttacagcctggactggccagcaagacagaaatttcttcttcctaaaaatgtgtaatgtcaaataaccattatcaaccctatctatgttaatgttcgcacactcatgaatggggaaatgtagggctcatggtaataaatcaataatgacaacaatgaacatttaagtccttattatgtgtcaaatagtttacattaattaactcggttctcacaacaacctaagaagtaataacggttagccactaaatatgataatgtagaagaaaataatggaaagtaaataaataatgtgaaatctataagatacacatccatgatctcacatccccaaaagtagctgtacctttttcagtttttttccttttacttccctggaatttgtaaatatcttttcagctctaaacagctaatacaataaacact

SEQ ID NO: 2424 - DNA, 831 bp, Homo Sapiens
gcaaccacgggctcccaggcagcctccgccagccggaccccgtcgccctcctgatgctgctcgtggacgctgatcagccggagcccatgcgcagcggggcgcgcgagctcgcgctcttcctgacccccgagcctggggccgaggcgaaggaggtggaggagaccatcgagggcatgctcctcaggctggaagagttttgcagcctggctgacctgatcaggagtgatacttcacagatcctggaggaaaacatcccagtccttaaggccaaactgacagaaatgcgtggcatctatgccaaagtggaccggctagaggccttcgtcaagatggttggacaccacgtcgccttcctggaagcagacgtgcttcaggctgagcgggaccatggggccttccctcaggccctgcggaggtggctgggatccgcagggctcccctccttcaggaacgtggagtgcagtggcacaatcccagctcgctgcaacctccgcctcccgggttcaagtgattctcctgcctccgcctcccaagtagctgggattacagaagtcacctgcaccggtgcccgtgacgtacgagctgcccacactgtataggacggaggactattttcctgtggacgccggggaagcacagcaccacccccgcacctgccctcggcctttgtgagctttgtggtcttcccatcaggaacgctggaaagtgacattgtgtacacactgcagcttgggggtttttttctttgtattgctgtttattttatattttaaaaatatttaaaaaaaaaaaaaaaaaaaaaaaaaaaaaaaaaaaaaaaaaaaaaaaaaa

SEQ ID NO: 2425 - DNA, 566 bp, Homo Sapiens
tttttttttttttttttcttttttttggatggtcagtgcattttattgaatcagcacagtacaaaaataaataaaaataagggaaggggaattaaattacagccaaactgagcttcatgactttgtcagattataaaccacacatactcacaaacacactacacatacatacaaaatgagacaaatataaattaatattaacaatacccacagtttggtcaaagaatagctacagaagaaattgcactaaaaaaccaacatacatcacacgtgtgtaattagcagtttcaaatatacagctatgaataattctgagtgaaaaaaatggcacattttcttttcattgcaagtttaactgttggaacaaaactaagttctaataactgcatggaaagaatatatcaaccctccaggtttacaagaaaaagagaaaaaccaaatcctgaactattattcctgtggcttgttctgtgcatgggtgtaattttcacagccatctgttctaagattatttttcttaagacacaaaatgctcctggtttgcatgcacaatatcaccgtaaaag

SEQ ID NO: 2426 - DNA, 1477 bp, Homo Sapiens
gggggaatttacagggatcaaaataatctggtgattctttttagtgaggtttgatagtagatattgggaacatggtagctaagaggaagctttaaggcctaactgaagtggaagagatgacaggcaggacaagacagaatttttccgtgtcgaaggagtagcagaaccgtgtagggcaagagggagccaggtgttattaaaaaaaaaaaaaaaagtttttattacactggatagtgtaagaccagagtatgactaccaagaaacaaagtctagagtgtaaggaataatgacagctatctcagaggtttgttgtgaggagtaattgagataacaaaggcaaaatgcttagcattggtgctggtactactgctattaattttactattaatattgctgctggctattgctgcctgactggaaattggtgggaaaggagggcagacggcagacatttaggtagatcatttagtgaagtatttgggggaatgaaccactttctcaagcccagattggcttcaaggtcctcctgcttcttgccacaagcaccaggaactctattcttttctcttaaaagttgctgctacttagtagtagttacttttctttccaagactgggtgtggagctctgtaatctgctcatgtctcttgtagccatagaatatagcctacagttaggggataagaaaaatagtaaacataaggaggttaaaaatgtgtaagaaagacttctactttcccctatgctggtataatgggaactggatttattttatatgtagccagcttccaagatggcccccaatgatcccggcatcccgatatttacaccatggtgtaatccccatacacactatattgaggtttatctgtggaaccaatagaatgtaacagaagtgatggatcatttcttaggataggttatttataatacaaatgtggctccgcctccttcccctcactacccccaaccttggattactcactctgagaatagttagctgccatgttgtgaatggcccgatggggaggcccatgctgtgggaaactgaggcctcctgccaacagccaacaaggaactgaggcctctctagccaacagcatgtgaacgagccttcttggaagcagatgtctcagctttagtcaagcttccagtcctaaacatctgtcctgctgacatcttgactgcaacctcatgagagatcctgagccagaactacccatctaagctgttccctgattgccaaccctcagaaactgtgtgaaaaaaagaaatgcttgttttgtttgtttttaaattttttttagctttttttgagctgaagcaggagaatcacttgaagttgggaggcggaggttgcagtgagccgagatgacgccattgcactccaccctgggtgacagagctagacttcgtctcaaaataaataaataaaatgaagtaaaataataaataaacaaaaaaaaaaaaaaaaaaac

SEQ ID NO: 2427 - DNA, 79528 bp, Homo Sapiens
ctccaggagctcagctccctgaaaggaaaatgatgccaagccaggcgcagtggctcacacctttaatcttagcaatttgggaggctgaggcaggtggatcacttgaggtcagaagttcaagaccagcctggccaatatggtgaaaccccatctctactaaaaatacaaaacttaggccgggcacagtggctcacacctgtaatcccagcactttgggaggccgacgtgggcggatcacctgaggtcgggagttcaagaccagcctgaccaacatggtgaaaccccatctctactaaaaatacaaaaattagccaggcgtggtggtgcatgcctgtaatcccagctacttgggaggctgaggcaggagaatcgcttgaacctgggaggcagaggttgcagtgagccgcgatcgagattgcgccattgcactccagcctggatgacagatccagactctatctcaaaaaaaaaaaaaaaaaaaaaaaaagaagaggaaagaaagaaaaaggaaatgacgccagagtgggcaggtccaacaggactttcagcccaaaccacacatggcacctgtgtccctcaccaatgcctggcctctggcactgagcttgggtcacctgtccacatctacttcccatggagtgagttatttcctttgaggcatgagtgtcctctctgccagctggacaggactgtcctgatgggtcagatagcagctaatcctatcaggagagaggaactggggcccaatctcatttctcttggcggtccccagactagccacaaatttgcccacctcctgccaggttaagagaaaggcagttttgagagttgattaagagcatggagtttcctgtaatcccagaactttgggaggccaagctgggaggaccacttgaggccaggagttcaagaccagcctgggcaatatagtgaggccccatctctacagaaattttaaaaattagctgaacgtggtgatgcgcacctgtggtcccagctacttgggaggctgaagcaggaggatcacttgagcccaggagttcaaggttgcagtgagccatgatttgtgtttcagccttagtgacagagtgacaccctgtgtcacaaacaaataaacaacaacaacaacaaaaggccaggcttggtggttcacacttgtaatctcagcactttgggagatagaggcgggtggatcacctgaggtgaggagttcggaaccagcctggccaatatggtgaaaccccgtctctactaaaaatacaaaaattagctgggcgtggtggtgggtgcctgtaatcccagctacttgggaggctgagacaggaggatcacttgaacgtgggaagtggaggttgcagtgggctgagactgcaccattgtactccagcctgggcaacaagagcgaaactccgtctccaaaaaaaaaaaaacaaaacaaaaaaaagagcatggaattggactgctttaggtaagttccttccccacctgtcaaatgaagtgataacaacagcaaaagaccgaatgttaatacctacggatagatcacttagcacagtgtgggcagatagtaactgctcaataaatgggaactactgttacatacctgtatgtagttctctaatatccctattttataaaaatgaggtccccccatatttttcttagcttccttttgtcaattaatatatcatagacatttttccaggtctgcacatgtagcctcctctatgtgagagccgcatggccttccaaaggacgccgtccatgcaagaggctaaactatgtctgtgggttcaaaaccctcagtctgtgccatggtgctttaaaacttggaaatggctcatacctgtaatcccaacactttgggaggccaaggtgggaggatcgcttgagcccaagagtttgagacaaacctgggcaacatgtgaaacactgtctctacagaaaataccaaaattagtatttttggtgtggtggcatgtgcctgtagtcccagctatttgggaggctgaggtaagaggatcgattgagccctggagttcaaagctgcaatagccataattgcactccagcctgggctacagagaagacctgtcttaagaaacacaaacaggctgggcgcggtggctcacgcctgtaatcccagcactttgggaggcccaggcgaggggatcacgaggtcagtagatcgagaccatcttgcactccagcctgggagacagcgagactccatctcagaaaaaaaaaaaaaaagaaaaagaaacacaaacaaaaacaaacttggaaattagttaaggtttagttcagttagatcagttaaagtttaactgttaaactgtcacctgcatttttatttctttgtctggaaatgtgtgtttgtctttctgttcatttgacttctaacccacatgggatgggttttcctaacttgggagaagcaggtgagaggtcagcctccacagggtgaggctgtcaaggaggaggggggaaccaggacagccagtggccagggcaggacaaaagaaggccggccatctttgttttgttttgttttgttttgttttgttttgttttgttttgttacgaggcagagtcttgctgtgcctcacccaggctggagtgcaataatgagatcacagctcattgcagcctccatctcccgggttcaagtgattctcctatctcagtttcccgagtagctggggctacaggcgtgcgtgtgccatcacacctggctaattttgtatttttaaaaattattttattttattttattttattttattttgaaacggagtctcgctctgtcacccagtctggagttcagtggcacgatctcggctcagtgcaagctccgcctcccgggttcatgccattctcctgcctcagcctcctgagtagctgggactataaccgcctgccacgacgcccagctaattgttttgtatttttagtagagacggggtttcaccttgttagccaggatggtctcgatctactgacctcgtgatccacccgtcttagcctcccaaagtgctgggattacaggcgtgagccaccgcgcccggcctattttgtatatttttagtagagatggggtttcaccatgtctgctgggctggtctcgaactcctgacctcaggtgatcgtctaccttggtctcccaaagtgctgggattacaggcgtgagccactgtgcccgcctttttttttttcttctttttgttgttgttggttttatttatttatttggacagagtctcactctgttgtctgggctggagtgcagtggtgcaatctcagctcactgtaacctctgcctcccaggttcaaacgattctcctgcctcagcttccagggtagctgggattacaggcgcccaccaccacacccagcttatttttgtgtttttggtagagacagggtttcaccatattgaccaagctggtctcaaactcctgatctcaagtgatctgcccacctcggcctcccaaagtgctgggattacaggcgtgagccaccgtgccgggccatgcgccatctttgtttctgttccagatgcctgggagtccttccatctcttccctcaccccccacagccaaccctttagcaaggacttttcctcaatatttctcatatctgcctcttccttccacccccacggccaccactttaattcagaacttggatcactgagatggcccctaatggtttcactgccttcttctgcccttccctagtccattgtccatatggcaacccggggcaggtgcagtttggaaaggaggtggcactacctggtaatgctgaagctgtgtatacttctagctccttcccctttgcaccagggcacttgcagtaggaaagtcacagcgacattgtctgcaaagcaagaaactggaaatgtccaggcacagcagctcacgcctataatcgcagcactctgggaggccaaggtgggtggatcacttgagcccaggagtttgagaccagcctgggcaacatagtgagacgcccatctctataaaaaaagaagaaagtggaaacaactcaaatctccatcaacaacagtggattcttttcctgttgctgctctaaccagttaccccaaactcagcggctgaaacacacacatttattatcttacagagctggaggtcaggagtccaaaatgattttactgaactaaaatcaacaagtcagcaggtatgcatttcttctgcaggctctaagggagaatctggtttttgcctttttttctggctttcagaagctgcctgctttcctgggttcatgggtccttccatcctaacgtcagcagtagtgggcaggcctttctcaggacactgtctctgattctgactcttctgcctccctctctcccatttaaggatccttggccgggcacggtggctcacgcctgtaatcccagcagtttgggaggctgaggcaggcagatcacctgaggtcaggagttcgagaccagcctgaccaacatggagaaaccccgtctcttctaaaaatataaaattagtcagacgtggtggcgcatgcctgtaatcccagctactcgggaggctgaggcaggggaatagcttgaacccaggagatggaggttgcagtgagctgaaattgtgccattgcactccagcctgggcaacaagagcaaaactccgtctcaaaaaaaaaaaaaaaattccttgtgattccactgggcccaccaggataatccaggatcatctcccatctccaggccgggtgattagcaacctttgttctcccttgccgttaaaggaacatttttgaaagtttcagagattaggatgtggtcatatttacaggccatttttctgcctccccacacagttacccacacagttacccatcgcataatagggctggggctgggggatgtgagcagaatccctccatacccaacatataaccacgcgaggcccccagctgagggcccggtgtgttgggcagagagctgaaggcaggggaacactgtccagtcgctgcacagcagtgtgaggaaaggaagaggagtcgtctgtaaaaacccattgactgtgctcatttcacactgcgtgcctctatcaaaacatctctagccaggcgcggtggctcatgcctgtaatcccagcattttgcaagggtgaggcaagcagaccacctgaggtcaggagttcgagaccagtctggccaacatggcaaaaccccgtctctactaaaaatcctaaaattagccagggcctggtggcgcgtgcctgtaatcccagctgctcaggaggctgaggcaggagaatcgcttgacccgggaggcagaggttgcagtgagccgagatcatgccactgccctctagcctgggcaacagagcaagactccatctcaaaaacaaaacaaaacaaaacaaaatctcatgtatcccatacatatatacatctattatatacccacaaaaattaaaattaaaaaaaagaaaaaaacaaaaaatccccattgactgtactctctgttatattcctggggccctcaaatgttgattacttttcagttttgagaatctaagtgacacctagcctggacaggaggaggggagagcccctgtttctggcaggtttctaagaggaatcacaggactgggctgagaggaggggacccagcacccaggctagagcagccacccctccatccctgagtgaggggccatctgctgccccccgcctctccctcgcccccacccccgcctctatctcaagccttgctcctttcccctcgggtgcctccacctgccgtttgccccgtcctcacagagtgtgaatcttgactcaaagtgtggacgtcaaagccccttggaagtgggaaaggcccaggcgggtgcagattgtttatttgcttgctgggtgctgggtgtgaaaggaacagacacgtgcttgcctcgtggggctcagtctctagtggggaagatgggcactgctgtcattgtaaagtgtgattttgtgaaaagtgctaagaaggaaaggacaggggctatgagagggggttgtggagtcctaattaggaaggaggagttgaactggtgagattgagggaaagcaaaaagcgaaagcaggtaagctctaagtgtgcctttcttcatgctccagaacacatgccctcctgcacaaataattcacaatcttcctgcaaccagccatcaccagacgctcagctgacagaaaattgcaaattagctcactgcaacctcggcactatcagtactgcgtaaagccctctccagcatacagcacgagcaccatcctgtcccgtccctagcaagcctctgtctccttgcagacagccccttctctgctgtgctgcctgttgcaaatttgcaacgcattttctttttctttttttctttctttttttgttttttgagacggagtctcgctctgtcgcccaggctggagtgcagtggcgcgatctcgcctcactgcaagctccgcctcccgggttcacgccattctcttgcctcagcctcccaagtagctgggactacaggtacgtgccaccactcccggctaatttttttgtatttttaatagagatggggtttcactgtgttagccaggatggtcttgatctcctgacctcgtgatccacctgcctcagcctcccaaagtgctgggattacaggcgtgagccaccgtacccggccttttctattttttttttttttttgagacaagttttcaccgtgtcacccaggctggagtgcaatggcgcaatcttgactcactgcaatctctgcctcccagactcaagggattctcctgcctcagcctcccaagtaaatgggactacaagcatgtgccaccacgcccggctaatttctgtatttttagtagagatggagtttgccatgttggccaggctggtgttgaactcctgacctcaggtgatctgtacgcctcagcctcccaaagtgctgggattacaggcgtgagccatcactcccggctgcaacatattttcataccttctctaataaatgtgcctttctttacctataactgtcttggtaaattcttcttactcctgggctactggcctcagatagttgccgctcacctgagacaggggtgacaagacggcttattcatagaaagcataatgaccaaattagaagaactgggatatccatcaccttaaacatttatcttttctttatgctgggagcatgcaaattattctcctgtagctatttttgaagtatacagtgggttatggttaactgcagtcaccctactgatctatggaacactatgtcttatttcttctagctaactgtatattgtacccattgatcagcttctcttcttcctcccctccttgctatccttcctggcctctggtaaccaccaatttactctccatctttgtgagatccacttttttttttttttttgagtcggggttttttagtagagacggggtttcaccatgtgagccaggatggtctccatctcctgaccgcgtgatccgcccatctcggcctcccaaagtgttgggattacaggcgtaagccaccacgcccagcctttttttttttttttttttgagacggaattttactcgttacccaggctggagtgcaatggcacgatctcagctcaccacaacctccgcctcccgggttcaagcaattctcctgcctcagcctcccaagtagctgggattacaggcatgcgccaccacgcccagctaattttgtatttttagtagagacggggtttctccatgttggtcagactggtctcgaactcccgacctcaggtgatcctcccgcctcggcctcccaaagtgttgggattagaggtgtgagccactgcgccaggccgagatcccccttttttttttttttttttttgagatgaagtctcgctctgttgcccaggctggagagtgcaatggcgcaatctgggctcaccgcaacctccacctcctgggttcaagtgattcttctgcctcagcctcctgagtaactggaattacaggcgcctggcaccacgcccggctaatttttgtatttttaggagagatggggtttcaccacggtgaccaggctggcaaagatccacttttttagtgttcatgtatgagtgaaaacatgcaatatttgtctttctctgcctggcttatttcagttaatatgatgaccttcagttccatctgtgttgttgcaaatgacaggatttccttcttattggtggctgaataatattccctttgtttatataccacattttcttcatccattcatccattgatgtgcgcttgggttgactccatattttggctattgtgaatggtgctgcaattaccatgggagtgcagatatctcttcaatatgctgatctccttccttttggatatataccgagtagtgggattcatctgaaccattttttttttagactagtcaagttcagtagtgagaagggagcaaaaagtagaacaaggggccaggcgtggtggctcatgcctgtaatcccagcactttgggaggctgaggtgggtggatcacttgaggtcaggagtttgagaccagcctggccaacatagtgaaaccccgttccactaaaaatacaaaaattagctgggcgtggtggtgggagcctctaatcccagctactcgggaggctgaggcatgagaattgcctgaacccaggaggcagaggttgcagtgaaccgagatcgcggcactgcactccagcctgggtgacagagtgagactccatctcaaaaaaaaaaaaaaaagttagccgggcgtggtggcgcacacctgtaaccccagctactcaggaggctgaggcaggagaaccgcttgaatccaggaggcggagattgcagcaaactgagatcacggcactgcactccagcctgggcaacagagtgagactccgtctcaaaaaacaacaacgaacaacaaaaaatacaattgcaaaccaccaccatttgacactgcctatatccacccccaaccctgctccagttgtttctttgcaattgccactttccagcatactatataatttacttttttttttttttttgagatggagttttgttcttgtcgcccaggctggagtgcaatggcgtggtctcagctcattgcaacctccgcctccctagttcaaacgattctcctgcctcattctcccaagtagctaggattacaggggccccccaccacgcccggctaatttttgtattttcagtaaagacagggtttcaccatgttggccaggctggtcgcaaactcctgacctcaggtgatccacccacttcggcctcccaaagtgccgggattacaggcgtgagccaccgcacctggcctaatttacttctttatgtagtctattgtgtatctatcttttccagggaacctcagctccacaagggcagggctctcttgtcactttggtttatggccatatcacagagcccatcccagtgcctggcacatattaaggaatgcattaggattccaaaaccagccaggagcggtggctcatgcctgtaatcccagcactttgggaggccgaggcgagtggatcacgaggataggagttcaagaccagtccggccaagatggtgaaaccccgtctctactaaaaatacaaaaaattagttgggcgtggttgtggacacctgtaatcctatctattcgggaggctgaggcagagaattgcttgaacccgggaggcagaggttgcagtgagccgagatcgcgccactgcactctggcctgggcgacagagcaagacgccatctcaaaaaaaaaaaaaaaaaaaaaaaaagattacaaagcccagaatgccacaagaccacaggtggtgcagtgaacagggcattgccttgagagtctatcatccctgggcaagtcattaaacataggggtgggggtgggagcctcctgtctgtaacgtggaggtgtcacgtgccaagggctcaggcacacgcgcgcgcacgcacaaacacacccattagtaaggacacgacccctggcattctaatgcgatttatacttttccatgaaggaattcatttccccctctcactaaccccagagacaggtagagccgacaggtggaagaactgaggcccgagagagacagcgggggaccctccccgcgccacggcacagcagctgtccgaccccctcctcacgcccggggggcgcgacggctgccgagggtcgcgggcagggggcgcggcgccggggactacatttcccaggagcagttgccgcggttccgccgttcctggggtttcaagagcctcgcgttaaagggggcgggggaggttgcgcagtccgccagctggaagatggctctgcgcccggtggggacccgagagccgcctgcctgggtgcccaggcggggtccggctgcagtgaagaagccccccagctctgcagtgtccctgaggggaggcgaggcgaggcgaggcgaggcgaggccaagccaattggaggccgtctttcctcgtcttgcccgcctcggcttcggcctctgcgcccaagccccagggaaccccctcccttcccctccaactccccggaacaggggaaggggcggtgaacctcgccgcctggcgggagaaggggtgtccactagctggaagcccctgcaacccgaggcaacccctttccccaattctggcttcagttccgggaatttacaggtcgctgggatgggcggggagaagggacaggagagatacaaaatgaaatgaacgcccaggtgtcagggagctgagccttacagtaccccgcccccaatccatccttctaagtcccgggcctccgcggtaaaataggggtgatggggatagtgatcaaaggcaggaggcgcaaaggatccagaaaccggtggggagcactgtgcaaactgtaaagcgctgtgcaaataaaattattgatcgtcgtgtcattggattcatccagtctttaagacatgcacggatctggggcgggggatggggtgacatggttctgggctctcagggtggaacatctcggatacggggagggggggctatttgggtgcgtattaacccaaccaggtcttaatgggaacccgagttgtctttgaaaataaccaaaacaaagccaccagaatgttgtgttttcaaatgacgaaacttaagagaaattgacaccatcaaaagacgaaccttgaccttttgaactaacctgaccccccattgcttcccttccccgcctgtgccacggagataagcccagagagaaggcatctgacaccgagtcttgcgctccccctcccccttcctcccctaatcatttggattaatccatcccttggcgtgcgggggaaacccattaatttgtcctggcttcagagactcccaggtccagtaggagccctcccacacccacgcagctacgatcccgtccccaacatcaaaaccctcgaacccctcccctttacccctccccagtagcccactgtgtctgcaaacagctcttggaccataccgggatgcgttcatcattttgaccagcaacaaactcccactcccagggtattgtttaagtgaacagtgaccggcctctatgcttagggaataaaagcggggttgtgggagaggggcccagggagcaaacgtcgcagaatctcagcccagggccgctgccaagcggacccggcacgtgagtaggaggtcggccgcagacaaggggtcctagggtctctgaggtctctcctgctggcctctgggcccctaaagcccctcgagcttcagaactccctacagacagtggcgccccgtgtccgcctcgtctacacctgccaagcagcacgggaaaatctgtgtgcattttaacaaagacatcgcatcttcccagcaaaatggcggtggtcgcggccacggctctctaaacaactccacactttccgaggacaggtcacaacccaagggacataaccccctcctcgacctctaccctagcgccccgctttcccaagtccccaaagcactcagggcctctcctcattacaggggccccccggaccgtccctggttagagcttctggggcagcttctccattgtggaccgccctcccccgcccccacattgccttcaaggagccttgggacggggactgaacccccaggctgggcctcacggatggggggcagcgagttctgtctctgacaccccaaaacttccaggctaagagaagcacacaaatgaattcccgattagggtatatgggagatgtaggggtctttgaggagaagaggccacccgggaggccctcctcatctctcagagggtccgggcagcactgggggttcggcctcaggagggaacctcaaggcagaggtcggggggcgcgctgggggagagacggcagaggagggggaagggacaaagtttgaaagtacccttccaactctttcagggaaagtttccttgggggccccatggacagagggggtagaggtgtggagggaccggtggcggggtgacccccgagaggtgaccggaccccgggggagcgacccctcccccctgtcccggctcggcccggctgggagtcgcccagctcggggccgcgtgtgttagttggggccgctttccggcagctccaccgggctaggggaccccgcagcgggccgggagcagagcccccggtagcctcaggggagagctttgctacggggggtttcccgcaccgaggctccctagccccgcagagccagccccccgcaaaggggaaatgtgccggcacaccagcggtcctcggcgccgtttggggtgcgtggcgggcgcggggggcggcggccgggccagcgggccgcccggcggggaagcccagggagccaggcagcggcccagggcggcggcggggagcaggaaggcccgggccggggggaaaggtcggatttgctcggcggaagaaacacagatggcggcggcgcagcgccattccgggccgggagcaggcagccagcagccctgtcctcaccgcggtccgcccgccgccgctaaatacccggatgcgccgcccaagcgccagacgcggagctgggaaaagggaggcagaggaggcggaggcagaggcagaggcagaggcagagcccgagcccggtgccgagaccaagcgacagaccggcggggctgggcctcgcaaagccggctcggcgagctctcccgacacccgagccggggaggaaaagcagcgactcctcgctcgcatccccgggagccgcactccagactggcccggtagtcaggggctcaggagcagatcccgaggcaggctttgctcagcctccgacgagggctggccctttggaaggcgccttcaacagccggaccagacaggccaccatgaccgagaattccacgtccgcccctgcggccaagcccaagcgggccaaggcctccaagaagtccacagaccaccccaagtattcagacatgatcgtggctgccatccaggccgagaagaaccgcgctggctcctcgcgccagtccattcagaagtatatcaagagccactacaaggtgggtgagaacgctgactcgcagatcaagttgtccatcaagcgcctggtcaccaccggtgtcctcaagcagaccaaaggggtgggggcctcggggtccttccggctagccaagagcgacgaacccaagaagtcagtggccttcaagaagaccaagaaggaaatcaagaaggtagccacgccaaagaaggcatccaagcccaagaaggctgcctccaaagccccaaccaagaaacccaaagccaccccggtcaagaaggccaagaagaagctggctgccacgcccaagaaagccaaaaaacccaagactgtcaaagccaagccggtcaaggcatccaagcccaaaaaggccaaaccagtgaaacccaaagcaaagtccagtgccaagagggccggcaagaagaagtgacaatgaagtcttttcttgcggacactccctcctgtctcctattttctgtaaataattttctccttttttctctcttgatgctcaccaccaccttttgcccccttctgttctgactttataagagacaggatttggattcttcagaaattacagaataattcatttttccttaaccagttgtgcaaggacagcaacaaccaatctaatgatgagaatgtacttatattttgttttgctattaacctacttacggggttagggatttgcggggggggcttgtgtgttttgttggcttgtttgccatgaaggtagatgtgggtggggagaagacacaaggcagtttgttctggctagatgagagggaacccaggaattgtgaggttagcaggaatatctttagggtgagtgagttttctttgagttgggcacccgttgtgagagtttcagaacctttggccagcaggagagaggtggtagggagcagccagccggcaaaggaaggagggggaaaaaaaccgccaccgggctgacttccacctcccagtggtgagcagtgggggcccaaacccagtttccttctcatttttgttagtttgcgctttcggcctccctattttcttagggaaggggagtggggtccaagtgacagctggatgggagaagccatagtttctcccagtcagctaggatgtagccattgggggatctttgtggcttcagcaaattctcttgttaaaccggagtgaaaacttcaggggaagggtggggagtcagccaagtgcctcagtgtgccctgttgaaacttaggtttttccacgcaatcgatggattgtgtcctaggaagacttttcttttcctctggatttttgttcctcctgtacaagaggtgtctttgcttggtttggtggggctgcggccacttaaaacctcccgatctctttttgagtcctttattataagtagttgtagctgcgggagggggagggggagtgggcgggcagtggatagtaagacttactgcagtcgatttgggatttgctaagtagttttacagagctagatctgtgtgcatgtgtgtgtttgtgtatatatacatatctagggctagtacttagtttcacacccgggagctgggagaaaaaacctgtacagttgtctttctcttatttttaataaaatagaaaaatcgcgcacttgcgcgtcccccccccacccccttttttaaacaagtgttacttgtgccgggaaaattttgctgtctttgtaattttaaaactttaaaataaattggaaaagggagaaactgagcggtgtatttttcctcactttgaagactggagaatgaatgcggagcggttaggcgggcaggcagtggggacatctggggcgtttgcacctgagaatggcgggggagggttcaggagctggacagaagccaggaatccttagtcccggaggctgcggaacgtgccttagccggcttctaggcttctgcctttggggtccagagggtaccccatttccggccgagaggtgagtacgtgggaatgcggtggggagtctggtgggcttggccctgacgcgacttcctccgcccccttccctcccctctgccatccggacttcggcagtctcaacttacaagtcaagcctctcggtccctggcggatcccgccaggccccgcccacccgtcctaggcccgcctccccgcctttttaagcgagcccccctagctccgattggctgctggagcccggcccccggccacgcgaccaggctgcgtccgcgatgcgcacggctcccaggcaggcaggcgcgctcgggcgaggtaggagcgatgtggcctgggaacgcctggcgcgccgcactcttctgggtgccccgcggccgccgcgcacagtcagcgctggcccagctgcgtggcattctggagggggagctggaaggcatccgcggagctggcacttggaagagtgagcgggtcatcacgtcccgtcaggggccgcacatccgcgtggacggcgtctccggaggtaacgctccgttccgggagtcgttccaagacctttcccgagcttgcgctggaatggaggtcctggaggtgggggtgggcggctcctacactcttagctactgttccccttcgcatctctcagggcgactttatggcttcctaatattgactcttgcctggttaaacccttttgacggagggaggcgatttgcccagcaagaaaacccgcatttcttgagcggctcctttgtgaaggtctctaccaattgttgctgcacgtgaactcctgctaacttctagacgcaggaatgactaattccactttacaaacgaagaggctgaaatccacagatgtgaaatggcttgcccaaaagcccccagctagctgcaggcagcgctggaatattggagctggaacattgcctgactggccagagaggacagcttgctgggtaaactcatagcaagcaaggggtcccagggctgccacagaaatcacatgatgagttggccctgccaggtctccctcatttctttctttccttttttttttctgagatggagtctcgtcttgctctgtcgcccaggctggagtgcagtggcgagatctcggttcactgcaacctctgcctcccgggttcaagcgattttcatgcctcagcctcccaagtagctgggactacaggcacgtgccagcacacccggctaatttttgtatttttagtggagactgggtttcaccatgttggccaggctggtctcgaactcctgacctcaagtgatcctcccgcctcagcctcccaaagtgttgggattacaggcgtgagccaccactcccagccctccctcatttcactctaaccagtggttacacctgacttattcgtgtcaggcctcaggtgagtggtaatcatcaacaagctcccaaagctgccttctgcccaggaaataggcatagaacccttggtgctgttgcactcatttgtaaaacagaggtcccaggtaatcccttctctccctcaggggaagcttagagccggtcaaaagatgggaaattaggagacccaagttctcatcctgtttttgcctttcccaggctgtgtgaactttcccctctggctgtttgctcctaaggtcagctgtgttcactctgggctttagaattcggggactggtatctcaggcacctacctttgggggtgtgattctggcagcaaagtaaactgtggagttccaggactgcagcaggcgtctgatccagccctcttctttaaccctcaaggaaaccaaggggtcagataaggagtcagtggtggtcttcaggcacaggagaagcctgtgaggaagggctgagttcctccttgggtagaatgtgattcaaagccagagtttaggctgggcacagtggcttgtgcctgaaatcgtagcactttgggaggccaaggcaggaggattgcttgaggctaggagttcgagaccagcacggacaacataatgagaccccatctctacaaaaaataaaaaaatttaatcgggcatggtggcacgcacctgtagtcccagctactcaggaggttaagtgggaggattgcttgagcctgggaggttggggctacagtgaaccatgattgcaccactgtactccaacctgggcgacagagctagaccctgtctcaaaaaaaaaaaagtttaaacttcttgctcttcaagatgtgtagcactgacgctccttctgtagctgttgaatttggtgcctcctcaatggtgactccaggtctgtttcctttctggaccatttccccagggcctggcactgtcatctttccaggcctgcccttgccccacctgagctgctgtatccatctcctctccttcacctcaggaatccttaacttctgtgccaacaactacctgggcctgagcagccaccctgaggtgatccaggcaggtctgcaggctctggaggagtttggagctggcctcagctctgtccgctttatctgtggaacccaggtacacagtgagtggtggggggttgtggggactgaccccagctgcctgcttcccacagtcagcaaggctggtttagccagctcagctcagccacagccctgggcctactgttggcctcagagctgtgcagcagaaaggctgagtgcaggcctctgttttgctgaaaagctttggccaaggaactttatatatatattttttctttttgagacagagtcttgctctgtcacccaggctggagtgcagtggcacaatcttggctccctgtaaccttcgcctaccagactcaagggattctccatgcctcagcctcctgagtagctgcgattacaggcatgctaccacacccagctaattttttttttttttttttttttgagatggagtctcgctctgtcgctgaggctggagtgcggtggcatgatcttggctactgcaagctgcgcctcccaggttcacgccattctcctgcctcaacctcccgagtagctgggactacaggcgcctaccaccactcccggctaattttttgtatttttagtagagacggggtttcactgtgttagccaggatggtctcgatctcctgacctcgtgatccacccaccttggcctcccaaagtgctgggattacaggcgtgagccaccgcactcggcctaatttttatatgtttagtagagatggggtttcaccatgttggccaggctggtcttgaactcctggcctcaagtgatctcctccaccttggccttccaaagtggaaactgcctttttgagcattcattttcccacctgcaaaacagagtccctcacacctgaccttctataagaaaagaggagtaggcggcaggaactgagactaagggctctggggctgttctgacgggagcacagttgccagtgctgccctttagtgtccctgttcctgtgggcaagtatcttaacttttctctgtctcaattacttcatagggaaaatgaagataatagcacttaataggatcattacaaattaaagacttaatacatgtaatgcttagaataggccgggcgcagtggctcatgcctgtaatcccagcactttgggaggctgatgcaggcggatcacctgaggtcaggagttcaagaccagcctggccaacatggcgaaaccctttctctacaaaaatataaaaattagctggcatgatggtgggtgcctgtaatcgcagccacttgggaggctgaggcaggagaatcgcttgaacctaggaggtggaggttgcagtgagctgagatcacgccactgcactccagcctgagcaacagagtgagactctgtctcaaaaaaaaaaaaaaaaaaaaaaagcatagaacagcctggcacatagtactgctcaatgaatgttggctattatttattttccaaatgttacaaaataaatttatataagtatgaaacttaaatagtacttattatgtgccaggaattcttttaagaaaattacaactattggccaggcgtggtggcttatgcctgtaatccaggcactttgggaggccgaggtgggtggattactgagttcaagaccagcctggccaacatggtgaaaccctgtctgtgctaaaaatacaaaaattagctggccgggctcgcttgaacccatgaggcaggggttgcagtgagccacgacggtgcgaccacactccagcctgggtgacagagggaaactctgtctcaaaaaaaaaaaaaaaagaacattacaagtattaactcattaatcctaagtgatagttgctattcttattcccgctattgagatgaggacactgagatccagagaggttaagtgacttgcccagaggcacacagcctgttgtgggatttgaaccctggctcaagagtccatgctggctgggcatggtagttcacacctgtaatcccaatacttttggagcccaaagcagaaggatcacttgatgcctggagtttgagaccagcctgggcaacatagcaagaccctctctctaaaaaaaaaaaaatgtttttaattagctgggtgtggtggtgcgcacctgtagtcccagctactagggaggggaggctgagttgggaggatcacttgagcccaggagttcaaggctacagtaagctatggtctcactactgcactccagcctgagtgacagagaatccctgtctcatttgccaaaaaaaagaaagagtctgtgctcctgactacttgtgattatcattaactgccctctcagaaaggtgagagtgaaatgaatgtcagaggcagaactcctgactcgcatccagtcacttcccagcaaagccctcacccagacccaacagttttcaaatttacaaattagaggcccaggtgaacccagaattacctctgtgatctttttcttcaccattaggcgaccaaaaaagacactcagtatggtgttaggaagacacatctttcttctccacgagtgcccgtaattccaccattagactgccactgtaaaaccaaagtctgcccagggagggaacctaacaggtccccagttcctcagtgggaactgtctgtcagattcctggcagctctgggatagcccatgtgtggcagaaagtaaggagactgaggctgcaggctttctgggttgggtctctgtggtcctccaagcctctgtcccctcgaacttgtcccacatgaccccacaggcatcaacacgtgtctcactcattttcttcagagcatccacaagaatctagaagcaaaaatagcccgcttccaccagcgggaggatgccatcctctatcccagctgttatgacgccaacgccggcctctttgaggtgtgtggaagctgtcctgcgggtgagggttggtggggcctgttaggctgaggaaggcttgggtgtgggcagtcgggagaacctagcaggattcagtgccatgcctagaggctccagagcccgcttctggaggtcaaggttgggccaggtaggtgctccaggaggaatcctggggcttgcagggagcctgagttccagagcctttgggggataagctacatcagctggaaggctgggggaggcgggggcctggtactcaccaaatatattctcacctcctcttactagagcagggcgctggtccagcccggcactgagacacgggggccccagagagaagcacagaacaccttgcctctctacccagaggagcgccctggctggcagtacagttttttgatttgctggagtcccggtcaagggagaagcccagggtggttaaatgatggctctacgctcactgcctccctccaggccctgctgaccccagaggacgcagtcctgtcggacgagctgaaccatgcctccatcatcgacggcatccggctgtgcaaggcccacaagtaccgctatcgccacctggacatggccgacctagaagccaagctgcaggaggcccaggtggggcgacgcctgggtccaccctcagcctccgcctggggaaggaagtgaggcttagagaggccaactcctcactcacagagatagcctgaaagtttgaaacagcagagatttgtccaagatgtgaacccagatccctcacacccagagcattattcttttttttttttccctgagacagagtttcactctgtcgccaaggctggagtatagtggtgtgatctcggctcactgcaacctccacctcctgggttcaagtgattctcctgcctcagcctcccaagtagctgggattacaggcatccgccaccccacctggctaatttttgtatttttagtaaagacggggtttcatcatgttgtccaggctggtctcgaactcctgacctcagttgatttcacccacctaggcctcccaaagtgctgggattatagacgtgagccactgtgcctggcaccagagcattattccattgtgccatggtgccttgaggtttttccctgtgtatgtgtgacagtctcactctgttgcccaggctgtattgcaatggtgcagtcatagctcactgcagcctcaatcttctggactcgagcgatcctcccacctcagtctcctgagtagctgggactaccggtgcccaccacacccagttttttatttatttgttttttagatggaatttcactctttttgcccaggctggagtgcaatggcgtgatctcagctcactgaaacctctgcctcccaggttcaattgattctcctgcctcagcctctggagtagctgggattacaggcacacaccaccgtgctcagctaattttctatttttagtagagatggggtttagccatgttggccaggctggtttcgaactcctgacctcaggtgatctacctgtctcagcctcccaaagtgttgggattacaggcatgagccaccgcacccagcctgtttgtttgtttttgagacagggtctcactataatgctcaggctagtcttgaactcctgggctcccaaagttacaggcatgagccaccatacccagccagtttttaaaatttttagtagagacagggtctcactatgttgcccaggtgggtctcgaacccgtaagctcccaaagtcctgggattacaggtgtgagccactgtgcccggcctgccttgagtattagcaagcaccttctgtgtggcaggcccttgctaggcataaggatagaatgtacatgttggtgagacctggtcccagcctagcctgccctctgggaccttacacaggagactgagatgtgagcccattctcactgtccagagctcagggtggagatgggtgacgctgagaggcacagatgagggagaggatgttccagcccccaagatggtggtacctctgtgcccacctctgtgctgggcactgggcaggatgagctctcagagctccaagcagcacaagagacgggtggtttggcccaacttgacaccacccaccatctgctcatgtctttcctgcagaagcatcggctgcgcctggtggccactgatggggccttttccatggatggcgacatcgcacccctgcaggagatctgctgcctcgcctctagatatggtgccctggtcttcatggatgaatgccatgccactggcttcctggggcccacaggacggtgggaccatgtggcacctgaggcctggggtggggcttctgagggtggctgggaaacgaggaggccagtccccagcatgatccataatccctgggctctcaggaggccagtgacagcagcggtggcttcccttgcaggggcacagatgagctgctgggtgtgatggaccaggtcaccatcatcaactccaccctggggaaggccctgggtggagcatcaggtacctgcaaggttgtgtccctggggtccccttgtccttttgaagggccctggaggggctcagggaagtggggagggcagcatggactgtactttcaggagggggttgggtaggctctggcccctgaccaacccctccccccacctcttcccttcttctcagggggctacacgacagggcctgggcccctggtgtccctgctgcggcagcgcgcccggccatacctcttctccaacagtctgccacctgctgtcgttggctgcgcctccaaggccctagatctgctgatggggagtaacaccattgtccagtctatggctgccaagacccagaggtgcgactcccagcagggcaggctcgggggcggagagacgtggtgagagccagcctcatgtgtctgcccaggcccacagacagctctgtgcccaccgggtctgcttctgcctgttcccctcccttctctctgtccctgcctctcccctctagcttctgtgtctccttcttatccctcctgtctttccacctcccttgttgttctccctgccccctgcctggctcccctctgcctcttagagcttgtaactgtctttgttgatccttcttgcagacttgggcatagacctcgggcctggtccctgcaaggagcgggtgtgaatgctccacggccccttagctacctgtgacaccttgtgcccacaggttccgtagtaagatggaagctgctggcttcactatctcgggagccagtcaccccatctgccctgtgatgctgggtgatgcccggctggcctctcgcatggcggatgacatgctgaagagaggtaagggtgctgagacaagggaactggtggtgggtcctgagagaagagaaagggaaacccctagactgtgacccagccccgtacccagccacgctgcggcctcttaggccagctgtctgtctaagcttgaacaccccaagccatgaggcagtcccgaatctgagacctggggcagttcccttgccctctgtgttctgcccccaagcctgttggttctggcacgcccttgctttctaccctcccaggcatctttgtcatcgggttcagctaccccgtggtccccaagggcaaggcccggatccgggtacagatctcagcagtgcatagcgaggaagacattgaccgctgcgtggaggccttcgtggaagtggggcgactgcacggggcactgccctgagctctgggtaaggacgagaagagccaaggtccgcctactgccacagggtcaaaggaggttttcgatcagcccagaccagaggctctgagccctgaaccaaagtcccagagctgggctgggacgtgacctgtgctgagggctgtgagaatgtgaaacaacagtgtgaaaattggctgtgacactctggtctgctttattgtctctgggcaggcccagtcctgtggccggttgaagaatcaggcaggagccagggctctgaggggaggcgcctgaggactgcagatctccactgacctctttccctagattaagatgggacccagtggccgggcacggtggctcaggcctgtaatcccagcactttgggaggccaaggtaggcggatcacctgaggtcgggagtttgagaccagcctgaccaacatggagaaaccccgtctctactaaaaatacgaaattagccaggcgtggtggcgtatgcctgtaatcccagctgctcaggaggctgaggcaggagaatcgcttgaacccgggaggtggaggttgcggtgagccgagatcatgccattgcactccagcctgagcaacaagagcagaagtctgtctcaaaaaaaaaaaaaaaaaaaagctggcacccaggcctttgggagataggcccagtccaccgtttgtctcgggtagtttctgtgctgctgtggagggctgctgagaactagccccacaggccttttaccctgccactgcccgctactctgcagcccctgagtctagtcttagagtctagcttcttccttctccccactggaagatgtcctgtagctgcccagataggaggaggctgggtgtccatgtttggaaggagaggcagaggattcaggcccaaaagaaaagaatgaggatcacccctggggaagctccagacagtctggaaccctgtgttcgcgcccactctctccctgccttactctggctttcggcaagctccagtccctgtgtgtgcctcagtcctcctgccactatgccttgaggtctgaggtccttccatctcgctcattccaaggcctacgatgatcagccaccagggggtgctgcgagcacgggccgcggccgccggctcgccccgcccctccagactgggggccttgggccgcggctgttcaggctgcccagcagtcaaggccaggagaggcgatttgctgctgccaaggccccatcctcccttgtgccccacaacggctcgccgctttcctgttggaggggcctgcgggaggagggcggtctctccctggcgaccttgtggaccccttgtggggtggggagtggggtccccgcagctccaccctcagcgtggtgtgaccttgggaagctcttagtttgcttgggacagaggacgaaaaggccctttatcattaacgacatgaaactagccctacgtctctctctgacgtcctgcacctccagcccacccatttgcctgttatcttgggatgaacaatgtaatatgagctgggctctggcccagccctgcaggatctgaaagctgggattcagggaatcccagcctgcgatccggaggaccttgctgctggggtccaggagctgggggagggggggtgtggggggtcggtgtgagggtggaaggcagcctggctggggtagctgtggccacattagcggcaggaacatttgcagcccaccaccaccggctagggcacgtggcaccaggcgcgctgctgcaggggatgtgcacaagggctcaaccagtaatgtcgagccagcagctggatgagcatggtctgctctagccagcagctcatgttaagcgccacgggcagctgcggggtgacgtgtggcagtcggtgtgctgcacccggcggggccagaacagagggcccaggtccacccagaccgacgtgaggcggcacgaggcgagatccagacagcggcgcagaaagtgcgtcgccgcccctgtggctcccaggagccgccgctggcgttgccctgctgcgctggcagcgccgcgaccccctgggctagccgatcgcggtagggctccacgccgttggccaacccgcggctcagcgtgtcctgctgcaccagcccgggtccgccgccgcgcttcttccgcagtcatccagaaggtgtctgtaggaggcgcagcagccgctctgggtgcacgtgtttcggcttgggcgcctaccggtagtcgccggccgcccacgacaagctgtagggccacgcggggcgggagggccggccgtggaccagctgcaagtctgcgttctgcagaatcagaggctctgaggaccgccccaagggcgcaatgtccttgttctctgcgtcgcgcacggggttcagggccgcgggctaccagaagcggcagtaggagtggatggaggtggcaccgggcgcacccaaggtctaggctcacggccgcgctctttatggccgcctgttccttcctccttccctccacctccgctctcatatcagcttagccttgccgctgctgggagctcatcgccctaggccaagaaggaccttgtgggcagggggctcccaagggccaggagtgcgaagtcatgaatctcagatgctttccagcccgttccagggttcaggcatgcacattcgtccaggcttctgggagtctaagggtgcgttactttcacgcagtggttgcaggtctgtcaaagtttctaaaatcccaccaagctgagtctcgccattcagggatcataagagtctacaattcctttgcgcaattcaattctgaattcaattcagaattaattcaattctggccgggcgcggtggctcatgcctgtaatcccagcactttgggaggccgaggcgggcggatcacgaggtcaggagatcgagaccatcctggctaaaacggtgaaaccccgtctctactaaaaatacaaaaacaaaacattagccgggtgtggtgggcgcctgtagtcccaactactcgggaggctgaggtgggagaatggcgtgaacctgggaggcggagcttgcacttgcagtgagctgagatcgcaccactgtactccagcctgggcaacagagcgagactgtctcaaaaatatatatatatattaattcaattctgaagcttctgaattcaggtttggcaagtctagattagattcctaatagtttcaattccgtgagactctgcttccaaaaattgaggaatttctgcatctaaagaaggtgacatcaggctctatagaggcacctctgagccctcgtgaaaaccccggggcctttgaggagctggttcttttcttttctttttttttttttttgagtcttgctctgttgcccaggctggagtgcagtggcacagtctccgctcactgcaacctccgcctcccgggctcaagccattctcctgcctcggtctcccaagtagctgggattacaggtgtgcaccaccatacctggctaatttttagtagagatgggtttcaccatgttggccaggctggtcttgaactcctgacctcaagtgatccaactgccttggcctcccaaagtgctaggattacagacatgagccaccacgcctggccttaaggagctagttctgagcatctaccccagctcctccggcctgggatgcgagtcctggctccatcagcgcccctcacactgttttctctccccttacgcacttccccttgatgctccccaaccccagccccagcttctaaaaacactacactcagcccctccacctctcccctcccttccttaactcactgcagactgccttttgccctcaaaacacctgtccagtttaccagcagcctcctcattgctgaatccagtgtaccttgctccccaggtgctagcctccctaaccctctggaggcatttggccatgtggcccctcctccacacagttcaggacagaactccatgaccaaatcacacagccgttcaccaagacctattctcctctttggctcttgcctagacgagaggctcctaacaggtcactcatcaaatctctcccactctgtccatccttttcaccccgggcaataatagacttttttttttttttttttttgagacagagtcgctctgttgcccagtctggagtgcgagcgatctcggctcactgcaaccaccacctcccaggttcaagcgattctcgtgcctcagcctcctgagtagctgggattataggtgtgagccaccatgcccagctaatttttgtatttttagtagaggcagggttttgccatgttggccagtctggtctcgaactcttgacctcagatgatccgcccacctcagcctcccaaagtgctaggattacaggtgtgagccgctgcgcctggcccataacaaactttttacaaaagataatgtggggggaaaaaaagaaagaaagaaagaaaatgtgcgggtcatgtctctgctgtagaatcttagtagttccccgttgctatcaggtaaagccagactttttggacaggtacctaaaccatctgggctccagctggactaaggctctggaaagagcttccggagaaggatctcaggatttgcagagcctgagggaggagtctctggagtctgccgaaaggagactcaagtcctggtttcccactccaggaaaccccagtcaagactaggaatcctttttttttttttttttttttttttttttgagacggaatctcgctctgtcgcccaggctggagtgcagtggcacgatcttggctcactgcaacctccaacccctggcttcaagcaattctctgcctcagcctcccgagcagctgggattacaggtgcccgccaccacacccagctaatttttgtatttttagtagacatggggtttcatcatcttggccaggctggtcttgaactcctgacctcatgatccacctgtcttggcctcccaaagtgctgggattacaggcatgagccaccgcgcccagcctcttctttttttttttttttttttttttgagacaatgtctcactccatcacctgggctggagtgcagtggcgtcatctcggctcattgcaacctccacctcccaggttcaagcgattctcctgcctcagcctccagagtagctgggattacaggcgcccgccacgacgctcagttaatttttgtatttttagtagagacaaggtttcgccacattggccaggctggtctcgaattcctggcctcaagtgatctgcctgcctcagcctcccaaagtgctgggattacagacgtgagccaccatgcccggcctaggaaccttttctaaacatggattggagcaagaaggtgcagggataggggatggagtcacatcaggctgggccacaggaggtgggagtgccagagactggctgggccctgggcacagaggggttaactacaaagcaaatcacagagagcgagatcaatgggttactggctgcagagagaggaaaaggcagcagcaacgcagagaggcagagaagagccaggcagaagagcctgccacctgggggaaatcagggactgaggaggaagtggccagtggctactccagagggagtgcccaactccggctcagcagagggggcagaggagaggaggggccttaaaggcaaagggggagaagtagaaggcagaccagtacctgcagggaggcaccaaggggcagccgctgaatcaggaggcccacccagcccggccattccacccaggatcaagcccactgcccaaggcggaggtgggtgttgcccatcctgggctttggggacctactgcatgctgggtgctgggatgggggcagacattgcctttcttccctactccctgcctgacccccctttcccctactttgtcccaccaccccagtggtctcaagcctgcaaggagatccacaggcagtaggagacatgggctgtagagtgggatgggggtgagcatgggtgcggtgtgcacacacacaagttgtcagaggcaccacctgttacaagctctcagatgagcactctagcttaagaggcaggataccagggtggcaacagccccagagctgccatttcgagtgtgatattatcctcccatgtcccctctctgggcctcaatttccctatgtgcagagaggaagcagtgacctacacggtcttcccagttttgccattgtgatgatctcactatactggaccctccaatgactcagggatgttacccgtgttttgctaaggctacagcttgtagccagagaaagccctaaacccatgtcccagggtctcccctgagcttcagatccccattgagaaggaaaacataccagtttctgggtttggcccctccccccatcgccatatcttcatcctacttcgcttgtgccttccccagcctcgtgggttgaaagtgtccctcaaatacctaggtagtcctccaggcaggactccaggggtgttccttaggaaactgaggaactctcaccccttgaacaccacgagcttgctcacacagtgacactcagcgatgactttggctctgctctcccctcctccatctcccacgagcttccagcccagaacacctggccagacccaggtcgggggagttagatcccggggtcaagcaaccagaactgggggctcttgcctgaggattccagcttctcttcccaggtgcccgtctgatggggagatggctgatgcccagaacatttcactggacagcccagggagtgtgggggccgtggcagtgcctgtggtctttgccctaatcttcctgctgggcacagtgggcaatgggctggtgctggcagtgctcctgcagcctggcccgagtgcctggcaggagcctggcagcaccacggacctgttcatcctcaacctggcggtggctgacctctgcttcatcctgtgctgcgtgcccttccaggccaccatctacacgctggatgcctggctctttggggccctcgtctgcaaggccgtgcacctgctcatctacctcaccatgtacgccagcagctttacgctggctgctgtctccgtggacaggtgcgctgtgcctggggcctggctgggcagggctgtgggggcgggggttgggggaggagtcctgaacagatcctcactggccttaggaaggagagagtgggggaccagaaagggaggtgggtgggaggaaacaaaagctccctgacccctcgcaagcagcctctgggcacctgcagggcgtgcttgaggggactgtcctgcccttcccctcctccactgtgaacttccagaggacgcctctgagtctcaagtggcagcacagggtctggcacatagtaagtgctctgtaagcgcgaaatgaatcgcaaaagaagctcacgaatgcgttcatcagtttttttgttttgttttgttttgttgttttttttttttggatcttggctcactgcaacctctgcctcctgggttccagcgattctcctgccacagcctcctgagtagctgggattacaggccaccacacctggctaattttttgtatttttagtagaaacggggttttgccatgttggacaggctggtctcgaacccctgacctcaagtgatccgcccgcctcggcctcccaagtgctgggattacaggcgtgagccaccgcgcccagcccagctattttctaactgcccacacctggccaagctgtgcacacatctgcttccacagcttgaaacttggggtcaaatccaggctcactccagctgatgaccctgggcaagtcacttctctctggacctcatctgacgcatccataaaataatcctagaaataacaagtcaccgggatcgggcccttgctaggtgcaagggcctaagcaccttgcgcgttcacacccttaatccccgccacgtcccccacggttcacaggaggcgcactgggccgcagggcccgggcgcgggacgtggcgcgggcccctgcgggagggcacctgcccgccccgctgaccaggcgccctccgcaggtacctggccgtgcggcacccgctgcgctcgcgcgccctgcgcacgccgcgtaacgcccgcgccgcagtggggctggtgtggctgctggcggcgctcttctcggcgccctacctcagctactacggcaccgtgcgctacggcgcgctggagctctgcgtgcccgcctgggaggacgcgcgccgccgcgccctggacgtggccaccttcgctgccggctacctgctgcccgtggctgtggtgagcctggcctacgggcgcacgctgcgcttcctgtgggccgccgtgggtcccgcgggcgcggcggcggccgaggcgcggcggagggcgacgggccgcgcggggcgcgccatgctggcggtggccgcgctctacgcgctctgctggggtccgcaccacgcgctcatcctgtgcttctggtacggccgcttcgccttcagcccggccacctacgcctgccgcctggcctcacactgcctggcctacgccaactcctgcctcaacccgctcgtctacgcgctcgcctcgcgccacttccgcgcgcgcttccgccgcctgtggccgtgcggccgccgacgccgccaccgtgcccgccgcgccttgcgtcgcgtccgccccgcgtcctcgggcccacccggctgccccggagacgcccggcctagcgggaggctgctggctggtggcggccagggcccggagcccagggagggacccgtccacggcggagaggctgcccgaggaccggaataaaccctgccgcctggactccgcctgtgtccgtctgtctcactcccgttctccgaaggcgggacgccaccgggccagggatggggcaatgccacgagctctctgaggggcgttgagtggagcgacttgtccccgctccacagcggagcaccagcccagtggacacccctgggtgtgaatatgaacagcacagcccgcccccagcagggcagcccccagagcctgcccagagccagcctggcagtccctctgcccattcttccaactgggtgacacctaggccctgcttcctccaccacctcttaactatctccttcttggttccaagctcagtcctaggtaatttaacatcaacagctaataaatggctaatatttaagtgggaccaggcgcttggctcatgcctgtaatctcagcgttttgggaggtcgaggcgggaggatcgcttgaggcagcagttcaaggctgcagtgagccatgatcacgctactgcattccagcctagacagcaaagcaagaccttgtctctaaaaacatttattaagcaggtaccatatgcctcatgctacattctttgtcaaaacagctttgcaaatagatatgattaacctttcctttttttttttttttttttttgtcttttagagacagagttttgtctcccaggttggactacagtggcgccatctcggctcactgcaacctccgtcccccgggttcaagcaattctcctgcctcagcctccagagtagctgggattacaggcgcccaccaccacatccgactaatttttttttttaatagagatggggtttcaccattttggacaggctggtcttgaactcctgaccgcagatgatccgtccgcctcggcctcccaaagtgctgggataacaggcgtgaaccactgtgcccggctgtttagccccattttacagatgtagaaatcaaggatcatagagatttagtgatttgccacaccgctggtgtttggcagaggttggatacaaacccatggctgtgtaactttttctttttttttctattattattattattattatttttgagagagagagagagattgttatccaggctgcagtgcagtggcacaatcttggctcaagacaacctccgcctcccaggttcaagcgattctcctgcctcagcctcccgactagctgcaactataggcgtatgccaccacacccggctaatttttgtatttttttattatttttattttttggtagagatggggtttcaccgtgttggccaggctggtcttgaactcctgacctcaagcgatccgccggcattggcctcccaaagtgctgggattacaggcgtgagccaccgcgcccggcccagaggtaacatttgacatgtattttcttggacaaaggtggggaggggcatgccaggtagagcaacagcctgtgcaaggcaggggacgtgcagggcagtaagtggctcctgcagctgaggcagggagagattggggcaggggaggcctggagggcaggagcttcatccttcaggcagatggtgatgccactgaaggttttcaggagaggagggggcctatcagatgtgcagttcagaaagctcccagggctgctgtgtacaagctggaatggaggcctagacttggcagaggactccgatcaggtgggttctcctgggcccttcttggaagtgaggagactggtaaagagtctgctccgtgagctctgttgaggaaagccaacgaggcctggcctaggactgggaagatatttttgccgtggacttggcaggaagatggatggcctgctgccaggcttgggcttggttcccgaggctccgaggtttgcttcagggggctaatgaaacacttggaagagcagatggtcgtaataataataactcaggagagaattgtgtgtccagtagagcccaaggcaggcaagagggtcggagcggaggctgaattgagtcctggccactgctccccagggcctgagagaaccctcctgatctgagccctctgtcaagtgtagggctgagcctggggcagccctggggacctggaaaggcacttttcttagttggaaggaggtttggattctacaaccttcttaccttcctgtttgtgcaaacctcttaagaagaggcctggccggatcacgaggtcaggagatcgagaccatcctggctaacacagtgaaacaccatatctactaaaaatacaaaaaattagctgggcgtggtggcaggtgcctgtagtcccagctactcgggaggctgagacaggaaaatggcgtgaacccgggagacagagcttccagtgagccgagatcacgccactgcactccagcctgggggacagagcgagactccgtctcaaaaaaaaaaaaaaattactctttagggggcctggcgcagtagctcacgcctgtaatcctagcactttgggaggctgagacgggtggatactaggtcaggagttcaagaccagcttggccaagatgctgaaaccccatctctactaaaaatacaaaaaaaaaattggtcggccttggtggtacacacctgtaatcccagctactcgggaggctgaggcaggagaatcgcttgaacccaggcagcagaggttgcagtgagccaagatcgcgccactgcactccagcctgggtgacagagcaagactctgtctcaaaaaagaaaaaaaagatttactctttagggagctctttctggctgcccaggcaggctttcatagggaggaagtacagagtgtgctgactggagcagagaggtcagtcaggaggctcgtgtgagaatccagagagaaagacatagaggtattggaagtggtggggagacatggacagatgggtcagccacttaggaggtacaattgctaggacttggtgactgttggagggtaaggaggagagacgtgtcccagatgacaccccagacttctggcttgggctatttgggggtggcagtggggataactgagggggacagttttggtggtcatggtgggggtgcccgcagaatagcggtgtactctgagtacgtgccacgtttcacaaccactgtttgcaggtgggcaagggcagggagcttgtcctttcattccctgctgtcctcccacctagaacactgcctagcacatagcaagcactaagtcaataagtcaatatttatttttatttttatttttattttttgagatggagtctcactcttttgcccgggctggggtgaagtggctgaatcttggctcactgcaacctccacctcctgggttcaagtgattctccggcctcagcctcccaagtagctgggattacaggtgggcgccaccacgtctggctaatttttgtatttttggtagagatggggtttcgtcgtgttggccaggctggtcttgaactcctgacctcaggtgatccacctgccttggcctcccaaagtgttaggattacacgtgtgagccactgcgcctagcccaatatttctaacatgaaagaaacacgaagtataaggcaaaggatcttaacccgcaaggtgaaatcaccaaatgtttcttcttcctgccatcttctaagccttcctccgcacctccccgactcttcagtaattcgcagagcagccagcaaccagcaaaactcacccctgtgagtacaacctcagctgagctctctttcctgccctggcccatggccagctcagggaccactgagctctctatcctgcccagtccagccagctcagggaccactgagctctctatcctgcccagtccagccagctcagggaccacttgggtgttttgtgactcactccagtgtctgaggccgacttcatctggctggctcttcagacacaattggggttacaggaaatatcctggctggaaatggggtgaggcagattggctgtctacatggctgtctggcaagtgtttgatgactgacctataagccaccttcagtcaagcctttggttcactgtctacatggccagggagggagtcaacaatagacactccacctccgcaacggccagttctcctggatccatggctccagggatggaggatgctgcaggagacacaggccttgcttcccagctaaggactgtgggtcatctcagggcgatttcacagtcccagcatgccccagctctcagctctgcaaataccaagcagcctgcctaggggacagtgggctcaggagtgcccttggcaggtcctcacctatctgctcccacagctctgtagcaagggttctaaccttttttgagtgtgaagcctgctgagaatgagaatgagagctgtggacctgtttcccagaaacgcatgtgtgtactctccacacaaaaccttgcaccgtttcgggggctcacacctccctaagggctcgctaattgaaccccttgggcctgaggttgagaaaccttgcctcaattcttccccaggtgatcaggccagggtgagagaggacagacctggcaagcaggacccatgagaaagcccccttcctggactttgaggcccgctccctcctgcccctgcctcccctctgccctggactcctctctgctctgccccattcccagggccatggccatgggggggctgtgtttggatacaatggcaaccctgggcccagaaagtgggcaggctcacctggaggggatcagagtaacatggcaggaagcgagtgaaaagctaccccagaaccgcacctctgctctccatgtgactggggtgccatcctcccttacctacctcaggcagtggcctgagttccacgggcgcgccccacagctccctctgccgcctctcttcaggcttggggccactgcactttcccttccccagccctgccaacctggtggggcactgggcttccctctcacagggtcctggggacaggcctaccctacatctcatacccacagacagacccttttttcctccaaggcctggcctaggttctatgagttcaatgcagatctgagccataccaagctgggtttggggaacacactctcctcctctgaaaggtagacagggattccaacttggtgaaggggagagtagggcagagccaggcgggacacggactgatcacctggagaaagtcaccatcagcagccttggggcaggggcgggcccagcagtgccatcccctgggttttccctgagcaggcctccgctaggagcgcacgcttccttctgcctgtccatggcccacagcaaaggactggtgctcctgcagcggggagcggggctgctgacaggactgaacctcaaggtgagtttttggggcttcactacaatactagtttctggttgctgctgcaataaattaccacacacttagtgacttaaaacaacacaaatttattcccttagagttctaaaatcagccagaattataaaattagcctcactgagccagtccaggtgggagcagggctggggccttccagggctctgtgggaggatgcatttcctggctctgaggtggcctggactctgtggcttgagctgccctcctcaactccagtttcctgctccatcgctacacctccaacctcctctcccgtcacctgctcttctgttatacagacccgggtgaggacatcaagccctcctgaacaagctgggataatcttcctggcgaaagatccttaacttcattacatctgcaaagcccctttggccatacaaggtaattttgacaggttcctgggattaggacatgggcatcttgggaggccactactggcctaccacaactgggcagcaaaactattacaccctccggtataatagttttggtgtttcaatgactgggaggaaaagggttggaattttttgctttggggtccctcttaaccttgtatttttaaggtctgggactcaccaaccctccccttccaaccagagaaactcactgcagtatctccttgaaagtctggtgacgtgtctgtctaagtgctggtgagaggcacaggaccaactgagggcctcacgcagtacccctggccacagggtgcccgcctaagcccacacctgctgactgcaacaagcccatggccaggacggaacacagagaagggtctgaggcctggagcgcgccatgaaggccatggggcaagtgaggtctgctgagatagcgcaggtctgcggagctgaagtgcagctgcagaggctggtctggtgctgcgagaactggaagaagctgggagctgtggtccctgtccacagagatgctggaaactgtggctgggagtggctctgaggccgtggagagagagcatctctgccccacggcatctgcgggtgagggcaaggtcctcaccagacaagtgcagctccaagtcccagatgttgggctttttcttggtactgagacagcagtggggcagggtggggcagtggcaggaaggcagggagcctctcttgctacctcttctccatgctctgcatctgcagactgagggaggtgaagctggccaggaggtcagtcacttcatccacctgcaggacggaacagaggctctgttatgggacacggggtgtgccagggctcctgggtctcttccacaatcccacaggcacagaacacaggcacggtctctcctcccagggcgtgtggtggcttctgactacgcagcagttgaccaagggtcaatctttgacaccaggtggcctagcgctgtcctagagggcagggccatgaacacacactagccactggcaacttcaaaggaagtgaacggaggctttgaagcctgcaaccccacaatcataggctctttcccccactttttttgtttgagacagggccttgctctggtttttttttttgttgtttttataatttttgcctttttccacatgttctgagaggaccttgctttgtcactcaggctggagttcagtggcaatcacagctcactgcagcctcgaactcctagcctcaagtgatcctcccacttcagcctcccatagcgttgggattacaggtgtgagcccctgcggctggccccagcccacagcctctttctgatacgagtgtctggtggcatcggagcagggtggactggccctgaggctcctgccaggccctgggtctgggcctgtggctgcagctcacctgctctttggtactggtcatctgcaggcgggtgcagaggtcatccaggcgttctcgctgctcatgttgccctaggcgctccagatactccctcagcatatggatgatctggaacaagagggtgagctgagctgcctgggttcctagggaggcagacaggctgatgctgcttccaaaaagcacagtggagcaggtgccaactggggtcagtgtgaaacaacccaggagccctgggaccagaggcaggtgtgtctgtggttagggcagcatctgtccagtgctgccttggtgccgtggtctccacacagaaggggtactcacctgcttcacctccagacgcacagcctctaggcactgggcatggccctcctgcaggatattcagctttgacttggccaggtgcaggggtgtgcgaccagctcggtccagggcatctacacgggcccctgcaggtaccagctgaggtgagcattctgggggtgagggggagaaagaggacagagaggggaagaaaccacatacctcctcgtagcagtgtggtgatgacaggaacgtggttggtgcaggccgctgaggaagaacaacagagacttaagaatccaggaccaccagagcctggctctgcgtggccactggagggagcagggctgtgtctcccagacgcctgtgccaagttatgcctactgagaaggtatcgccaaggcacagctaggtaggactcagaagtcaagttcaactccctccctgtacagcagaggaaactgaggcctggagataggatctgcctcagtgtgagccacagtgctgagtgctgctgggctagcctaggttgctaaattggctctgccgagggcacagccaactgctaaatgattggaaggcccatgggacacaggctgctgggcagtgcagccctgggagtgcaggcctaggatcttccctgacactcacagtttctgccaggagcatgccgggccccaccctcttcatctaaagagcctttctttgctgcaaatgagttgtcttagtgacttctgacatgcttacccaggtgcagtggcgtgttccccagcccatctcgctggttaggatcagcaccatggtccaggagcagctgcactggaaacaggcaaacccaagaggagttgtcggaggcttccattgcctgcaccctgaacccctaacctagctagagaggctggctcagagtaggggacacggaatgcaagcatggatggctgtgttacttcattcattcactcactcactcacttacttaccagagttcatgggcaaagccctgagggccaggaactgaggatttggggagggcctcttggcctatgcaggtgtaggaatgagatttgaagggttaagtaaagttcttccaatagcagctgctcctggtgaaggctgtccagggcattttctgcttctcccacagccaagcaccatggtaggaattaagtcaataaatgatgctgagctccatggataacctctccctcctggcagtcttgggatcacctcaggggtgtgctgtattatcaccagggtctgccaatacccagaaggatgcataggcaggtagcctggatcccagacatcatacagggaggtcaggctgagcctcacaccatgtacaaaaactaattcaagagggaccatagacataagtgtgaatgctaaaacaggcttccagaagaacatgaacatcttgggcaggcaaagatttcttaaataggtcacaaaaatactaaccataggaaagaaaaggccaggcatgggagctcaggcctgttaatcccagcactttgggatgccgaggcaggtggatcatttgagctcaggagttcaagaccagcctgggcaacatggagaaaccctttctctatactaaaaacacaaaaattagctgggcatagtgatggcagacttgtagtcccagctacttgagaggctgaggtggcagggcggcttgagcccagaaggtcgaggttgcagtcagccgagatggtgccagtgcactccagcctaggcaacagagacagaccctgtctcaaaaaaaaaaaaaaaaaaaaaaaaaaaaaaagagaaaggaaagaaatattgataaattggattcattaaaattaagaacatggctgggcacggtggctcatgcctgtaatcccagcactttgggaggccaaggcagccagatcatctgaggtcaggagttcaagaccaggctgttcaacatgttgaaactgtctgtactaaaaacacaaaaattagctgggtgtggtggcatacccctgtagtctcagctacttgggaggctgaggcaggagaattgctggaacctaggaggtggaggttccagggagccaagatcatgccactgaactccagcctgggtgacagagcgagactctgtctccaaaaaataaaaaataaaataggccagggcacaggagctcacgcctgtaatcccagcactttgggaggccaaggcgggtggatcatcggaggtcaggagttcgagaccagcctgaccaacatggtgaaatcccatctctactaaaaataaaaaattaggtgggtgtggtgacacgcatctgtaatcccagctactcaggaggctgaggtgggagaatagcttgaacctggggagcagagcttgcagtgagccaagatcacaccactgcactccagcctaggcaacagagtgagactctgtctcaaataaataaataaataaataaaaataaaattaggaacttgtgttcatcaaagtataccactcagaaaatgaaacagcaagctcagaaaatcaagtcatttatatttgataaatgatttctaaccagaatatacaaagaattcttacaaatcaataagaaaaaggccaggcgcagtggctcatgcttgtaatcccaatactttgggaggccaaggtgacaggatcgcctgagcccaagagttagagaacagctgggtaacatagcaggaccacgtctctacaagatgttttaaaattagctgggcttggtggtgtgcacctgtcgtcccagctacttgggaggctgaggcaggaggattgcttgagcctaggagattgaggctgcagtgggcagtgatcaggccactgcacgtaagcctggatgacagagtgagactttgtctcaaaaaaagaaaaagacagaaaactagttttttttgtttgtttgtttgtttttgagacagagtcttgctttctctcccagtctggagtgcagtcacgcgatctcggctcactgtaagctccgcctcccggcttcacaccattctcctgcctcagcgagtagctggaactacaggcacccgccaccacacccggctaagtttttgtatatttagtagagatggggtttcaccgtgttagccaggatggtctcgatctcctgacctcatgatccacccgcctcggcctcccaaagtgctgggattacaggcgtgagataccgcgcccaggcaaaacttgtttttaaaaaaatggacaaaagaggccaggtgcggtggctcacgcctgtaatcccagcgctatgggaggccgaggcgggtggatcacctgaggtcaggagttcgagaccagcctgaccaacatggagaaacccggtctccactaaaaatacaaaattagccgggcgtagtggcgcatgcctgtaatcccagctacttgggaggatgaggcaggagaatcactttaacccgggaggcagaggttgtggttagccgagatcacgccattgcactccagcctgggcaacaaagagtgaaactctgtctcaaaaaaaaaaaaaaaaaaaaaaaaaggacaaaagatttgaacatatagttcataaaagaggatgtaaaaatggtcaataattggacacagggaggggaacatcacataccagggcctgtcggggggtgggggccaaggggagggagagcattaggacaaatacctaatgcatgaggggcttaaaacctagatgacgggttgatgggtacagaaaaccaccacggcacaggtgtacctatgtaacgaacctgcacgttctgcacatgcatcccagaacttaaagtttaaaaaaaaaaatggcccgggcatggtggctcacacctgtaatcccagcactttgggaggccgagacaggtggatctcctgaggtcaggagtttgtgactagcctggccaacatggtgaaaccctgtctctactaaaaatacaaaaattaactgggtgtgatgatgcgtgcctataatcccagctacccgggaggctgaagcaggagaattactcaaacccaggaggtggaggttgcaatgagccgagatcacgccattgcactccagcctgggcgacaggcaagactccgtctcaaaaaaaaaaaaaaaaggccaataaacacatgaagaggtgctcaacgttactggccatcagagaaatgcaaattaaaccactatgagacaccaaaagggttaagattaaagagagacaacagcaagcactggcagggacgtagggaaaggtggaactcttacactgctggtggggagtgggagtgtgtgtcagtacatcccttttgggaaaaggtttagtagtacctactaaagctaaatacatgtgtaccctagtgacccaacaatgccattcctaggtttatagaggatagatgagtgtttacagccacaaatcacatatacaagaatgttcacaacacttcattcataaagctaaaacctggaaacaccacaaatgtccgtcaatagtagaatggataaatggggtatatcacaatgaaatacaaaccagcataagaaagtactaactacagtccaccctccctaactgtgaatactgtgtccacagattcaatgaaccctggactcagaacccgaggatatggagggccaacttcaaaggacttgagcatccatggagtttggtatctgagtggggtcctggaaccaatcccaagaacactgagggaagactgtactgatataggcagtattcatgggtgaatctcatggagataactttgagtaaaagtatgcaaggctggtgcagtggctcacgcctgtaatcccagcactttgggaggccaaggcaggtggatcacgaggtcaggagttcaagaccagcctggccaacatggtgaaaccccatctctactaaaaaatacaaaaaaattaaccggtgtggccgggtgcagtctctcatgcctgtaatcccagcactttgggaagccgaggcgggtggatcacgaggtcaggagatcgagaccatactggctaatacagtgaaaccccgtctctactaaaaacatataaaaaattagccaggcatggtggcgggtgcctgtagtcccagctacttgggaggctgaggcaggagaatggcgtgaacccgggaggcagagcttacagtgaaccgagatggcaccactgcactccagcctgggcgacagagcgagactccatctcaaaaaaaaaaaagactcctataaaaagagaaaagctgtcctgctgctgtggttggcactgagtaaatgttacctgaaagtcttgaaggcctgggccctgcactctccagtggtctcttagttggagatatcccttcatcctcagtcaatcatattatctcccccaggtttaccctgccccagtctaacattgccagttccacaggctaacagagggagaagggcagggcactgcagtgccaagtcttccttatatccagaacaactgggcatcccaaggctgtgcagacagcagcgcctcccccaaggcctgtgcagagacactacttgcctagccctactccctcctccctccccaggactcaccaatctggtcattgccattgcatgaggcaaagtgtagagctgtgcggcccttgtcatcagctgcacagggatccgcgccatcttccagcagctgctgcactgacaccaccaagacagagggaggaagggggagaaagcggcgatgttagctaagctgcagacccgagcgatggagagggaggctcaggggtgcctctagacaagacatcgacaatgcataggaaagcagcccttcctagatgctggtcctatgggaacaagcaacttgttcttctgagggcacaactgaaggccatggattctgagtgctcaaactacacgtctagtgatagaacatcgtaggaggttcaaggccctcagggtcagaaattttagggtcacaggaatccctagcatagacagtggtccccctcccgtgacctcggcttggatacacatccattctggctggaaacagctgcccaagctattggcctatgctatgctcccagcaggcagcaatcccccagctacttggggcctcccaagtagcccccagctaatttttgtatttttagtagagacggggtttcaccatattggtcaggctggtctcgacctcctgaccttaggtgatccgcccacttcagcctcccaaagtgctgggattacaggcgtgagccaccacacccggcccgaaaaaatgtttatgatacacaaaaaattatgcaggctacagcatgtgtatatagcagtttgcaagccagcccataaagaaaattccagtgtataggaaagaagccttgaaggatattcatcaaaatattaacagattagttcctttgcggacatggattttttcttatatatttctctaatttccacaacatttttaaaaaatttttttcttatgttatttatttatttgagacagaatttcgctctgtcgcgcaggctagagtgcagtggcgtcatctccgctcactgcaagctctgtctcccaggttcacaccattctcctgccgcagcctcccaagtagctggcactacaggcgcccaccaccacgtccggctaattttttgtattttcagtagagatggggtttcacagtgttagccaggatggtctcgatctcctaacctcgtgatctgcccagctcggcctcccaaagtgctgggattacaggcgtgagccaccgcgcccagctaacatttactttttgtagagacgaggtctccctatgttgtccaggctggtctcaaactcctgagcccaagtgatcctcttgccttagcctcccaaagtgctgggattacaggcatgagccacctcacctggccgtggcagctaagttgagtattcactcccattaaccacaagttccaaagttagtgcctactctttgcagaagactgtgctggctgccagggatacaaaagtatacatggtctccaccatcaaggagtccacagggtggtaaatgctatgacatcaggaagttcaaagtgacaggggagcatggggagagtgagtgtctaagccagacttaccttcagcaagatgactgcacagtcagacaataaatacagtgagcctgctccaagggcgtgagtttgcagactgccttcccacatattgattacctggccttttccttccccaaccagcccatgggaccctgtagctggacctactgtgcacactcacctgtttccacatcattggcattggccgagtccctcagtctcttcagagctgtaaagagagtaacggatgccagtttaaaaaaacagccatggctgggtgcggtggctcatgcctataatcccagcactctgggaggccaaggcaggcagatcacaaggtcaggagatcgagaccatcctggctaacatggtgaaaccccatctctactaaaaatacaaaaaaattagccgggcgtggtggcaggtgcctgtagtcccagctactcgggaggctgaggcgggtgaatggcgtgaacctgggaggtggagcttgcagtgagcagagatcgcgccactgcactccagcctgggtgacagagtgagactccgtctcaaaacaaacaaacaaacaaacacacacaaaaaaaacacagccattggctgggcatgatggctcacgtctgtaatcccagcactttgggaggccgaggcaggtggatcacttgaggccaggagttcaaaaccagcctggacaacatggtgaaaccccatctctactaaaaatacaaaaaaattagccgggtgtggtgcacatgcctgtaatcccagctactctggaggctgaggtaggagaatcacttgaacccaggacatggaggttgcagtaagccaaaatcgcgccactgcactccagcctgggtgacagagtgagacgctgtctcagaaaaaaacaaaaacaacaaaaaccaacaaaaaaaacccagccatctagctgggtgtggtggtgtgcacgtgtaacaccagctacttaggaggccgaggtaggagaatgggttgaagccggaaggcggaggctacagtgagatgagatcacgccactgcattccagcctgggcaacaaagtgagactgtctcaggaaaaaaaaaaaaaaaaaaagccacaatggctgggcgcagtggctcatgcctataatcccggtactttgggaggccaaggcaggtggatcacttgaggccaggagttcaagaccagcctggccaacatgctgaaaccccatctctactaaaaatacaaaactagccatacgtggtgactcacgcctgtaatcccagaacgttggaaagctgaggtgggcagattgcctgtgctctggagtttgaaaccaccctgggcaacatggtgaaaccttgtctatactaaaatacaaaaaattagttgggcatgggggtgcacgcctacaatcccagctacttgggaggctcaggcaggagaatcgcttaagcccaggaggcagaggttgcagtgagccaagactgtgccactgtactccagctcgggcaacagagtgagactctgtctcacacaaacacacacacacacacacacacacacaaaaaacataggccgggcacagtggctcacgcctgtaatcccaacactttgagaggccaaggtgggtggatcacgaggtcaggagtttgagaccagcctggccaataaggtgaaatcccttctctactaaaaatacaaaaattagccaggcatggtggtgcatgcctgttatcccaactactcaggaggctaaggcaggagaatcacttgaacttgagagccggaggttgcagtgagccaagatcgcgccactgcactccagcctgggcaatagagcaagactctgtctcaaaataaataaataaataaataaataaataaataaataaataaataaataaaataaaaacacaaaaattagccgggtgtggtggtgcatgcctgtaatcccagctacttgggaggctgagacacgagaatcacttgagcccaaaatcacaccatggcactccagcctgggtggcagagcaacactccatctcaaaaaaaaagaaagaaaaaatatttctcaatcttaggttaagttctaacttaaatcaatctaacatggtaaaaccccatctctactaaaaatacaaaaactagctgggtgtggtggtgcgggcctgtagtcccagctacttgggaggctgaggcagtgagccgagattgcaccacctgcactgcagcctgggtggtaaagcgagactctcgtctcaaaaaaagaaaagaaagacagtgccctgggaacaaggagaaacttgaaatgaggcggagctagtacaaaggccacatcctcctgcaaatcctccaagacttttggagccagatttcctctctatcacttgtagtcacagggtgaccttgagcaagctagttaacccagctgggcctcaggtctatcatctgcaaaacaaggctgagttgttctgccagccccgagttattgcaaatgatttacacagaagctctttgtgagctggttacacagataatcttatattctccttcaaagcaggtcgttcccaaatgatttgcctaaatttggtatttcctaagcagattttccccctccaatggctaatggaaagcaatgtctttgtcatcggagatatggtcaaaaattgcaattcagatacatgacaattccttgctttcatacagcactttatggtcaatacaacgcttccaaattcttatttcatcttcgtgacatcactaaaatatggctagagtcatagccagtcctggaagaaatccccaaagtccccattcttaatctctcagtgcctgggtttccatgtcacccatgcattgtagaagacaatatggtagatataccagaggagaagtttgagtcgggctgacccggattctaataccagcaacagccacttgctatgtgacctggaataagacaatttctctgagcctcagtttcctcttcagtaaagtgggaacaatttctatgtctcaaagagttcttgtgaggacagatgatcatgtatcagcagtgtttggggcacagcaaaggcagcataacagctaaacatccattaccttacttaactcatcccattttacagatgagaaaactagggctgaggccgggccagtggctcatgcctgttatgccagtactttgggaggccgaggtgggtggatcacctgagatcagaagttcgagaccagcctggcaaacatggtgaaaccccatctttactaaaattacaataattagccgggcttggtagtgggcgcctgtaaccccagctactcgggaggctgaggcaggagaatcgcttgaacccggggggcggaggttgcagtgaaccaagatggcgccactgcactccagcctgggcaacagagcgagactccgtctccaaaaagataataataataaataaataaaaataaaaaaatttaaaaagaaaactaaggttgaaagggtctatcatttgccctaaggtctaactgtggtaaaggagtccaagtccgtgcatttaaacaagctggtacgacttggctgcaggctctggcctcccctctccatgataataaaagtgttccccagtacctcattttattattcaccaataagcgttccgagtcatgggaagtttccattcagaaattacccagtgagagaagactggggtgactggctcagagcaggaagactttctaaaaaaaccatcatcaccatcgttactgaaaggagactcaagggtcagtgtggccctcagcgcagacgtcgggggaccccggctgagggtcgggggcgaccaaagcgcggccactggtcctctgaggccccgcccctcgcccgggctgccccgccccgggcccccgcgccgctcgcgccgctcaccgtgcacctccttgcccgtgggcccgagccgccggtggggcctggcagcgcgcctcagccggccagcgggtatcttgcagcgcagctcgtcgcgcggctccgcatcctgctgccacaggacgtgcaagtagcgcagcggcgactgggccccgccggacgcccggcccgagaggcccgcgccgccgccgcccagcgcagacccgaagtcagcgaaggagaagaggccctcagcgtcagtcagcggctccggcgccaccgcgcactcgccctccgagctcgagtggcctgagcgcggctcgtcgtccgcgtccccggcggcggctgccatggcaacggctccgcgcgggcctggccgcctgagcctcgttcccgaccgaccaacggacctacttccctccgccctgagtcgtgctgtcagcgagctggcgggcgggcagggcccgcaaccacggcaaccgagcgggggcgggctcaggccgagacagagcggcgaaccaatgactacccttccagcttaaaccggtcccaaaaccaatcggaaagggagggcacagtacaagcaggataattggacagggtttccggcaacgtgactgacagacattgtaaccaattacaaacttgaagtgaccttggctttcgctgtacgtcgctaccggagccagtaaaacagcatttcagacgctttttttttgcgacggagtctcgctctgccgccaggctcgcgatctcggctcactgcaacctccgcctccttgaagcaattctcctgcctcagcctcccgagtagctgggactacaggcgcgcgccaccacgcccagctaatttttgtatttttagtagagacggggtttcaccatgttggccaggatggtctcgatctcttgatctcgagatgtgccggcctcggcctcccaaagtgctgggattacaggcgtgagccaccgcgcccggcctttttttttctttttcctctccatttcccagtctaatgagaaaacaagcagataccttagcaaatcagattaagatgatttgcaggcactcacaaaggaaaatgaagaagccacgccatccatgtagatatagatgttgtaaatcaatgaacgcaaaaaaaaaaaaaaaaaagaacttcccacaaatgcataatgtacgtgggaaagggaaaatgtgttgaaatttggagataccactacaaactgtgagtaatagtgtctaaatgcaatggatttcctttagtcagagttctctaggtaaccccgacgtagatgactgatctacaaagatttgtaatacaaagtgattacattagagcaatagtttagttcgacagccagtcactgagccaggtaactgctaggtcctggacacaggatcagacttggtgcccctgagatgctcacaatccaatgggagaagaccaggaaacaaataagtgttcctcaagcaacatttcatgggtgcacgttttcataaaacttctcacaatcccgtaccccacaagcacttctataaagtagacaagaaggaccatccctattttataggtgaggagttgaaaagcagagggaagagactcattcacagttgcccagctctcaccggaccaggtcttgtgtcctggcaaaagttctttccatatataaaccctcccactcaacccagttaaaatgtaatctttccgcacggtgggtcacgcctgtaatcccagcactttgggaggccaaaatgggcagatgacaaggtcgggagttcaagacaagcctggccaacatgatgaaacctcgtttctactaaaaatacaaaaattagctgggtgtggtggcgcacgcctgtaatcccagctattcaggacactgaggcaggagagtagcttgaacctgggaggcagaggttgcggtgagctgagatcgcaccatggcactccagcctgggtgacagagcgagactccatctcagaaagaaacaaaaacaaaaaaaaggcctggcgctgtggctcacgcctgtaatcccagcattttgggaggctgaggcaggcagatcacgaggtcaggagattgagaccattctggctaacatggtgaaaccccgtctctactaaaaatacaaaaaaattagcctggtgtggtggtgggcacctttagtcccagctactcaggaggctgaggcaggagaatggcgtgaacccaggaggcagagcttgcggtgagccgagatcgcaccactgcactccagtctgggcgacagagaaagactccatctcaaaaagaaaaaaaaaagtaatctttctcttacaattggaaaagcacttccagaattttcagtgtttgcagtcgccattgtgaggtttatcattgtactatatggaaaaaaatgctatgtttatttgtactctcctcgtctgccccataatggatacagtgctgagacaggatctctcactgtcactcaggctggagtgcagtggtgtgatcacagctcactgcactcaagctttcctcccacctcagcctcctgagtagctggggccacagatgtgtaccaccgtgcctggctaattatttttttgattttttgtagacatggtctcacttttttgttcaggctggtcttgaactcctcgcctcaagggatcctcctgcctccacatcccaaaatgctgagattacaggagtgagccacagtgcctgggccccaatttttttttaagatggggtctcactatattgcccaggctgatcttgagctcctgagctcaagtgatcctcccaccttggcctcccaaagtgctggcatgagccaccacatccagccccatgaaaatcttctgacttcacaactccttctcaaatgtcatgaacattttgagaattgttgtcaaattggagcaacctgtatcaaattcctgtcatatatggactataagatttcaggtaatttcttttcttttttttttttttgagacggagtctcgctctgtcgcccaggctggagtgcagtggcaggatctcggctcactgcaagctccgcctcccgggttcacgccattctcctgcctcagcctcccaagtagctgggactacaggcgcccgccactacgcccggctaattttttgtatttttagtagagacggggtttcaccattttagccgggatggtctcgatctcctgacctcatgatccacccgcctcggcctcccaaagtgctgggattacaggcgtgagccaccgcgcccggccaatttcttttcttttttctttttttttttgaggcagttttgctcttgttgcccaggctggagtgcagtggtgcaatcttggctcaccacaacctccgcctcctaggttcaagtgattctcctgcctcagcctcccgagtagctgggactacaggcatatgccaccatgcccggctaattttatatttttagtagagacggggtttcactatgttggccaggctggtctcgaactcctgacctcaggtgatccatctgccttggcctcccaaagtgctgggattacaggtgtgaaccactgtgccaggcctcggagaagggttattatttaaactagaaactaaatgtctcccaaagttagctcggttcgagccaggaatgattaagggcagtctgaagattaaatggaagatgagggttggttagatcagatctctttcactgtcattattttctcactgttacaatttttgcaaaggtggtttcagcaataaaaatatttcacaaattttacaaaagcaaaggaccatgaggacattgttggggaccctccctgaaccaaggaagagactgtgactcttccttggttcagggaaggtcctgaaccaaatcgagggtcggtaaagcttaagctccattatttccaaatttgtgtcacctctggtgacagcacaaggaagaaacacaaaacaagaacgcagcatagggagttggggctgggcattgcaattctcaataggatgttgagtggatggcatcagagcagacacctgaaggtgccatgcagataccgatggggaagggaatgggagtgggggtgccactgcattcgattctagacttggataacagtgagtgcaaaatcccagaggtggagcgtgcctcagtgggaaaagcaaggagggcggcgtgacaaagggacccagagagtcctggtcacacagcaaatcagtggcggagtagggactggaactcggatttccactaggtgttgtgtatgggcagatggctaaactaaggcctctccttgactcatacaccggtttttattggtttgctttataaccccatctctaccttgagggtttcccctggcctcgaacccggtgtactcaagagctgcccatgtcccaggcttcgcgacacagctggcctcatctttgcctgctccaactttaatgtccaaagttgggtggctcctgttctccattccctcttactgcatgggaccaaatctcaatttttttttttctttttttttttagacggagtcttgctctgtcgcccaggctggagtgcagtggcgcgatctcggctcactacagcctctgcctctcaggttccaccgattctcctgcttcagcctcctgagtagctgggattacaggcggacgctaccactcccggctaatttttgtatttttaatagagacggggtttcgccatttcggccaggctggtctcgaactcctgatctcagatcatccacccgcctcggcctcccaaagtgtagggattacaggcgtgagccatcgcgcccggccaaatctcaatttttatccccagtaagtttagtcttgtgaagtccgaacgtttgaataatttactcgctgcaggcaaaccgcctacaactaaatccatcaggcccccgtatccgaatcttccttcacgcgagaagccggccatcttttgtgtagcattctttctggttcctctaactttgcctctcctttacgccaaatacgtgtccttatatctgaatctacaccactattatagattcaccttctttgagaagtccctatttgaagagaggaaaattcaggctacttgtaaccctcttattctttttagacggagttttccctcttgttgcccaggctagagtgcaatggcgcgatctcggctcaccgcaacctccgcctcccgggttcaagcgactctcctgcctcagcctcccgagtagctggaattacaggcatgcgccaccactcccggctaattttgtatttttagtagagacggggtttctccatattggtcaggctggtctcaaacccccggcctcagcctcaggtgatccgcccgcctcggcctcccaaactggtggggttacaggtgtgagccacggaacgcggctcctcttccttctggatatggctgtctcagatggccagaggcctcggaaaggcttccggtttcccggcaggcccgagtggggctgaacttccggcctcaggacgcaggcgcgggccgctcatttcgctctttccggcggtgctcgcaagcgaggcagccatgtcttatcccgctgatgattatgagtctgaggtaaggtggccgtaagggcgcggtgggctccacgacggggtgatctctgggaccactggatgtgggtcccggcgcgaggcagcttccgggtcgcggccagctccggccgacctcccgcccggccctcaggctgctcccacagttcccggtccctagacaaccctggctctgcccgcccacttcgcgtgttcgattggcttgtccttcccctttctaagaccggagactaaggcctgttagacgtttctgtgtttctgcacctgagtttttttggtctaggctccgtctggtcaaatctcgctgattcccacagcctcttgtcctttgctccacctcattgcacccgtaatgttgtattgtcattgtctgtttactgtcccttttctctaaggcgtgtgagttcctcaaaggcaggcacagtgtcttattcgcctctgtatccttagctctctgcttggcatctagactctaggatgagcgttttgaattcacgacttggcggctgtccttgactgtgtctctttccttctaggcggcttatgacccctacgcttatcccagcgactatgatatgcacacaggtgagaccacgggttaggctggctgagtactcgtagggatcagttcctttggaatgtcttagaaccagctctgacaggcatcaaaaattgctctttgatggtccaggtttggagtcagtcattagctgccagtgcgaggggttttataaagcctaataaaccaggctttttatcatagtccacctcagtcttggaagagaaggattacttacctggctatggttttcttgtgtaaactattagccaaataagaaaagcttttttgtttttgtttttgtttttgtttttgagatggagtttccctctgtcccccaggctggagtgcagtggtgcgatctcggctcactgcaacctccgcgtccctcgttcaagcagtagttctcttgtctcagcctcctgagtagctgggattacaggcgcccaccaccattcccagctaatttttaaatttttttaatagagacgaggtttcgccgtgttgtccaggctggtcttgaactcctgacctcaggtgatccacccgccccaacctcccaaagtgctgggattacaggcgtgagccaccgcgcctgccccaaggaagaaaatcttgatgtgaaaaatttaagtaattcaaaccaagcccgaatgaaatctttttaggaggtgtctgaggtttcctgaaacgttatagtgacttgacttagtagtcagtgttatccattgttctaagtactttgtatgaaatattttgtttaatccttacagcagttctgtatgttaatgtctcctaaagaatagaaaatatagcagagaggtttattagtagtaacttggcacagtcatatatttaaaaggtgacagttattcattcaagaaatattaagtacctgttaccacttactttccaacagtcttgcctctctcccctccaacgcacacttttctaggccctgagggtatgtctgagtacaagacagacgagattcctgacttcctagacttgggagaagggtgcaaaacagataataagtgaaaaataactttaagtcatggtaatatttttgaagaaacagggacaacgagattgggagtgacttgagatgtttgtatctctgagtattcaaaagggaattttacgcagacctgagtttagtttctggggtggtcttgccatttcgttctatcatatatgtgggtttgagcatactctgtatttgttgtatccaacctccaggagatccaaagcaggaccttgcttatgaacgtcagtatgaacagcaaacctatcaggtgatccctgaggtgatcaaaaacttcatccagtatttccacaaaactgtctcagatttgattgaccagaaagtgtatgagctacaggccagtcgtgtctccagtgatgtcattgaccagaaggtgtatgagatccaggacatctatgagaacaggtatgggctactggctgaaagggcctctttctgggtgggactggcctggtaatatagttcctacaaatgaggtgagcactctgtaaacagtactttcgggggggttggggggtgggggtctttgtgagtccttgaggctagggacattttattttgttagactttattttatttatgcatttgtttattttttgaaacggagtgtcactctgtcgcccaggctggagtgcagtggcaagatctcggctcactgcaacctccgcctcctgggttcaagtgattctccagcctcagcttcccgagtagctgggactacaggcatgtgccaccatgcctagttaatttttttgtatttttagtagagacagaatttcaccatgttggccaggcgtgtgttgaacccctgacctcaagtgatccacccgcctcagcctcccaaagcactgggattacaggtgggagccaccatgcctggcctaatttttgtatttttagtagagacggggtttcatcatgttggccaggctggtcttgaacttctgacctcaagtgatgtacccccgttggcctcccagagtgctaggattacaagcgtgagccaccatgcccggcctgttggactttatatcctcagaaatttatacaaagcctaaaataatatcactattaacaattataataataatgattagcatttgtttttattaccaggatagatccatcaatgttcagtgtgttgtttgtgtttttactcatttacccttcacagtaagcccatgaagtagcagtttttctcattttacagatgaggaaacagcacagaaataagtcatgtagctagtttaatggatgtgctgagatttgaacctgcagtgtctggcaccaaagcctaatttctaaactgtgctatgcagcccttcagtacatatcagagcaagctgaactccgcaggttttgaggggctgccgttgtgtaatgagcgttagagataagataggtcagtcaaagctgggatagtcaggagtgacttcaccaaggaaatagaatttaagcaagtcagaaggatgagggagagaaaacaaatagccaaaggcctattgatcaatgaataggatctctgacatgtgttttctttttttgttgttttgaaagagctgattgtagttgaaaagcagaggaaacctcagacattgcatggttttaggcctcacccctgccactctcgtgagcctaagttctacttggtgtggactccaaggtccttcccgcccctgcaagccacccattaggttgagctgagagatcagccaatgggaacagagtcacttatgaccaagaagaattgatctgggggttagttagtgaggagagagaaagggagaaaaccttgttcggaggttgaacacctccagccgaagaaggtgcagcatcgaggtctttcaccactagcaaatggatccaagtcatgcggcaccaaaagaggttagcagctgaagggtgttgaagtgacacaacaccaaaacatgctaccaatgatgaatccgtatctgtacaggtctccagcagcctcagttcttgcctcctcaaaagaaagaattcgactgaggggtaaaatgctaccgatgatgagtccgtatctgtacaggtctacagcagcctcagttcttgcctcctcacaagaaagaattacactgagggctaaaatgctactgatgatgagtctgtatctgtacgggtcgacagcatcctcagttcttgactcctaacaagaaagaattcgactgaggggcacaaggcagaagaagagagggaggcaagtttgagagcaggagtgaaagtttattaaaaagctttagaacaggaatgaaagaaaggaaaggacagttggaagagggccaggtgggtgacctgaaaggcaagtgtgctgaactgtgttttctttattccccgggtcttttctgattagaagtatataaatcagcgcctacaaaaattagctggggcatggtggcagcatgcctatagtcccagctagttgggaggctgaggtgggaggatcacttgagcctgggaggttgaggctgcagtgagctgcacaatggagcgagaccctctctcaaaattaaaaaatggacctgatgttcaatagaaatgtagctagacattaattttaatttttcagccaagcgaagtggagatttatttaaaatattatttctatatgtaatcagtatttaaaaattaaggggatatttgcccttttttttctttatacttaaagtttcctaaatccagtgtgtatcagaaatacttgctttgtgtttagattttatagagtttatgactggaaaagtaattcaaatttgaaatttgaatcttcaaatagtagagtaattccaaatagacctaaaagttttccaatactgagttaagtgttggtttttaaacttaaatggcaactaactgaaatttaaaatttaactctttgcttatatagtagccacatgtagctagtggctattgcattgggcagtgcccgcagatacagatgacagttgaagccaagcatcttgtaagtctttctctaggagaatgtgagaagaaatgctggtgccttaagaagtatgtttctttagggatgggtgggcaggcaaagaaaggatctagtaaaggaggcagaaagaaaagtgaaaagtagatagtaaattggcaaagaaatgtcacaggaaccaaaaagtctgcagaagaaactgaggaagagagtatcaccaaatgttttagtgaggtccagatgagaaaaaaagccagttgaatttggtaacttggagggccttgataaccttagcaaggtcaatgtcagtagagtgatggaagcaacagccagagagcagtggggtgagaaaggggaattggtaagtatcggggacataaagggtcactgagtggctttgtgttttgtttctgtgttttttctgtttttgttttttgttttttgagacaggatttcgctcttgttgcccaggctagagtgcaatggcgcaatctcagctcatcgcaacctccgcctcctggctccaagcgattctcctgcctcagcttcccaagtagttgggattataggtgtgcaccaccatgcctggctaattttgtatttttagtggagacggggtttcaccgtgttggtcaggctggtctggaactcctaacctcaagtgatccacccgcctcagcctcccaaagtgttgagattacgggtgtgagccagcgcgcctggcctgtttcagtgtttcttttctgttctgtttctgtgtttctccccaacccccatcccgtagagacagggccttcctatattgtccaggcttgtcttgaattcctgggttcaagcgatacccctatcttgtcctcccaaagtgttgagattacaggcgtgagccatcatgcctggcctgttcagtgttttttaggggaacttgagcatgtttatatgttggactaaaagagccagagaagcaggaggggtggggcttgaggagattggaggaaagtattaatagctgctgagggcatcaggagaagaaaattaaacaacctgttgcaggtttgtcaagtagcagtgtttggattggataggcagcagtgtttaaattggatgctgtaggtctgttgtggccttggactgcagcagactgatttgcttctgtgtttagagacgtttggatgtgctccaggagatggaaacgctgtgttaaagaatggtggccaaaaaagtagttcttatagcagaaaacagcaagcagttaaatatggctatagttaatgatacagaggcaggagattatcctgaaaagcttgatgggtccctaactgatacaaaaacaatattttcttgtgttgagaaagattgaagtgtggagttgggttgaggacagttgtgggcttgaagggctttggcctcagctctgtttatttgacatcttcccctttctaagcctgggtcctcatctgtaaaatgttaggattggcattctccagtccttttggaattttagagatttttttcttgatttttagctggaccaagctgactgaaagattcttcaagaatacaccttggcccgaggctgaagccattgctccacaggttggcaatggtaggtgtgagctctttatatcttgtgcactgagtggaatccagtggctgagtcattagacaggaagctcaagagggtctgtgtctgttttgctcaccattttgtttccttggtgcttggtatgtagtaggtccttggcaaaataacttgtcgaaggctggatgatttaagagaggacagagatctctcatatatggtgaaatttagatctttgtactgacttgtttctatttccttctataatttgggggtcattacagtcactctggaataagctctctagcttcccacctttgactttcttagatgatgtcctttatatatgggtgaggtaggcaaatccaacttcattattttgcttgtggatattcagctaccctggcaccaatttatttatttatttattttattttattattattattttttttgagatggagtctcgttctgtctcccaggctgaagtacagtggcacaatcttggctcactgcaacctccgcctcccaggttcaagcgattctcctaggttcaagcaattctcctacctcagcctcccgcgtagctgggattacaggcgcccgccaccacgcccagctaatttttgtatttttagtagagacggggtttcaccgtgttggccaggctggtctcgaactgctgacgtcaggtgattcgcccacctcagcctcccaaagtgctaggattataggcatgagccaccgcacccagcctgcccagctaatttttaaaaattttttgtagataccgggtcacactttgttgacctggctgatcttgaactcctgacctcaagtgatcttcccagagtgctgagattacaggcatgcaccactgtgcccagccacattgtcttgattactatatttttgtagtaagttttgaaatggggaattgtaggccgggcgcagtggctcacgcctgtaatccaagcactttgggaggccgaggcgggtggatcacctgaggtcgggagttcgagaccagcctgattaacgtggagaaaccccatctctactaaaaatacaaaatcagccgggcatggtgacacatgcctgtaatcccagctacttgggaggtggaggcaggagaatcacttgaacccggaaggcagaggttgcggtgagccgagatcgcgccattgcactccagcctgggcaacaagagcgaaactccgcctcaaaaaaaaaaaaagaaagaaagaaattgggaattggtaagtcctccaactttgttctttttttttttttccccaagattgttttgactattctgggtctcttggatttgcttattgattttaggatggacttgtcaatttctgcaaagtagccagctgggattttgagaggaattgcctagaatctgaagatcactttggggagtattgccgtcttaacagtattaagtcctccaggccaggcgcggtggctcatgcctgtaatcccagcactttgggaggtgaaggtggacggatcacgaggtcaggagatcgagaccatcctggctaacacggtgaaaccccgtctctactaaaaatgcaaaaaagttatctgggcaggccggcatggtggcgggcacctgtagtcccagctactcgggaggctgagacaggagaatggcgtgaacccgggaggcagaacttgcagtgagctgagattgcgccactggactccagcctgggcgacagagcaagactgcgtcccaaaaaaaaaaaaaaaaaaaaaaaccaatattaagtcctccaatctatggacatgggatgtctttgatttatttaggtctttggttgcgttcaccagtgttttgtgttttcagtgtacaagtctctcatttgttttgttatagctaacgtttttttgaacacttaactccttttttttttccccctaagatggagtcacggagtcttgctgtcttgcccaggctggagtgcagtggcgcgatctctgctcgctgcaacctctgcctcctgggctcaagcaattctcctgcctcagcctcccgagtagctgggattacaggcacctggcggattttttgtatttttagtagagatggtgtttcaccatcttggccaggctgattttgaactcctgacctcaaatgatccacccgcctcagcctcccaaagtgctgggattacaggcatgagccactgcacctggcctgaacatttactctcaattgactaaacacagaatgagttcaaaactcattctgtggctgggtgtcgtagctcacggctgtaattctggtactttgggaagctgaggtgggaggatttcttgaggctgggagatttagactagcctgagcaacatagggagacccccttctctacaaaaaattttttaaaaaaattatccaggcatggtggcacatgcctgtagtcccacctactcgggaggctgaggtggaaggatcacttgagccctggaagtcgaggctgcagtgagccatgatcatatcactgcactccaaccttggcaacagagcgagaccctgtcttcaaacaaacaaacaacattctgaaattaatattttctttcttcctttttttttttttttttttttttttgacatgggggtctcactgtgttgcccatgctggagtgtagtgtgataatggctgactgcaacctgtgcctgctgggctcaagcgatcctcccaccttagcctgccgagtagctgggaccatgggtgcgcaccaccacgcttgtctaattactcttgtgtgctggtttttttatgcacttggatggcagaagtctctaaatggtgaaaggaaatagatctgaatgagatcttaatctcatcgacagagattgaggttgatggagtcaaatgagaagtggattttctcattgcatgtattcttggggcatatgcatagcaatttagatgttgtttagtcttcagaattacctttattcctccccaccaaagagctaaagctgccaggataccccagttttatggttagtgaagcacccttctgccatctctttcagatgctgtcttcctgattttatacaaagaattatactacaggcacatatatgccaaagtcagtgtaagtatttaagtgtcgcagttttttttttgtttttgtttttttaactctgtgctgtttttgtccctagaacacagtcatttgtttatattggttcagtgtctgggcatgattggcatgtttttgagttttaagaagcggtggaaggaacagtttaacccagaaagctgttcagacacactaacgctatataacctatgcattcttttaaatttctctgtccccacaattctcctggactgggcaatcacccatgcactggttataggctgccagcctcataggatatttccaggtacctgctgctgcttctgcttggggttctttttcccttcagagcattgagcctctgtttctctgagatgtacataacactgtcactgtatgccaagcacaatgctaggcacttagcacacatcttcacatatctaattctactatcaatcgtgcaaagttggtacccgaggtgccaagaggttaccttttctcaaatttatccagctagtaagtgacaaaactccttgaatctagaccagcttgttataacaccagtattctacacattatcccaactttgagcacttgctagattctgttcttcccgacttctaaattatagagtacgtgaagtttctttttttttttttttttttttgagagagagtgagtctcgctctgtcgcccaggctggagtacagtggcgcgatctcagctcactgcaggctccacctcccaggttcacgccattctcctgcctcagcctcctgagtagctgggattgcaggtgcctgccaccacacctggctaatttttttgtatttttagtagagacggggtttcactgtgttagccaggatggtctccatctcctgacctcgtgttccgcccgccttggcctcccaaagtgctgggatgacaggcgtgagccaccacgcccggcctagagtgcctaaagtttcttaaaatgccatctgtactatttaaggctgggcgcggtggctcacgcctataatcccagcactttgggaggctaagggcaggtcacctgaggtcaggaatttgagaccagcctggccaacatggagaaacctcgtctctattaaaaatatgaaactacaaaaataagctgggcgtggtggcgggtgcctgtaatcccagctacttggaaggctgaggcaggagaatcgcttgaacccgggaagcggaggttgcagtgagccgagatcgtaccactgcactccagcctgggtgacagagtgagactcttgtctcaaaaagaaaagaaaaatgccatctgtattatttatatacaccaatgacttaatctctatctttagcctcagttgccccactgaagtccagacttgtatattcagctgtcagcatctgcacttggctgtctgagtcatctgaagcttaacacatctaaaactgaattcttattttccctctaaactagtttttctcatggtaatcatctcaataaatgctaccgtttattaccaagttaattggactaaaagccttggcattattcttgacttttctctgacatgatatccagcaaatcctgttaagctctgtcttcaacatacttctttttgttgttttgttttattttgttttgtttttgagacggagtctcgctctgtcatccaggctggaatgcagtggcgccgtctcggctcactccaacctctgtctcctgggctcaagcaattctccaggctcaaacgattctccttcctcagcctcctgagtagctgggattacaggcatgcaccaccacgcctggctaatttttgtatttttagtagagacagggtttcgctatgttgcccaggctggtctcgaactcctgacctcaggtaatccgcccgcctcggcttcccaaagtgctaagattacaggcgtgagccactgtgcctggccttcagcatacttcttgaatcagccacttttcactgccacactgctgctcacctagttgaagtcattatcatctcttccctgaattactgcaggagctgcttacctggtgtcagtttccactcttggctgtttattctcaacataataaccagcatgatccttttgctacatagtttcatcaggtcacttccaatcctaccatgacttcccatcacacttactaattccaggttttagccctgtttcccttctcactcatttcctgaaactttccccctccctccctgggctcctggcaatattcgtggcacttcagagcacttatctcttgtacgttgtatttgtttatttaggggagggagtttcttaatctactggaaggttaactccaccggggtatgtgcttgtcttgttcaccaatataatccagtgcctagaataatgtctggtcataatggtgttaattgagcatgtgtgtgcttgcatgcatgtgtaagtgaaggaaattggcaccaagatctccacctaaggaggtcctagtttctcacagttactcacccctcttctccttgaggaccgcttgatatggctagaactcctgccttggccacaggagccactgtcagtagtggtaggtggaaaagttcttgctgccagagtaaggggccatgtttttccggcatcccagcgggatctctgactactttatctgatagaaagtaaagattcctggccaggcgctgtggcttacgcctgtaatcccagaactttgagaggctaaggcgggtggatcacgaggtcaggagttcgagaccagcctgaccaatatggtgaaaccccgtctctactaaaaatacaaaaattagccaggcgtggtggcgtgtgcctgtaatcccagctactcgggaggctgagacggaagaatcacttgaccccaggaggcagaggttgcagtgagctgagattgcaccgctgcactccagcctaggcaccagagcgagactccgtctcaaaaaaaaaaaaaagtaaagattccctactaccattgatgctaaagttcaggtactttgtggatatgctaagaatctagccattatgtgtacactgcttttttgggaacaccatgacaccatagcccatagtatagctggttttaccacctctaatctctctgtttggtctgtagatgaagattcagcagaagcttattgatgctgttatctttttattagctaccaggactcctacataaatgaccagttttaagcccttgggaagcagtttttcattgaatgtgcttagattgtgcttaatgtattaagcaccttacataacttttattaaacagagacggggtcttgccatgttgcccagcctgttctcaaactcctggcctcaggtgatcagcccacttcagcctcccagagtgttgagattacaggcgtgagccactgcgcccagctatataatcttacttcattgtgactagtcaacaatcttttgcccacattttacagagattaaataccttgtgagaaccccacagttaataagaggtgggactgactccaaagttgtgtttcttctccatcacaaatacattgctcatggtatggttccccagctcagaaactatcagtggttctcagatgcaagcaacataaagaccagaccaggggtcagccaccttctctgtggagggtcagataataagtattttagtctcgagggccatgatggtttctgtcagatctgttcagctatgtctttgtggcagttatcaacaatatgtaatgagtgggcatggctgtgttccagtaaaacttctttatttacaaaacaggtggcggaatagatttgcaggccccctgacctagatgcttgtttggcgttggaagactgcaacattcctggcccgtagtctagtgatgcccggtgcagcattatcttctcttaactccctagccttcaagtgccacgatttaacttcttcgcctttgctagtgtggtttttttctgaaacacttttccttctctctgctttgccagatcatcatccctgctctgagggtcatttaaggtctgttgctgtagaacctaaccacgtgttgcagtattcagtgcgtcagctgctataggactttctatcttccctctcacttgcatatttacatagtaagaaagagaggacagataccaattctcttgtatttgttcacagctgtcacagtataccatgggtaaaacacattaaaattaaatatctgtatcttgatatctcttgttttctttacaggggggaccttccttggagcagaggtttgaatcctattacaactactgcaatctcttcaactacattcttagtgagtctgagatttggccaagagggtgtgtgtggttatgatgaggttcagcattggcctccagcttttttttttttttttttaaattagcaggatcttaatgtgtaggtgggaagaggggaggtcttgtgattcatggtccttttaagagagaaattacaaagcattctgcagcctacagaatgggcagagtcattgctttgaatctgacttttctgtgatctcctgcacagatgccgatggtcctgctccccttgaactacccaaccagtggctctgggatattatcgatgagttcatctaccaggtatctggtcagcttcagcctaatttgaaataactggtccatgccaggaatagctgttactattgtttgtgtaaaaaagctgcagggtgtaaaaatatccccattgtagtgtaaaataccccatggcagtagactccagtttcagctggctttcggaagaggcagggaagcctaagcactccagataggaagctggaagtcggataagttcagctcctgaccttcatcaagctcttactagaccttgttaggtggtctggtggtaagaacacaggcttcacaggctttggagcgaggtggaagtggattctaacttgggtgctgccacctgctggtagctctgtaacagtgatgtgctatttaaactcagagcctcactttctttacccacacaatggaaatgttctattatctttttttttttaagagtcagggtcaggccgggcgcggtgactcacgcctgtaatcctagcactttgggaggcagaggcgggcagatcacgaggtcaggagatcaagaccatcctggctaacacggtgaaaccccgtctctactgaaagtacaaaaaattagccgggcgtggtggcaggcgcctgtagtcccagctactcagtaggctgaggcaggagaatggcgtgaacctaggaggcggagcttgcagtgagccaagatcgtgccactgcactccagcctggtaacagtgcaagactccatctcaaaaaaaaaaaagaaagagtcagggtctcactctgttgctcaggctagagtgcagtgataatagcttactgcagcctagaactcctgggttcaagtgattttcccacctcagccacctgagtagctgccactacaaggcccacaccaacttacgtggatatttatattactgtagagacgagggtcttgctgtgttgcccatgctggtgttgaactcctggcctcaagtgagcctcttgacttggcctcccaaagtgagccaccatgcctagccatctatatcttgattgtggtggtggttacttaagtgtatgctcgatcagaatacaatagaacattttcatcacaacaagaatatcacctacctcaggagttgctgttcaaggtcgaatgagaactgtgccaaatgcaaataaagtacagcagctgtgtagcctgggggtaaaagtccaggttttgctgttgctgtttactggctttttttttttttttggagatggagtctgactctgttacccaggctggagtgcagtggcattatcccggctcactgcaacctctgcctcccgggttcaagcgattctcttgtctcagcctccccagtagctgggattacaggtgcccaccaccacgcccagctaatttttgtatttttagtagagacggggtttctccatgttgaccaggctggtctcgaactcccaacttcaggtgatccgccctccttggcctcccaaagtgctgggattacaggtgtgagccaccgcgcctggcctactggcccattttaaaatggtaacatgttctgttgtgggcacattacttaaccacactgtgcattggtttccccatctctaaaacggattgctgcgaatgttgctgagatactacgtatagagtgtttagcatagtgcctgtcacagaataattaatacacgttgcctgttgattgtgatgatgttcaatgtcatcattattcttttccatcttatttagcccagtccttctatttaaaaatacagattgctcacaactgtaatcccagcatttttggggtccaaggcagtaggatcgcttcagtccaggagttcgagaaatagagactacaaaacataaaataggctgggcgtggtggctcacgcctgtaatcccaacactttgggaggcctaggtgggcagatcacgaggtctggagatggagaccatcctggccacaatggtgaaaccccatctctactaaaaaaaaaacagctgggcgtggtggtgtgcgcttgtaatcctagctactcgggaggctgaggcaggggaatcgctcgaacccgagaggcagagcttgcagtgagccaaaatcgtgccactgcactccagcctggcgacagagtgagactctgtctcaaaaaaaaaaccaaaaaaaataaaatatataatttgacaaaatataattcttttccccctttttgtgctgtctatagctctaactgattatttcaggataaattggtatcttaataaagatgttattagaactccgtgaaccagggagacgttgtgtatacaaagtgctgaaccgttacgagtggtgagctgagaaaccttcatagtgctccttgagaaggaggcttcctgctcaagattaggcttcagtgcctttcatagcaaaggccacaaaccgtactggccttgtttgccctctggctccttggcttgtgtcatccttttatttggaatatttatagatgaatagcagtctttttgacttagagcaagtgaagaaggatcatccgtgctgattttctttatccctcttaagataatcataattccctgggcttagccagtgttgttgttaaggggcttacggtgctttctaacaaagactgtccagtgagggtcagtaagtggctggtgtatttcgtcctggccaggtagatgccacatggggtaggtggctcttcctcgccaccctgttttatttatttgtttttgttttttcaaactacagatatagtgaaagtgcctgccttgcttgcttttgcagaggtatcaattactgtctggaaggaaaggcaccttgttgatgtttctcaggcacttacataaacatgactgtataaagagagatcacttcaaaaatggttacgtactctattgtgccatttactgtgacttgttaacacacttaaaccatattttcatagacctgacttgctcttttgctgcagtgtgcgtgatatggatataccatgcctctgatgatgaacctttgggttgtcagtttccacaattacaggcagtgaatcagtgaatatccatatatatgttgtacacaggcatatttttagggatcactacctagaagtagaattgtggattgaacgatacttgctttttaagtttttttaaatcagcttactgaggtatagtttatttttttaagtagagatgagccaccagctcgcgcctgttaatcccagctctttgggaagccaaggcgggtggatcacgaggtcaggagttcgagaccagcctgaccaacatggtgaaaccccgtctctactaaaaatacaaaaaaatcagccgggcgtggtggcaggtacctgtaatcccagctatttaggaggctgaggcaggagaatcgcttgaacctgggaggtggaggttgcagtgagctgagattgcgccactgcactccagcctgggtgacaaagcaagactctgtctcaaaaaaaacaaaaaacaaaaaacaggtgtgaaccaccatgcccagccatgaggtgtagtttaatatacaataaaatgtaccagaatcagtgtacagtggatgagattcaacaaatgtgtacagtgccacaatcaagataaaagaacgtttcaatcactttgaattataataaatagtaatatattgtcccaccaatgggctgtatcaaattgtgttactaccagcggtgtttgagagcaactgttggtttttttgtttctttgtttaagagatgggggtcttgcctttatggtccaggctggagtgcagtggtgtgatcatagctcattgcagccttgacctcctgggctcaagcaatccccccaccttagcctcctgagtagctcggactacaggtgcacccagctgatttttaatttgttgcagagatggggtcttgaaatcctgggataaagcaattctccctgctcagcctccaaaagtgctgggattacaggcgtgagccaccatgcctagccaagaccaactgttttctgtactggatattatcagtctgtctaatttttgtcagttcaatgggaaagaaattctggccgggcgcagtggctcacgcctgtaatcttagcactctgggaggccaaggcgggcagatcacttgaggccaggagttcgagaccagcctggccaacatggtgaaaccccgtctctactaaaaatacaaaaattacccagacttggtggtgcatgtctgtaatcccagctactcagcagctgagggatgagaatcacttgaaccgagaggcagaggttgcagtgagctgagatcacaccaccgcactccaccctgggcagtagagtgagattccgtctcaaaaaaaaaaaaaaaaaaatcagcgcggtggttcacacctgtaatcccagcactttgggaggccgaggcaggcggatcatgaggtcaagagattgagaccatcctggctaacacggtgaaaccccgtctctactaaaaatacaaaaaaatttgccaggcatggtggtgggcgcctgtagtcccagctactcaggaggctgaggcaggagaatggcgtgaacccaggaggcggagcttgcagagagccgagattgcaccactgcactccagcctcggagacagagcgagactccatctcaaaaaaaaaaaaaaaagaaaaagaaaaaaaaatcatacttttctgatttcccatattaattgtcaattttgttttctttgaagtgatcatcactattctttgcctgttttctatttgattgcttttttaattgcattacgagaattctttgtaggattttttttttttttttttttttgagacagagtctcgctctttcgcccaggctggagtgcagtggcatgatctctgctcactgcagtctccacctcctgtgttcaagcgattttcctgcctcagcttcccaagtatctggattacaggtgtgcaccaccacgccctgctaattttttttttttttttgcatttttagtagagacggggtttcaccatgttggccaggctggttttgaactcctgacctcaagggatccacccatctcggcctcccaaagtgcttggataacaggtgtaagcgccaccgcacccagcctgagaattctttatatattctggatattctttttttttcccccctaaggcggagtcttgctctgtcacctaggctggagtgcagtggcgtgatctcagctcactgcaacctctgcctcccaggttcaagggattctcctgcctcagcctcccgagtagctgggattacaggcatgtgccaccacacctggctatttttgttttggtgctttttttttttttttttttttttttgagacggagttttgctcttgttgcccaggctggagtgcaatggtgcgatcttggctcaccgcaacctctgcctcccaggttcaagcgattcacctgcctcagcctcccgagtagctgggattacaggcatgtatcactgtacctggctagttttgcattttttgtacagatggggtttctccatgttggtcaggctggtgtcaaactcccgacctcaggtaatccgcctgcatcggcctcccaaagtgctgggattacaggcatgagccaccgcacccggcctgtttttgtatttttagtagagatggggtttcaccatgttggccaagctgttctcgaactcttgatctcatgatccatccaccttggcttcccaaagtgctgggattataggcgtgagccaccgtgcctggcatattctttgtttttatattacaaaattagcattttgtcccacagtctagaagaagataattttttgtgttttgagacagagttttactctgtcactcacactggaatgcagtggcacaacctcacctcactgtagcctccgcctcctgggctcaggcaaagcccgtacctcagcctccttagtagcggagactgcaggtgcctgccaccattcctggctaattcgtttgtgttttttatagcgatagggttttgccatgtttcccaggctggtcttgagctcctggacccaagtgatctgcccacctcagtttcccaaagtgctgggtttacaggggtgagcctctgatctctgctggaagagttgaagaacagtcttagatcttctaagacctaggttttaggtctgtgatttccaaacctgatgcacaccagattcaaccagagaactttaaaaaattgagtaggtaggtctgttgtgttccatctgtgtgactgctggagccaggccaggagtgcttccaggttctacttctgtcccaaacagattcctgtggcatatcttctctgtgttcgttgtgcttggccagacgactctggttgagagtggtagagaggtgacatagtctgggaactgatggtcagctgtggtagggaaggctcacacgtgcagatacctattaccacatcactgcccataacccagggcgtaccacagtctagctgcatctgaatagatggtacaagagcccctgtggtgtttctggtggcccggtcaactgcattgtgaggcccagagacaggaagtgactttgggttgtgtttgactccagattggatgtttttaccacagactacctctaatcctagagatttttacttcactgtgtagtaagtaacattcagtaatgaacagaattcacagtttagtcaagatggctttgaaaaacagtgtacggaatggtttagaatgagaagtggtcatctcaccctcaccttgccccatccagagccagagcattgcctcgttttcagcattgtggacatggatgatcactttgggcttataccactactgcatgtttcttttcttcctcaacagtttcagtcattcagtcagtaccgctgtaagactgccaagaagtcagaggaggagattgactttcttcgttccaatcccaaaatctggaatgttcatagtgtcctcaatgtccttcattccctggtagacaaatccaacatcaaccgacagttggaggtatacacaagcggaggtgagtgcagcaggccgacagccgtggcctgcgaatttccagctgcttgccatctgttccaaatgaatagatcactgcaaggagagcagatgagtcaccatgtcttaggtggtggtctgttgactctttgtaggtgcttgagtacaaacagtagcagagtatttgtgctgggggctctggggcttgggagtccattggccaacagactgaaccagcacattgagatttgcgtttgtaaacacttctgtgtctccagtgcttttgtttagataagcacttctcacacgtgttggtgtcagagccactttaccctgttaaaatattgagaaccacaaaatgtatctattttaaaaaatttttttctttttttttcagtgaagagtggcatttttgcagatctctctgtctggctgagatagctggcttctcatttctgcttctgcattcaatctgttgcaatgtgttcttttgtttgaagcacataaagaaaatctggcccaggcactgtggctcacacctgtaatcccagcactttgggaggcttaggcagaaggatcgcttgagtccaggagtttgagaccagcctgggcaatatagtgagactttgtctcaaaaaaaatgtttaaattgactgagcatggtgggtggggtgcccctgtagtcccagctactcgggaggctgaggtgggaggattgcttgagcccaggaagcaaagattgcagtgaactgagatcacaccactgtactctagcctgggccacagagcgagaacttgtctgaaaaaaaaaaagaaggaaaatctggcttcacacggttataggaagtttttttgttgtttgtttttgagacagggtgtcgctgtgtcacccagtctggtcttggactcctgggctcaagcagtcctgccttggcctcccaaaagtgccaggattattggagaggattttctttgatactacaccatgtagtagtatgtatgggttgaatattcctgacttgaaaatttgaaatctgaaatgctccaaaatctgactttttgagcaccaacatgacgccgtaagtagaaaattctacacccaacctcatatgagcagttgcagtcagaacttcgtctcatgcacaaaagtatttaaaagattataataaagttactttcaggctgtgtgtataagacatatatgaaaaataaatgaattttatgtttagatttggatcctatccttaagatactcattagggccgggtgccatggctcacgcctattatcctggcattttgggaggctgaggcgggcagatcacctgaggtcag

SEQ ID NO: 2428 - DNA, 3381 bp, Homo Sapiens
cgcgattctcagggattgatccgcctcttcaggtaagttatcttccggccccgtaccactgtgccacaggcgcagcccgcttcctcaggtgccctatcccgcgcagaagaccacggcttcacagagtgttatttaagggcgtggccagcggaacatcccgccccattctgtgacgcacggggtggcgcgcgtgggacccgaggggtggggctgggtttagtaggagacctggggcaaggccccctgtggacgaccatctgccagcttctctcgttccgtcgattgggaggagcggtggcgacctcggccttcagtgtttccgacggagtgaatggcggcggcggctgggatgctgctgctgggcttgctgcaggcgggtgggtcggtgctgggccaggcgatggagaaggtgacaggcggcaacctcttgtccatgctgctgatcgcctgcgccttcaccctcagcctggtctacctgatccgtctggccgccggccacctggtccagctgcccgcaggggtgaaaagtcctccatacattttctccccaattccattccttgggcatgccatagcatttgggaaaagtccaattgaatttctagaaaatgcatatgagaagtatggacctgtatttagttttaccatggtaggcaagacatttacttaccttctggggagtgatgctgctgcactgctttttaatagtaaaaatgaagacctgaatgcagaagatgtctacagtcgcctgacaacacctgtgtttgggaagggagttgcatacgatgtgcctaatccagttttcttggagcagaagaaaatgttaaaaagtggccttaacatagcccactttaaacagcatgtttctataattgaaaaagaaacaaaggaatactttgagagttggggagaaagtggagaaaaaaatgtgtttgaagctctttctgagctcataattttaacagctagccattgtttgcatggaaaggaaatcagaagtcaactcaatgaaaaggtagcacagctgtatgcagatttggatggaggtttcagccatgcagcctggctcttaccaggttggctgcctttgcctagtttcagacgcagggacagagctcatcgggaaatcaaggatattttctataaggcaatccagaaacgcagacagtctcaagaaaaaattgatgacattctccaaactttactagatgctacatacaaggatgggcgtcctttgactgatgatgaagtagcagggatgcttattggattactcttggcagggcagcatacatcctcaactactagtgcttggatgggcttctttttggccagagacaaaacacttcaaaaaaaatgttatttagaacagaaaacagtctgtggagagaatctgcctcctttaacttatgaccagctcaaggatctaaatttacttgatcgctgtataaaagaaacattaagacttagacctcctataatgatcatgatgagaatggccagaactcctcagactgtggcagggtataccattcctccaggacatcaggtgtgtgtttctcccactgtcaatcaaagacttaaagactcatgggtagaacgcctggactttaatcctgatcgctacttacaggataacccagcatcaggggaaaagtttgcctatgtgccatttggagctgggcgtcatcgttgtattggggaaaattttgcctatgttcaaattaagacaatttggtccactatgcttcgtttatatgaatttgatctcattgatggatactttcccactgtgaattatacaactatgattcacacccctgagaacccagttatccgttacaaacgaagatcaaaatgaaaaaggttgcaaggaacgaatatatgtgattatcactgtaagccacaaaggcattcgaagagaatgaagtgtacaaaacaactcttgtagtttactgtttttttaagtgtgtaattctaaaagccagtttatgatttaggattttgttaactgaatggttctatcaaatataatagcatttgacacattttctaatagttatgatacttatacatgtgctttcaggaagttccttggtgaaacaattgttgaggggggatctaggtaattggcagattctaaataatataatttccagatagtaattttaagagtactcatcgctcttgccaaataagttcagggtattcaaatcttggactagtcctgcaaggtataaagaataaaaatcccagtgagatacttggaaaccacagtttattattatttatctgggcaattattgtgtgtgtgaggatggaagggtagggaataatcgaacatctaaagccttgaataagagaatactaattgttttggtatgatgatactcagaaatggagatattataggaaaaagaaatcctttggaattttaactaaaatcactgcatatgggaaattaagagatccaggaccatatttgataagagttcctaaaaataatgtaattattaatgctaaagactgctcatgtatcttgatctaattactaaataaattacatatttatttacctgataaatatgtatctagttctacaaggtcacatttatgtggaagtccaaagtcaagtccttaggggataattttgttttgggctcagttgttccctgcttccttttttttttttttttttttttgagatggagtctcgctctgttgcccaggctggagtgcagtggtgcgatctcagctcactgcatcctctgcctcccgggttcaagcaattctctgcctcagcctcccaagtagttgggattacaggcacctgccaccatgcctggctaattttttgtatttttagtagagacgggggtttcactatgttggctaggctggtcttgaactcctgagcctcgtgagtccacccgccttggcctcccaaagtgctgggattacaggcatgagccaccgcacctggccttccctgcttcctctctagaatccaattagggatgtttgttactactcatattgattaaaacagttaacaaacttttttctttttaaaatgtgagatcagtgaactctggttttaagataatctgaaacaaggtccttgggagtaataaaattggtcacattctgtaaagcacattctgtttaggaatcaacttatctcaaattgtaactcggggcctaactatatgagatggctgaaaaaataccacatcgtctgttttcactaggtgatgccaaaatattttgctttatgtatattacagttctttttaaaacactggaagactcatgttaaactctaattgtgaaggcagaatctctgctaatttttcagattaaaattctctttgaaaaaat

SEQ ID NO: 2429 - DNA, 665 bp, Homo Sapiens
tcggagtcgccgggagctgccagtgctgtccgcgccgccgctgcgtgggccatgatcctggaacgggcgctggtggctgcatggcgtgcgcagatgcagccgggcccggggtgtgcaggcgcgccgtgaggtgtgtggtgctgatggctgctatgacatggtgcattactggccactccaaccagctgcgccatggcactgggccatgggtgactacctcatcgtaggctgtgcacacctgatgagtgagatcgccaatgcacaatggggcccccgtgtgttcactcagtgagtgagatgatacaagatggtgcaggccatcaaatgggtaggacgaggtggtgccagcggctccctacgtacactaacactagagaccctggacaaatacaactgtgacttctgtgttcacggcaatgacatcaccctgactgtagatggccgggacacctatgaggaagtaaagcagtgctgggaggtacatgagaatgcaatgcgcacgcaaggggtgtccaccacagacctcgtgggccgcatgctgctaggtaaccaagcccatcacaggaagccagtgagatgtcctctgagtacccgggagttatgcatacaagttttggcaatgtgccctggtagggcggaagcccctggaccggggtatcccagtc

SEQ ID NO: 2430 - DNA, 522 bp, Homo Sapiens
gctcgcgatctagaacggggatgcctattttaagaaaccaaaaatgccaggtaacaactttaaggccattacaattttatcctacacacacacacacacacacacacacacacacgctcagtaataagaaaggagttcacttagaaggataatgctctaaggataaaacacatagtactgctctttctcacaactctttagatgacttgaagagtaaaaattatgtttatttggactatgcagggaattttaaattgaatcaataaattctagaatgtcatcagtcaagaaatttttcaaaaatgttttttttttaaagagaggtaacattaagctgaaaaagaagggtacacttctccctcctcaatgtgatgtttgttcctttgcactaaagggaaatgaaaatcatatgttcctaatggggaatcagaaaattgttttctcaatgtctgctcatttcaaaaccagtacaatgcacacatatgaaggtaatgaaacgaacaagaattaggctaaaaaaag

SEQ ID NO: 2431 - DNA, 487 bp, Homo Sapiens
  misc_feature (2)..(2): n is a, c, g, or t
  misc_feature (472)..(472): n is a, c, g, or t
gnccgctctagagtatccccacagcataaactatttgcggcggcgggagagaaatcgcttggacttcggggcggcctcggacggccatggcctttaccctgtactcactgctgcaggcagccctgctctgcgtcaacgccatcgcagtgctgcacgaggagcgattcctcaagaacattggctggggaacagaccagggaattggtggatttggagaagagccgggaattaagtcacagctaatgaaccttattcgatctgtaagaaccgtgatgagagtgccattgataatagtaaactcaattgcaattgtgttacttttattatttggatgaatatcagtggagaaaatggagactcagaagaggacgtgccagtagaagttattactttggtcattattggaatatttatatcttagctggctgaccttgcacttgtcaaaaatgtaaagctgaaaataaaaccaggngttctatttatctgt

SEQ ID NO: 2432 - DNA, 391 bp, Homo Sapiens
ttttttttttttttttttttttttttttttacaattgcaaagattttatttagcggctttctgtgcttggcacttaaaaacagagttccgggcataagggcaaatttttggacaccttttcttcatacatattttacatacccttttattgccccctttttcatattcataatattggattccccactaggcacataaatacatttatttacaacacctcaaaaccagaaactttaataatatctgtattattttacttggtattatttgcatttccacaccatttaaaaattttagcttgcaccaagcttcacttgctttcttaccattaaaagatttgaagggaaagggaaagatgaaggacaaaacccaaaacttcaaaatgcaatgt

SEQ ID NO: 2433 - DNA, 187 bp, Homo Sapiens
gacagactgacgtgtgagctgcatcgcgggaggcgcatggcggggatggcgctggcgggggcctggaagcagatgtcctggttctactaccagtacctgctggtcacggcgctctacatgctggagccctgggagcggacggtgttcaattccatgctggtttccattgtggggatggcactttgca

SEQ ID NO: 2434 - DNA, 4477 bp, Homo Sapiens
gaattctgggaagaaacaaagagttgagttgcttcttaagatggaaagaagtgtactgtttggactgttattttaaaatacagggtggtgggggaaatcgaggctccttggccggggagggagtaaagagaagcctaattgatgaagagggagttgaggtgaatgcggtccatgggcaccgatgggggaggcaagagcggcctccagcaccctgggaattgggctcaggctccctggcgccagataccctcggaatccgggatccccggctggcgccacggcccgctgggccaaggtcggtgcttggtgggccccatgatctcatctctcctttcttccttgccactattagtgctcacataggcagaaagaggcggcccgacgtgcaaaccatgtgcaaaccgcgcccgctgggctggtcagccgtctttccttgcctgccgacctggactatgtggagcctgggggaccctcttgcctcccaacaaaatcccctctctattgcacatcccattcaacaactctgcccagggcttttcgaatttctggatcaacttctttaggaaaaagggaagaagaagtctcagagacagcggtagagaaaagaggagagagagggagaagacagaagagaggagggggaggtagcgagattaagagttgcaaagataaaaaaaattctctttatccccccacttctccctccttccctgctctccccctccccccgccctctggctaagtggtaaaaccgtccttacgttctcggtattgattggcagggctgacagtgattggcagtggttgccgtggcaacgccacaacgacacgccacagaccaatagaaaagcgaaacaaaatgtttcaatgctgcactcactgtggatttaggggagatattatgaggctgttgtcattagggcgattgcggtggaatcgctgaatcttgactcggcggtggttggctctccctctcctctctccctctccctctccctctctgtctcgggttctctctctgcgcgcgcgcaccgggccgctctcctacctccctctctatgtggctgcgcgggtgtgtgtgtgtgtggatgtgtgtggggtgtgggtgtcccttacgcccttcctcctctccctcctcctcctgctcccccctcctttccttctcctcctcccccctctcctctccctcctcctggtcctcatcgcccctctctcctcttcctcccctctctcttcctctccctgaattttctcctctcctctcaggtcagtccatggtattccgctcccccctagacctctattcctcccacttcttgttgccaaacttcgccgattctcaccaccgctccatacttctggcgagtagcggcggcgggaacggtgcgggaggcggcggcggcgcgggaggcggcagcggcggcgggaacggtgcgggaggcggcggtgctggcggagcaggcggcggcggcggcggcggctccagggcccccccggaagagttgtccatgttccagctgcccaccctcaacttctcgccggagcaggtggccagcgtctgtgagacgctggaggagacgggcgacatcgagcggctgggccgcttcctctggtcgctgcccgtggcccccggggcgtgcgaggccatcaacaaacacgagtcgatcctgcgcgcgcgcgccgtggtcgccttccacacgggcaacttccgcgacctctaccacatccttgagaaccacaagttcaccaaggagtctcacggcaagctgcaggccatgtggctcgaggcgcactaccaggaggccgagaagctgcgcggccgcccactcggcccggtggacaagtaccgcgtgcgcaagaagttcccgctgccacgcaccatctgggacggcgagcagaagacgcattgcttcaaggagcggactcggagcctgttgcgggagtggtacctacaggacccctaccccaaccccagcaagaaacgcgaactggcgcaggccaccggcctcactcccacacaagtaggcaactggtttaagaaccggcggcagcgcgaccgcgccgcggcggccaagaacaggttagtggcggggcccgcggcctggctacagcctcagaggcctgggaaggggagaggggttgagatggggctagcggagcggccgctgagagccagggaagccgtgactcctggccagtcggagaaagtttccgcttgtccgggacgcgcggaagagggggccgggctggctgtgggtgtattgattgctttgaccaagaggggctttcgtcagggcagagagtgtgtgcttgcgacccgagtacccgcagcccctgggagacttagccctgcgctgcacccgtgcctgcctcctcagccctgccgccagctcggcgatcctctggagcctagagacagggagggaaggaaagcactctttgccatctggttcttatttctgtgcgttgcaaaaccccgagagaaatccactagcgtcagagagaggaaagtgaacctgggtccctatcacaaggggaaaaggccagaggccactgcgcagcgggcctgtttccccgcaacgctgcacgttgcctgaccgggagcaggagagccgggctgggagtggagaggcctagcgtgtgcgtgtgtgtgtgtgtgtgcacgccccgtgtgcatgtactcgccctcctgtttcagccgaggagaatccctttggtcctctaagctgggaagcgggcacgagcagcctcgttgccggcaagttggccacaaagtcacaaaattgtatagggcttgaccaacatcacaggagctgggcctgggggaaggagaaaaagaaccagagggaaagaagtggataggcgaaaggagtggggagagaagggagaaagaaaagaggaagttgggtgaaagccctgatgtggagcctgtgtctttctctatccagccaggaaggcccagggcctggtgtacttcagggagcaggacccccagctgctgacagctgcccgtgggtgggggctgggtgtgagtttctggaggtgtgttcgagtttaggcggccgggacctgagcccatggccctctcacccctgccgtggagcccacttttcgtctgatgaggggagcgcccagggtcaagccaaggcctccttgtggagagaattccagacaccaggtccaggcagaaggttcccggtgggggaaagggcagctggagactgctctgtgcgcctctcttgccttctcctttgccccttttctgtctccctgctctttccccacttttccaccgccagctttcctattttctctaccctcggtcctgcgctctgcgctggcatccagagagcaaagtatgcagttctacccggagactggccgggcggtggggaacccgcagctcccggtgtgtgtttgagggagcagggacggggttactaggggaactcgaccggtcgcggggcagccggctcagtttgaagagccccagggactgcggagggaagaagcgcccggctcctctccgacttctgcttctccagggcttggcgtactttgtcgcttgcacccaaggcctccccaagcggccgggctcgggttctgcctctcctccgaggccagcctctatctgagaagacttgggatgctcccgaaagcggaatggggagcggcggcgcgggggagccgggtggcgggcctctgtgtcagggcgggcgcggatctctttctcccgcaggctccagcaccaggccattggaccgagcggcatgcgctcgctggccgagcccggctgccccacgcacggctcggcagagtcgccgtccacggcggccagcccgaccaccagcgtgtccagcctgacggagcgcgcggacaccggcacctccatcctctcggtaacctccagcgactcggaatgtgatgtatgatagccaaggccgccctcctccctctccttcccctcctcccccactccttcccctccgcctcctagccctcctcctcttcctcctcttccttctcctcctccatccccagaacaaaccgaaatcaggatacccaaccatacacacatacaagtccacacacactcccaccccagccaaaaatatataaaaaacaagaaaataacaaattaaccgcaaactatcaacaacccccaaccaccatctaccactacggccaccccaaaggaccccgacgccaacagacagtcaaacgctgatgttgcgggcagaaaacataaaagaggtgacaattgtatactttctaggacaagcacggcttctcctttcggttcccatggacccggcaccccacctgcatgacgatttatttgtatctgggaaaatattctctctagttaaaaatgatttaaagagtcgactatacaaagatcaatcaccaccacgaggacaagagggcaatgagcatgaacagacagagtaagaaacaagtcgccgtctccgttccg

SEQ ID NO: 2435 - DNA, 530 bp, Homo Sapiens
tttttttttttttttttacaaagatcctgcattttattttgttattctttcaaaaagaactcaatacaaagtcaatataaaaaaatcaatactcaatttaaaacagaaacagtaatttctgaatgtctaacattctcctatgcaaagactgggagaaagaggaagggggagagagaaaataaattctttaatttaaacctttcttcaccctgctgggaatgcacatgccagagcaaatgaatccagcttaaccccttctggactggtcattgaagatagggttggaagaacagtattttagaatggtgatgaacagtgtcattattaactatatgtacatacacttatggcacttggaactgcactgtatccatgacgtagcaacctctgacacagcccgtctcacacttgccatctcttaccccatttcccaaaatatttcctgagaaagatattgtaaggaacttccagtttgaagggatctaacggcaaaaactaagaacaaaagcaccatgggtccatggtatgtg

SEQ ID NO: 2436 - DNA, 480 bp, Homo Sapiens
  misc_feature (10)..(11): n is a, c, g, or t
tttttttttnnatagaaataagtatatatctttattttgaaacgctattttattttagggaatgatgccattttaggctctagggataaaaagaaactggtatcttggccctgaaacaagtagttacaatcctgctatgaaaacgagtaacaaataaagcatatacaacaactataagaactactatttattgagtgccttctttgtgccaggcatcattcacagcactttattaactcgtttaatcttcacaacaatcttatgaggtgtagactattaatattcctactattttagagatgaggaaactgagatacagaaaagttaagaacgttacccaagaacacgtgactactgagggcagttaggatttgaactcaggtagtctagctgtgggacctaaccatgacacttttaaaagcttgtattaagcataccacaagcaccctgactctggaaaacttacatctaggtttgaat

SEQ ID NO: 2437 - DNA, 4546 bp, Homo Sapiens
aagatggcgggcgggctgctctgaagagaccccggcggcggcggaggaggagagaagcgcagcgccgcgccgcgccggggcccatgtggggaggagtcggagtcgctgttgccgccgccgcctgtagctgctggacccgagtgggagtgagggggaaacggcaggatgaagttcgccgagcacctctccgcgcacatcactcccgagtggaggaagcaatacatccagtatgaggctttcaaggatatgctgtattcagctcaggaccaggcaccttctgtggaagttacagatgaggacacagtaaagaggtattttgccaagtttgaagagaagtttttccaaacctgtgaaaaagaacttgccaaaatcaacacattttattcagagaagctcgcagaggctcagcgcaggtttgctacacttcagaatgagcttcagtcatcactggatgcacagaaagaaagcactggtgttactacgctgcgacaacgcagaaagccagtcttccacttgtcccatgaggaacgtgtccaacatagaaatattaaagaccttaaactggccttcagtgagttctacctcagtctaatcctgctgcagaactatcagaatctgaattttacagggtttcgaaaaatcctgaaaaagcatgacaagatcctggaaacatctcgtggagcagattggcgagtggctcacgtagaggtggccccattttatacatgcaagaaaatcaaccagcttatctctgaaactgaggctgtagtgaccaatgaacttgaagatggtgacagacaaaaggctatgaagcgtttacgtgtcccccctttgggagctgctcagcctgcaccagcatggactacttttagagttggcctattttgtggaatattcattgtactgaatattacccttgtgcttgccgctgtatttaaacttgaaacagatagaagtatatggcccttgataagaatctatcggggtggctttcttctgattgaattcctttttctactgggcatcaacacgtatggttggagacaggctggagtaaaccatgtactcatctttgaacttaatccgagaagcaatttgtctcatcaacatctctttgagattgctggattcctcgggatattgtggtgcctgagccttctggcatgcttctttgctccaattagtgtcatccccacatatgtgtatccacttgccctttatggatttatggttttcttccttatcaaccccaccaaaactttctactataaatcccggttttggctgcttaaactgctgtttcgagtatttacagcccccttccataaggtaggctttgctgatttctggctggcggatcagctgaacagcctgtcagtgatactgatggacctggaatatatgatctgcttctacagtttggagctcaaatgggatgaaagtaagggcctgttgccaaataattcagaagaatcaggaatttgccacaaatatacatatggtgtgcgggccattgttcagtgcattcctgcttggcttcgcttcatccagtgcctgcgccgatatcgagacacaaaaagggcctttcctcatttagttaatgctggcaaatactccacaactttcttcatggtgacgtttgcagccctttacagcactcacaaagaacgaggtcactcggacactatggtgttcttttacctgtggattgtcttttatatcatcagttcctgctataccctcatctgggatctcaagatggactggggtctcttcgataagaatgcaggagagaacactttcctccgggaagagattgtatacccccaaaaagcctactactactgtgccataatagaggatgtgattctgcgctttgcttggactatccaaatctcgattacctctacaactttgttgcctcattctggggacatcattgctactgtctttgccccacttgaggttttccggcgatttgtgtggaacttcttccgcctggagaatgaacatctgaataactgtggtgaattccgtgctgtgcgggacatctctgtggcccccctgaacgcagatgatcagactctcctagaacagatgatggaccaggatgatggggtacgaaaccgccagaagaatcggtcatggaagtacaaccagagcatatccctgcgccggcctcgcctcgcttctcaatccaaggctcgtgacactaaggtattgatagaagacacagatgatgaagctaacacttgaattttctgaagtctagcttaacatctttggttttcctactctacaatcctttcctcgaccaacgcaacctctagtacctttccagccgaaaacaggagaaaacacataacacattttccgagctcttccggatcggatcctatggactccaaacaagctcactgtgtttcttttcttttcttctggtttaattttaattttctattttcaaaacaaatatttacttcatttgccaatcagaggatgttttaagaaacaaaacatagtatcttatggattgtttacaatcacaaggacatagatacctatcaggatgaagaacaggcattgcaaggaccctctgatgggacggtactgagatatctcggcttccgctcagcccggttttgactggttgaaaccggacattggtttttaaattttttgtcagtttatgtggagaatttttttctttccttcatacccagcgcaaaggcactggccgcacttgcaggaaaagtgcaacttaaagcagtatcttcattcatgaagctactttttaatttgatgtaacttttcttattttgggaagggttgctgggtgggtgggaaatatgatgtatttgttacacacagttttctcattatttatgaaacttaaccatacagaatgatataactcctgtgcaatgaaggtgataacagtaaaagaaggcaggggaaacttacgttggatgacatttatgagggtcagtcccacatacctctttcaggagacaacttgcaccagtttgaccttttcttttctttgtttttattttaagccaaagtttcattgctaacttcttaagttgctgctgctttagagtcctgagcatatctctcgtaacaaggaatcccacacttcacaccaccggctgaatttcatggaagaggttctgataatttttttaactttttaaggaacagatgtggaatacactggcccatatttcaaccttaacagctgaagctatgccttattatgcatccacatgtatggtccctgtagcgtgacctttactagctctgaatcagaagacagagctatttcagaggctctgtgtgccctcactagatagtttttcttctgggttcaaccactttagccagaatttgatcaaattaaaagtctgtcatggggaagctatatttttgagcacatggaacaaattatacttcctcattcatattatgttgatacaaaagaccttggcagccatttctcccagcagttttaaaggatgaacattggatttcatgccatcccatagaaaacctgttttaaaattttagggatctttacttggtcatacatgaaaagtacactgcttagaaattatagactattatgatctgtccacagtgcccattgtcacttctttgtctcatttcttccctttgttccttagtcatccaaataagcctgaaaaccataagagatattactttattgaatatggttggcattaaatttagcatttcattatctaacaaaattaatataaattccaggacatggtaaaatgtgttttaataacccccagacccaaatgaaaatttcaaagtcaataccagcagattcatgaaagtaaatttagtcctataattttcagcttaattataaacaaaggaacaaataagtggaagggcagctattaccattcgcttagtcaaaacattcggttactgccctttaatacactcctatcatcagcacttccaccatgtattacaagtcttgacccatccctgtcgtaactccagtaaaagttactgttactagaaaatttttatcaattaactgacaaatagtttctttttaaagtagtttcttccatctttattctgactagcttccaaaatgtgttccctttttgaatcgaggtttttttgttttgttttgttttctgaaaaaatcatacaactttgtgcttctattgcttttttgtgttttgttaagcatgtcccttggcccaaatgaagaggaaatgtttaattaatgctttttagtttaaataaattgaatcatttataataatcagtgttaacaatttagtgacccttggtaggttaaaggttgcattatttatacttgagatttttttcccctaactattctgttttttgactttaaaactatgggggaaatatcactggtctgtcaagaaacagcagtaattattactgagttaaattgaaaagtccagtggaccaggcatttcttatataaataaaattggtggtactaatgtgtaaaaaaaaaaaaaaa

SEQ ID NO: 2438 - DNA, 4848 bp, Homo Sapiens
gcggtacgggggtggtgccgcgctcctggccccgcgcgggcggacggcggaggcgcctcccagcctgctatgggatggatgaagaagagaaccactatgtctcgcagctcagggaagtctacagcagctgcgacaccacggggactggctttctggaccgccaggagctgacccagctctgccttaagcttcacctggagcagcagctgcccgtcctcctgcagacgcttctcggaaacgaccatttcgccagggttaactttgaggaatttaaggaaggttttgtggctgtgttgtcttcaaatgctggtgttcgcccctcagatgaagacagtagttctttggaatcagctgcctccagtgccatccctccaaagtatgtgaatggttctaagtggtatggccgtcggagccggcctgagctatgtgacgctgccacagaagccagacgcgtgccggagcagcaaacccaggccagcctgaaaagtcacctctggcgctcagcgtctctggagagcgtggagagtcccaagtcagatgaagaggccgagagcactaaagaagctcagaatgaattatttgaagcacaaggacagctgcagacctgggattctgaggactttgggagcccccagaagtcctgcagcccctcctttgacaccccagagagccagatccggggcgtgtgggaagagctgggggtgggcagcagcggacacctgagcgagcaggagctggctgtggtctgccagagcgtcgggctccagggactcgagaaagaggaactcgaagacctgtttaacaaactggatcaagacggagacggcaaagtgagtcttgaggaattccagcttggcctcttcagtcatgagcccgcgctacttctagagtcttccactcgggttaaaccgagcaaggcttggtctcattaccaggtcccagaggagagcggctgccacaccaccacaacctcatccctcgtgtccctgtgctccagcctgcgcctcttctccagcattgacgatggttctggcttcgcttttcctgatcaggtcctggccatgtggacccaggaggggattcagaatggcagggagatcttgcagagcctggacttcagcgtggacgagaaggtgaaccttctggagctgacctgggcccttgacaacgagctcatgacagtggacagtgccgtccagcaggcagccctggcctgctaccaccaggagctgagctaccagcaagggcaggtggagcagctggcaagggagcgtgacaaggcaaggcaggacctggagagggccgagaagaggaacctggagtttgtgaaagagatggacgactgccactccaccctggagcagctcacggagaagaaaatcaagcatctggagcaggggtaccgggaaaggctgagcctcctgcggtctgaggtggaggcggagcgagagctgttctgggagcaggcccacaggcagagggccgcgctggagtgggacgtggggcgcctgcaggctgaggaggctggcctccgcgagaagctgaccctggccctgaaggaaaacagtcgcctacagaaggagattgtggaagtggtggaaaagctttcggattcggagaggctggccctgaagctgcagaaggacctggagtttgtgctgaaggacaagctggagccacagagtgcagagctcctggcccaggaggagcggttcgcagcagtcctgaaggaatacgagctcaagtgccgggacctgcaggaccgcaacgatgagctgcaagctgagctggaaggcctgtgggcgcggctgcccaagaaccggcacagcccctcatggagcccggatgggcgcagacggcagctccctggactcggcccagcaggcatttcattcctgggtaattctgctccagtgagtatagaaacggagctgatgatggagcaggtaaaggagcattaccaagacctcaggacccagctggagaccaaggtaaattactacgaaagggaaattgcggcactgaaaaggaactttgagaaggagaggaaggacatggagcaggctcgcaggcgcgaggtcagcgtgctggagggtcagaaggccgacctggaggagctccacgagaagtctcaggaggtcatctggggcctgcaggagcagctgcaggacacagcccgcggccccgagcctgagcagatgggcctggcaccctgctgcacccaggcactgtgtggcctggccctgcggcatcacagccacctgcagcagatcaggagagaggctgaggcggagctgagtggagagctgtcggggctgggagccctgcccgctcgcagagacctgaccttggagctggaggagccgccgcagggacccctgccacgcgggagccagaggtcggagcagctggagctggagagggcactgaagctgcagccctgtgcgagcgagaagcgcgcccagatgtgcgtatcgttggccctcgaggaggaggagttggagcttgcccgcgggaagcgagtggacgggccctccctggaagcagagatgcaggccctgccgaaagatgggctggtggcaggaagtggccaggagggcacacgtggcctcctaccactgcgtccgggctgtggggagcggccactggcctggctggccccaggtgatggcagagagtctgaggaggcggcaggagccgggcctcgccgcaggcaagcccaggacacagaagctacgcagagcccggcccccgcccctgccccggcatcccacggcccctcagagaggtggtcacgcatgcagccctgtggagtggatggggatattgtcccaaaggagccagagcctttcggcgcgagcgcagcggggctggagcagcctggagcccgggagctgcctctgctgggaacagagagagacgcctcgcaaacccagccacggatgtgggagccacccctgaggccggccgcttcgtgcaggggacaggctgagaggctacaggccattcaggaagagcgagcacgaagctggagcaggggcacccaggagcaggcctcggagcagcaggcccgggccgagggcgccctggagcctgggtgtcacaagcacagtgtggaggttgccaggagagggtccttgccatcccacctccagctcgcagacccgcagggttcctggcaggagcagcttgctgccccagaagagggggagaccaaaatagcgctggagagagagaaggatgacatggaaaccaaacttctacatctggaagacgtcgtccgggctctggagaaacatgtagatttgagagagaacgacagactggagttccatagactttctgaagaaaacactttgttgaaaaacgatctgggaagggttcggcaagagcttgaagctgcagaaagtactcacgatgcacagaggaaggaaattgaggttttaaagaaagacaaggaaaaggcctgctctgagatggaggtgctcaacagacagaatcagaactacaaggatcaattatcccagctcaatgtcagggttcttcaactgggacaggaggcttctacccaccaggcccaaaacgaggagcatcgtgtgaccattcagatgttaacacagagcctggaggaggtggttcgcagtgggcagcagcagagtgaccaaatccaaaaacttagagttgaacttgaatgcctgaatcaggaacatcagagcctgcagctgccatggtcagagctgacccagacccttgaggaaagtcaagaccaggtgcagggagctcacctgaggctgaggcaggcccaggcccagcacttgcaggaggtccggctggtgccccaggaccgtgtggccgagctgcatcgcctgctcagccttcagggagagcaggccaggaggcgcctggatgcacagcgggaagaacatgagaaacagctgaaagccacagaagagcgggtggaagaggcggagatgattctgaagaatatggaaatgctcctccaagagaaagtggataagctgaaggagcagtttgaaaagaacacgaagtccgacctgctgctgaaggagctgtacgtggagaacgcccacctggtgagagcacttcaggccaccgaggagaagcagcgaggcgccgagaaacaaagccgcctcttggaagaaaaagttcgcgctctcaacaaactcgtcagtaggattgcccccgcagccctctctgtgtaaagacagattattttctaggattcattcgaaagcacatcttttaaattaagccactgtgctgccttagattccgtgggtcatgagccatgagtcctgggacatctgaggattgggattctttgttcaccccgcagatagttaatgaatggtctgccctgggcaagatggaggtgggggctgggggaatatgcatgttgcagaagccggcgtttttattagcggtcctgagtaatttcccttggcaaaattcccagttttgccactctctggagccagatcctgggagctgtcagcaaggagcaggtaagtgagcagttatggacagcactttccatgtggtgcttccgaccctggctgtcagagtgaaatgtaaagtcagggctctgtacagttttgccatttcactgttctgctttaagcttagcttattagaactcttggtggagggtgcgtacacacattccagaaaaggcttcactcgctgggaacgtcaacccagcgagaaaggaggggaagccccttctccggggaccttatctgtggactcaggaatgatggtgtttattgcaaatgcacaatctttttcccattgaaatgtcatcacactggaaattgtactatatgt

SEQ ID NO: 2439 - DNA, 365 bp, Homo Sapiens
cggcacagggtgactgaaataggagaaccacgtccaggggtcaggggggattcctctgaaatcgcagctggaacatttcgtaatagttctggtactgcacccatagatactgtcacctctactctttcttccaatcaccattagcagatgccacaggattcctacttctgaaagtttttgggccccgcagtggcaagaccggagaagccaataaagtttaaggctacatgtttattccatccacaaatttggtgaaggaggaaatgtttacaattctgccatgccattagataggagttttccaccgggtgtacactgctgttaacaaggtgtaaatacttgtccagtaaagagaccgtacggta

SEQ ID NO: 2440 - DNA, 3056 bp, Homo Sapiens
gcggggcgggccggcggcggaggccgggccgcggagccaggagtgactagcagcagttggccgtgccgtagcagcgtcccgcgcgcggcgggcagcggcccaggaggcgcgtggtgcgggtttcggcggcggctgaggaagaagcgcgggcggcgccttcgggaggcgagcaggcagcagttggccgtgccgtagcagcgtcccgcgcgcggcgggcagcggcccaggaggcgcgtggcggcgctcggcctcgcggcggcggcggcggcagcggcccagcagttggcggcgagcgcgtctgcgcctgcgcggcgggccccgcgcccctcctccccccctgggcgcccccggcggcgtgtgaatggcggcctccgcggcggcagcctcggcagcagcggcctcggccgcctctggcagcccgggcccgggcgagggctccgctggcggcgaaaagcgctccaccgccccttcggccgcagcctcggcctctgcctcagccgcggcgtcgtcgcccgcggggggcggcgccgaggcgctggagctgctggagcactgcggcgtgtgcagagagcgcctgcgacccgagagggagccccgcctgctgccctgtttgcactcggcctgtagtgcctgcttagggcccgcggcccccgccgccgccaacagctcgggggacggcggggcggcgggcgacggcaccgtggtggactgtcccgtgtgcaagcaacagtgcttctccaaagacatcgtggagaattatttcatgcgtgatagtggcagcaaggctgccaccgacgcccaggatgcgaaccagtgctgcactagctgtgaggataatgccccagccaccagctactgtgtggagtgctcggagcctctgtgtgagacctgtgtagaggcgcaccagcgggtgaagtacaccaaggaccatactgtgcgctctactgggccagccaagtctcgggatggtgaacgtactgtctattgcaacgtacacaagcatgaaccccttgtgctgttttgtgagagctgtgatactctcacctgccgagactgccagctcaatgcccacaaggaccaccagtaccagttcttagaggatgcagtgaggaaccagcgcaagctcctggcctcactggtgaagcgccttggggacaaacatgcaacattgcagaagagcaccaaggaggttcgcagctcaatccgccaggtgtctgacgtacagaagcgtgtgcaagtggatgtcaagatggccatcctgcagatcatgaaggagctgaataagcggggccgtgtgctggtcaatgatgcccagaaggtgactgaggggcagcaggagcgcctggagcggcagcactggaccatgaccaagatccagaagcaccaggagcacattctgcgctttgcctcttgggctctggagagtgacaacaacacagcccttttgctttctaagaagttgatctacttccagctgcaccgggccctcaagatgattgtggatcccgtggagccacatggcgagatgaagtttcagtgggacctcaatgcctggaccaagagtgccgaggcctttggcaagattgtggcagagcgtcctggcactaactcaacaggccctgcacccatggcccctccaagagccccagggcccctgagcaagcagggctctggcagcagccagcccatggaggtgcaggaaggctatggctttgggtcaggagatgatccctactcaagtgcagagccccatgtgtcaggtgtgaaacggtcccgctcaggtgagggcgaggtgagcggccttatgcgcaaggtgccacgagtgagccttgaacgcctggacctggacctcacagctgacagccagccacccgtcttcaaggtcttcccaggcagtaccactgaggactacaaccttattgttattgaacgtggcgctgccgctgcagctaccggccagccagggactgcgcctgcaggaacccctggtgccccacccctggctggcatggccattgtcaaggaggaggagacggaggctgccattggagcccctcctactgccactgagggccctgagaccaaacctgtgcttatggctcttgcggagggtcctggtgctgagggtccccgcctggcctcacctagtggcagcaccagctcagggctggaggtggtggctcctgagggtacctcagccccaggtggtggcccgggaaccctggatgacagtgccaccatttgccgtgtctgccagaagccaggcgatctggttatgtgcaaccagtgtgagttttgtttccacctggactgtcacctgccggccctgcaggatgtaccaggggaggagtggagctgctcactctgccatgtgctccctgacctgaaggaggaggatggcagcctcagcctggatggtgcagacagcactggcgtggtggccaagctctcaccagccaaccagcggaaatgtgagcgtgtactgctggccctattctgtcacgaaccctgccgccccctgcatcagctggctaccgactccaccttctccctggaccagcccggtggcaccctggatctgaccctgatccgtgcccgcctccaggagaagttgtcacctccctacagctccccacaggagtttgcccaggatgtgggccgcatgttcaagcaattcaacaagttaactgaggacaaggcagacgtgcagtccatcatcggcctgcagcgcttcttcgagacgcgcatgaacgaggccttcggtgacaccaagttctctgctgtgctggtggagcccccgccgatgagcctgcctggtgctggcctgagttcccaggagctgtctggtggccctggtgatggcccctgaggctggagcccccatggccagcccagcctggctctgttctctgtcctgtcaccccatccccactcccctggtggcctgactcccactccctggtggccccatcccccagttcctcacgatatggtttttacttctgtggatttaataaaaaaaacttcaccagttcaaaaaaaaaaaaaaaaaaaaa

SEQ ID NO: 2441 - DNA, 290 bp, Homo Sapiens
cggccgctgcagagattggaatccgcctgccgggcttggcgaaggagaagggaggaggcaggagcgaggagggaggagggccaagggcgggcaggaaggcttaggctcggcgcgtccgtccgcgcgcggcgaagatcgcacggcccgatcgaggggcgaccgggtcggggccgctgcacgccaagggcgagggccgatccgggccccacttcgccccggcggctctccgcgcccacccgctccgcgccgagggctggaggacgcgttccctgggcgtccgggcttatgac

SEQ ID NO: 2442 - DNA, 554 bp, Homo Sapiens
  misc_feature (506)..(506): n is a, c, g, or t
gtctccccgccccgcccctcgtctcctccaagatggcgagcggcggcagcgggggggtgtcagtacctgcgctgtggagtgaagtgaaccggtatggccagaacggcgacttcacgcgcgctctcaagaccgtcaataagatactacagatcaacaaagatgacgtaactgccctgcattgtaaagtggtatgccttatccagaatggaagtttcaaggaagctttgaatgtcatcaatactcacaccaaagtgttagccaataactctctctcctttgagaaggcatattgcgagtacaggctgaacagaattgagaatgccttgaagacaatagaaagtgccaaccagcagacagacaaactgaaggagctttatggacaagtgttataccgtttggaacgctatgatgaatgcttagcagtgtatagagatctcgtccgaaactcccaagatgattatgatgaggagaggaaaacaaacctttcagcagttgttgcagctcanagcaattgggaaaaagtggttccagagaacctgggcctccaagaggca

SEQ ID NO: 2443 - DNA, 425 bp, Homo Sapiens
ttttttttgtgagacggattcttgctctgttgcccaggctagatcaaacaaactgatgtaagtttatgttttaggaaaacagaaaagtttcaagatatattgaaataatctggccttcttgccacttagtttctcctaagaagccttctgttagaatatttgtgaaatcatattgtggaattagtcacagaaatgtagtcaaagttgataaaattaaccctgtttaaacatgactttcaagtagttttatttaaaacacaatattggtgatgttttggaggaaatacacattctcacatgtagttggtcagaatgaaaaatggcagaaacctttatggagggcaatttgacaagatttattaatgcctacaccaacaattccacttttaggaatttattctataggtatacttaagcctatgcat

SEQ ID NO: 2444 - DNA, 2087 bp, Homo Sapiens
ggcacgaggagccgagcggcgaggtgcctctgtggccgcacggcaggcccgggcgacacggagacgtggagcgcgccggctcgctgcagctccgggactcaacatgcgctgctcgccgggaggcgtctggctgggcctggccgcgtcgctcctgcacgtgtccctgcaaggcgagttccagaggaagctttacaaggagctggtcaagaactacaatcccttggagaggcccgtggccaatgactcgcaaccactcaccgtctacttctccctgagcctcctgcagatcatggacgtggatgagaagaaccaagttttaaccaccaacatttggctgcaaatgtcttggacagatcactatttacagtggaatgtgtcagaatatccaggggtgaagactgttcgtttcccagatggccagatttggaaaccagacattcttctctataacagtgctgatgagcgctttgacgccacattccacactaacgtgttggtgaattcttctgggcattgccagtacctgcctccaggcatattcaagagttcctgctacatcgatgtacgctggtttccctttgatgtgcagcactgcaaactgaagtttgggtcctggtcttacggaggctggtccttggatctgcagatgcaggaggcagatatcagtggctatatccccaatggagaatgggacctagtgggaatccccggcaagaggagtgaaaggttctatgagtgctgcaaagagccctaccccgatgtcaccttcacagtgaccatgcgccgcaggacactctactatggcctcaacctgctgatcccctgtgtgctcatctccgccctcgccctgctggtgttcctgcttcctgcagattccggggagaagatttccctggggataacagtcttactctctcttaccgtcttcatgctgctcgtggctgagatcatgcccgcaacatccgattcggtaccattgatagcccagtacttcgccagcaccatgatcatcgtgggcctctcggtggtggtgacagtgatcgtgctgcagtaccaccaccacgaccccgacgggggcaagatgcccaagtggaccagagtcatccttctgaactggtgcgcgtggttcctgcgaatgaagaggcccggggaggacaaggtgcgcccggcctgccagcacaagcagcggcgctgcagcctggccagtgtggagatgagcgccgtgggcccgccgcccgccagcaacgggaacctgctgtacatcggcttccgcggcctggacggcgtgcactgtgtcccgacccccgactctggggtagtgtgtggccgcatggcctgctcccccacgcacgatgagcacctcctgcacggcgggcaaccccccgagggggacccggacttggccaagatcctggaggaggtccgctacattgccaaccgcttccgctgccaggacgaaagcgaggcggtctgcagcgagtggaagttcgccgcctgtgtggtggaccgcctgtgcctcatggccttctcggtcttcaccatcatctgcaccatcggcatcctgatgtcggctcccaacttcgtggaggccgtgtccaaagactttgcgtaaccacactggttctgtacatgtggaaaactcacagatgggcaaggcctttggcttggcgagatttgggggtgctaatccaggacagcattacacgccacaactccagtgttcccttctggctgtcagtcgtgttgcttacggtttctttgttactttaggtagtagaatctcagcactttgtttcatattctcagatgggctgatagatactccttggcacatccgtaccatcggtcagcagggccactgagtagtcattttgccattagccctcagcctggaaagcccttcggagagctccccatggctcctcaccaccgagacagttggttttgcatgtctgcatgaaggtctacctgaaaattcaacatttgctttttgcttgtgtacaaacccagattgaagctaaaataaaccagactcactaaatcctttccaataattgactggtggaaggaaaacaaaaaaaaaaaaa

SEQ ID NO: 2445 - DNA, 1684 bp, Homo Sapiens
ggcaccagctacaaatgcctctgtgatccaggttaccatggcctctactgtgaggaggaatataatgagtgcctctccgctccatgcctgaatgcagccacctgcagggacctcgttaatggctatgagtgtgtgtgcctggcagaatacaaaggaacacactgtgaattgtacaaggatccctgcgctaacgtcagctgtctgaacggagccacctgtgacagcgacggcctgaatggcacgtgcatctgtgcacccgggtttacaggtgaagagtgcgacattgacataaatgaatgtgacagtaacccctgccaccatggtgggagctgcctggaccagcccaatggttataactgccactgcccgcatggttgggtgggagcaaactgtgagatccacctccaatggaagtccgggcacatggcggagagcctcaccaacatgccacggcactccctctacatcatcattggagccctctgcgtggccttcatccttatgctgatcatcctgatcgtggggatttgccgcatcagccgcattgaataccagggttcttccaggccagcctatgaggagttctacaactgccgcagcatcgacagcgagttcagcaatgccattgcatccatccggcatgccaggtttggaaagaaatcccggcctgcaatgtatgatgtgagccccatcgcctatgaagattacagtcctgatgacaaacccttggtcacactgattaaaactaaagatttgtaatctttttttggattatttttcaaaaagatgagatactacactcatttaaatatttttaagaaaataaaaagcttaagaaatttaaaatgctagctgctcaagagttttcagtagaatatttaagaactaattttctgcagcttttagtttggaaaaaatattttaaaaacaaaatttgtgaaacctatagacgatgttttaatgtaccttcagctctctaaactgtgtgcttctactagtgtgtgctcttttcactgtagacactatcacgagacccagattaatttctgtggttgttacagaataagtctaatcaaggagaagtttctgtttgacgtttgagtgccggctttctgagtagagttaggaaaaccacgtaacgtagcatatgatgtataatagagtatacccgttacttaaaaagaagtctgaaatgttcgttttgtggaaaagaaactagttaaatttactattcctaacccgaatgaaattagcctttgccttattctgtgcatgggtaagtaacttatttctgcactgttttgttgaactttgtggaaacattctttcgagtttgtttttgtcattttcgtaacagtcgtcgaactaggcctcaaaaacatacgtaacgaaaaggcctagcgaggcaaattctgattgatttgaatctatatttttctttaaaaagtcaagggttctatattgtgagtaaattaaatttacatttgagttgtttgttgctaagaggtagtaaatgtaagagagtactggttccttcagtagtgagtatttctcatagtgcagctttatttatctccaggatgtttttgtggctgtatttgattgatatgtgcttcttctgattcttgctaatttccaaccatattgaataaatgtgatcaagtcaaaaaaaaaaaaaaaaaaa

SEQ ID NO: 2446 - DNA, 458 bp, Homo Sapiens
  misc_feature (10)..(10): n is a, c, g, or t
  misc_feature (15)..(15): n is a, c, g, or t
  misc_feature (49)..(49): n is a, c, g, or t
  misc_feature (61)..(61): n is a, c, g, or t
  misc_feature (90)..(90): n is a, c, g, or t
  misc_feature (100)..(100): n is a, c, g, or t
  misc_feature (110)..(110): n is a, c, g, or t
  misc_feature (145)..(145): n is a, c, g, or t
  misc_feature (190)..(190): n is a, c, g, or t
  misc_feature (192)..(192): n is a, c, g, or t
  misc_feature (204)..(204): n is a, c, g, or t
  misc_feature (214)..(214): n is a, c, g, or t
  misc_feature (238)..(238): n is a, c, g, or t
  misc_feature (298)..(298): n is a, c, g, or t
  misc_feature (312)..(312): n is a, c, g, or t
gcgcgctganagccnggcggggcgggacgcacagctcggagccaccagnggtgacgaggancccggctgagggaggatgcgccgctgacncctgcgggancagcgcgccntgggcgggaggatgctccagaggggcctctgccgntggcgcacgcggcgtgctgccgaccccgtggcacctggcgcccantnggccccgtggcncatgccgccntccgccccaggttttgcgtgtgangcgtgtgtggaaatgtgaaatacgtaccagtcacaccaattatagtaccgtggtgccacntgatgaaataacangttatttatagacatggccttcccttggtaacacttaccttgccatctagaaaagaacgttgtcaattcggtagtcaaaccaatgttgtcaacaagttggttcattccttcaggacctacaaaatgaagataagggtatcaaaact

SEQ ID NO: 2447 - DNA, 397 bp, Homo Sapiens
  misc_feature (18)..(18): n is a, c, g, or t
  misc_feature (20)..(20): n is a, c, g, or t
tcagtgtgtgcggaacangncagccgagagcggagaggcgccgctgtagttaactcctccctgcccgccgcgccgaccctccccaggaacccccagggagccagcatgaagcgagctcaccccgagtacagctcctcggacagcgagctggacgagaccatcgaggtggagaaggagagtgcggacgagaatggaaacttgagttcggctctaggttccatgtccccaactacatcttcccagattttggccagaaaaagacggagaggaataattgagaagcgccgacgagaccggatcaataacagtttgtcttgagctgagaaggctggtacccagttgcttttgagaagcagggattttgttaagctaggaaaaagccgagattcctgcagat

SEQ ID NO: 2448 - DNA, 1901 bp, Homo Sapiens
ccgcggcgagtggagcgggagccgactggaagaagggctctagggagggggctgtggctgctggggtccgaggtggggccgggtacaccagccccatcactgtttgcagagagtcagggaggcggaaaagacacgcgctctaggctcccatcagggcacatggcccgggcccatcccccgcgcgtctccccggctgcggggcgcggggggctgccgggtgcgcttggctgtggcgcggcgcgttggagactttattgcgatgggacgataagaggggcgggggcggggtcctgggggccgaggcggcagcgctttaattaaaacggaaattgcggccccgggccgcgcgggggccggagggttccaagcggccccttagctggaagcgtttctccaggacccccccgcaacccccgccacgcccgggctgccccctcccgccaggccctgccggacccggcgccgtcttctcctccttgtcacccgcggtcgcttcgggcggggatcggtgccaccgagcgcaaagcctgcctcgccccccttccccgtcccccccatctcccaccgcccagtccccggcggcgatgagacagagcggcgcctcccagcccctgctgatcaacatgtacctgccagatcccgtcggagacggtctcttcaaggacgggaagaacccgagctgggggccgctgagccccgcggttcagaaaggcagcggacagatccagctgtggcagtttctgctggagctgctggctgaccgcgcgaacgccggctgcatcgcgtgggagggcggtcacggcgagttcaagctcacggacccggacgaggtggcgcggcggtggggcgagcgcaagagcaagcccaacatgaactacgacaagctgagccgcgccctgcgctactactacgacaagaacatcatgagcaaggtgcatggcaagcgctacgcctaccgcttcgacttccagggcctggcgcaggcctgccagccgccgcccgcgcacgctcatgccgccgccgcagctgctgccgccgccgcggccgcccaggacggcgcgctctacaagctgcccgccggcctcgccccgctgcccttccccggcctctccaaactcaacctcatggccgcctcggccggggtcgcgcccgccggcttctcctactggccgggcccgggccccgccgccaccgctgccgccgccaccgccgcgctctaccccagtcccagcttgcagcccccgcccgggcccttcggggccgtggccgcagcctcgcacttggggggccattaccactagacggggcggtcgggtgcctgcggcctcgcccgcacgcctagagtctcgcccgatcccatcggcatcccggggagggcccgggagcctccgtcaaccgtcctctaatccagagtttactccacctgccgcacttagcagggggacgggaccgaagctccctcaatccttgtctggtactagatttgctcctgtcccaccccgcagtcccctgaggagggcgatgtgcgccctctttcaccttttttcttctaggtctccaggtcccggaggggatttgtggacctctcttgtctccccaccactccagtgcatttccgcctggctcctagaagccccattcaatatcactactctttaacgagtgccaaatcttttcccacttttgctcttccccaaggaactgctcccacctcagcacgtggaggcctctcacggtcctccttcctgggacctgagcaggtttggtgaaagccaccgtcctccgtgacacacggcccccttcctcctgtccccacactcccaggagaaactcccggtgtgtttctgaccctttcagccccattaaagctcctgagctctcaaaaaaaaaaaaaaaaaaaa

SEQ ID NO: 2449 - DNA, 651 bp, Homo Sapiens
gctggtacgcctgcaggtaccggtccggaattcccgggtcgactactactactactaaattcgcggccgcgtcgacgtttgtttgtttgttttgagacagggtctcgctctgtcacccaggctggagtgtagtggtgcagtcttggctcactgcaacctccacctcctgggctcaagcgattctcatgcctcagcctcccgagtagctgggactacaggtgtgtgccactatgcctggctaatttttgtattttttgtagagacggggttttgccatgttgcccaggctggaagtgtctatgtttaactgcatcttataaaccagcaacaagttttctactgggaattagaatggtgcatacacaatgtattattatcactgtcagatgagcatgcttgaatgtagcatgactgcctctttttgcttttcctagaggttttttttttgcttgttactcatctgttgacctacctgggggaagtagcacccttgcatttcaaaaataaaattgatggcattaaaaaaaaaaaaaaaaaaaaaagtcgacgcggccgcggattttagtgtagtagtagtagtagtaggcggccgctctagaggatccaagcttacgtccgcctgcatgccacgtcatacttttttatagtggc

SEQ ID NO: 2450 - DNA, 1160 bp, Homo Sapiens
ccacactcagtctggcctcggggcctttgcactggctgtgtcccctgcctgtgatgccattctcctctgcctggccaactcctacgtttattcaagtctggaccttgtcatcggctcctcaggaaggcactccgggacccccagatgggggcggttccctgtgactcctggcacggaggccaaccccttccttgttcaatggttccttgagggaccattcccatgtgattatcgaccattcggcaggcgttcaaagtcaaaggccccacactgagtcctggcccagcgccctgtgcccgttggctgctggagggacagacggggcgtgcggctgaccatcccgtgcccgcaggctgaggatgcagcgctggaaggcggcggccttggcctcagtgctctgcagctccgtgctgtccatctggatgtgtcgagagggcctgcttctcagccaccgcctcggacctgcgctggtccccctgcaccgcctgcctcgaaccctggacgcccggattgcccgcctggcccagtaccgtgcactcctgcagggggccccggatgcgatggagctgcgcgagctgacgccctgggctgggcggcccccaggtccgcgccgtcgggcggggccccggcggcggcgcgcgcgtgcgcggttgggggcgcggccttgcgggctgcgcgagctggaggtgcgcgtgagcgagctgggcctgggctacgcgtccgacgagacggtgctgttccgctactgcgcaggcgcctgcgaggctgccgcgcgcgtctacgacctcgggctgcgacgactgcgccagcggcggcgcctgcggcgggagcgggtgcgcgcgcagccctgctgccgcccgacggcctacgaggacgaggtgtccttcctggacgcgcacagccgctaccacacggtgcacgagctgtcggcgcgcgagtgcgcctgcgtgtgaccctacctcactcggccggcgcggcggccactccccccgcctcgacggcaccactggccggccccgcgaaagactgcgcgtgcgtagagcacgccggcgcggccccgggactctcgcgataactgtactgagataaagtgtggcaactcgaaaaaaaaaaaaaaaaaaaaaaaaaaaaaaaaaaaaaagaaaaaaaaaaaaaaaaag

SEQ ID NO: 2451 - DNA, 204 bp, Homo Sapiens
tttttttttttttttttaaacagaactgatttatttataaagttcacgctcccttgaagaggtgtgccccacacaggcttctccctatcagagcagcagtgcccacaaacccaccccagggtgggctgtcacgggggcctcacgccagggaccccgcccctcagggactgctcgtgtccagatcttggccagcacctcgtgccg

SEQ ID NO: 2452 - DNA, 562 bp, Homo Sapiens
tttttttttttttctttctttttgttctattttattattgtaaccactttggtctttttttttttgtataatcaattgcagctagaatggtgtatggctcttaatagatattttggataatgctgagtcccagaaatgtgaagcctttcccgagtattgagttcattaaaggttattatcatcgtgtttaatcagtaagtgattttaactttcttcattatccccttctcttgtttaactgtggataagtagttcccatggattgcttcctctgtcttcttagcgagaaatatcggtggctatgagatcatagctcaacagcttcaattctgtgctcttcctctgagcaatttttcttcttttcagactttttccttttcttttcccttccctttttttcatgttcttcctcttcattactgtcatccggagtagtatagatggaagccagggtaaataaggaaaagataacaaaagccaataaaatgaatgccatttccaagttggtgtagggaagctccatgaaccaccaccgaaaacttcttcaccagaagcattcctg

SEQ ID NO: 2453 - DNA, 1281 bp, Homo Sapiens
tggggttctgtgccattctatcaagtgtctgtaaatataactactactacaatttcctatgcagaactgtttcatcaccagaaagatctctctcctgcctctcttctgccaccatctctaactcctgccaaccactgatctgttcttcatctctataattttgttactgtgagattaccaagtgatatgtgaccttcggaaatgattttctttactcagcataatgccctcaggtccgtcaaggtttgttgagtatatcagtagctaaactgggaccatttatttgtctcttcatctaatcatcaattaaaaatgaccacgcataaatgtaagcttttacagttaaacttattgtatataaatagtcacttcggctgggcgcggtggctcacgcctgtaatcacagcactttgggaggccgaggagggcggatcgcttgaggtcaggagttcaaaaccaacctggcccccatggtgaaaccctgtctctactaaaaatacaaatgagccaggtgtggtggtgtgcgcttgtgatcccagctacttgggaggttgaggcaggagaactgcttgagcccggaaggtggaggttgcagtgagccgagatcatgccattgcactccagcctggccaacacagcaagactccttctcaaaaaaaaaaaaaatgtcacttcatgcttagaaatatcagtagatggccgggtgtggtggcttagcctgtaatcctaacagtttgggaggctgaggtcaggagatcgaggtcatcctggcgaacatggtgaaaccccatctctactgagaatacaaaaattagctgggtgtggtggcacgtgcctgtggtcccagctacttgggaggctgaggcaggagaatcgcttgagcccgggtggcggaggttgtagtgagctgagatcgcgccactgcactacagcctggagagagagcgagaatctgtctcaaaaaaaataaaaaagggcagtagataaaaaaagtacaaacatgagtatcttgataaattctattctcaggctttcaggttcataatcctgttgatagatgacatgtagaaatagaagaatttgtaaatataggaatattcattgatgtttttaggactggattctaagggtggtttttacctctaatatccaaatactgctgcctcaagagaacaatttttgttttcaaaattccatgataaaaaagatgcagtaaccctgtatgtggcattttgtcaggttaattaagagcattttgcagcaaaaaaaaaaaaaaaaaaa

SEQ ID NO: 2454 - DNA, 1022 bp, Homo Sapiens
aaaatccgtgtttataaaccatcatagattaaaatacatagtatttgtactttaatgcaatagggtcccaggattcaaacaaggaaatttgattccagagttggcattatgtagttatgtactctgctacaaagaactagtggaggtaaacttcggcagtaaaattctcaacagtcaaatattaatgcatttcatatacatggctttgcatccgtagaggaagatacagttccttcagcacacgtgccaatttctgagtcttccactagagaatcctcaacagtttcttcttcagaatcaaattcctgattatccagtgattcaaaattatccagaggttcaccattcagtctctctattagctctgccatatactgtacatgttctgctacttctgccagttctttattctcctttttcaggcgggcaatttcattgtccttttgttcaatttctttatgaagtttctcattttccttaagtgcttcatacagcgcctttctccgtttttctgccacttccttccaatactgagaggatggattttctttaatcataagatcaaatgactcctgggtgactcctccaagatttttatttgtcacctagaattcctgggacaattaaccccaggtttgaaatgtttgtagatgtacgtggtcatcccagatgtccccttttgggacaagactgcggacagctcattttctcttccacagagatccagatgcaggaatgctgaatcatcttcggagtcctcttgggacagaactattctttatattctcttgatgtcttctggtacctgcttcatactggattcttttgatgatgggtagcacaagaacagcgcggccccacgtgttaagtagaaccgttcaaggtgcggaggaaaggagttcttaagtgtcgacttgccgtgtccatccgcggcttgccattggtgaccacaaccaaggcatatcttacccggaaagaaacccagacttggtcacaagcctatggaagaaacaccactatag

SEQ ID NO: 2455 - DNA, 365 bp, Homo Sapiens
gctcgacattcagaaaatgacgctttgatgttagctttgaagcagggtattcccagcatcacatttagtcagaaatatggaaggtatatgttaacatgatttacatatcctactctggtggagtctaaaggtaaataacagaaataagcaaggagccatgcagcaaggcaaattcacctttgtttgttgacacaaacagtgaagcttattttgggaataatgactgcatatgttcaggaaaattgggctcatgagtctactgtcagaacatttttcagaaaagagaaaaatgaatgtactgctgggagacagcagggaggggttcttttattatatacacaatctcttcttatgagaacaaatac

SEQ ID NO: 2456 - DNA, 457 bp, Homo Sapiens
  misc_feature (383)..(383): n is a, c, g, or t
  misc_feature (386)..(386): n is a, c, g, or t
  misc_feature (397)..(397): n is a, c, g, or t
  misc_feature (430)..(430): n is a, c, g, or t
tgggaaaaaatcaaggatttaatacaagggcaaatttcaaacatggcacaaagggctaaagtggctctctctactaaagccttggaagtgcctaattgctaatcaaacttcagctaacaccatcgtgtgtcctatttgggcagtgcatcttttaaagctctaaatttaggtgggaagcggggagggggacataacaaataaaaacattaaaagatggagcttctaaagttctagaactacccagctggaatcaggacataggctgagtctattctgcatgtgccactaacaaccaagaactaagggaagggaagttggcttgggagcagaagaaactgataatttctcatcccctatggggtggaatatcttctcagatggtnagnccttgtagganaaaaattccccttttttgggaaatgggcccaanaattggggaaattccccccccaaaacc

SEQ ID NO: 2457 - DNA, 366 bp, Homo Sapiens
  misc_feature (309)..(309): n is a, c, g, or t
  misc_feature (320)..(320): n is a, c, g, or t
tttttatttccagcgcatagtgtctttatttagaaaacagacggaatcaaacaggttggagttattgctttcttgttctgtatattcatattctccacttgaaaaagcacacagtcaaatctatcttcatccattctgttgatgagggtaagcaaaaaagatcactggttacttcaaaagaaccatttagagtcaaaatgcaggaatcttagtcctgtttccatttttgtcccccttgcttcacttggtatgtcatgctctatctcttctcctatgcagactttaagtcagtagccatcaatctgaagnattccctcccnctggcgggcacctaccagtttaggtggccggctgcagcgaaagggg

SEQ ID NO: 2458 - DNA, 3524 bp, Homo Sapiens
tctccgtcagccgcattgcccgctcggcgtccggcccccgacccgtgctcgtccgcccgcccgcccgcccgcccgcgccatgaacgccaaggtcgtggtcgtgctggtcctcgtgctgaccgcgctctgcctcagcgacgggaagcccgtcagcctgagctacagatgcccatgccgattcttcgaaagccatgttgccagagccaacgtcaagcatctcaaaattctcaacactccaaactgtgcccttcagattgtagcccggctgaagaacaacaacagacaagtgtgcattgacccgaagctaaagtggattcaggagtacctggagaaagctttaaacaagaggttcaagatgtgagagggtcagacgcctgaggaacccttacagtaggagcccagctctgaaaccagtgttagggaagggcctgccacagcctcccctgccagggcagggccccaggcattgccaagggctttgttttgcacactttgccatattttcaccatttgattatgtagcaaaatacatgacatttatttttcatttagtttgattattcagtgtcactggcgacacgtagcagcttagactaaggccattattgtacttgccttattagagtgtctttccacggagccactcctctgactcagggctcctgggttttgtattctctgagctgtgcaggtggggagactgggctgagggagcctggccccatggtcagccctagggtggagagccaccaagagggacgcctgggggtgccaggaccagtcaacctgggcaaagcctagtgaaggcttctctctgtgggatgggatggtggagggccacatgggaggctcacccccttctccatccacatgggagccgggtctgcctcttctgggagggcagcagggctaccctgagctgaggcagcagtgtgaggccagggcagagtgagacccagccctcatcccgagcacctccacatcctccacgttctgctcatcattctctgtctcatccatcatcatgtgtgtccacgactgtctccatggccccgcaaaaggactctcaggaccaaagctttcatgtaaactgtgcaccaagcaggaaatgaaaatgtcttgtgttacctgaaaacactgtgcacatctgtgtcttgtgtggaatattgtccattgtccaatcctatgtttttgttcaaagccagcgtcctcctctgtgaccaatgtcttgatgcatgcactgttccccctgtgcagccgctgagcgaggagatgctccttgggccctttgagtgcagtcctgatcagagccgtggtcctttggggtgaactaccttggttcccccactgatcacaaaaacatggtgggtccatgggcagagcccaagggaattcggtgtgcaccagggttgaccccagaggattgctgccccatcagtgctccctcacatgtcagtaccttcaaactagggccaagcccagcactgcttgaggaaaacaagcattcacaacttgtttttggtttttaaaacccagtccacaaaataaccaatcctggacatgaagattctttcccaattcacatctaacctcatcttcttcaccatttggcaatgccatcatctcctgccttcctcctgggccctctctgctctgcgtgtcacctgtgcttcgggcccttcccacaggacatttctctaagagaacaatgtgctatgtgaagagtaagtcaacctgcctgacatttggagtgttcccctcccactgagggcagtcgatagagctgtattaagccacttaaaatgttcacttttgacaaaggcaagcacttgtgggtttttgttttgtttttcattcagtcttacgaatacttttgccctttgattaaagactccagttaaaaaaaattttaatgaagaaagtggaaaacaaggaagtcaaagcaaggaaactatgtaacatgtaggaagtaggaagtaaattatagtgatgtaatcttgaattgtaactgttcgtgaatttaataatctgtagggtaattagtaacatgtgttaagtattttcataagtatttcaaattggagcttcatggcagaaggcaaacccatcaacaaaaattgtcccttaaacaaaaattaaaatcctcaatccagctatgttatattgaaaaaatagagcctgagggatctttactagttataaagatacagaactctttcaaaaccttttgaaattaacctctcactataccagtataattgagttttcagtggggcagtcattatccaggtaatccaagatattttaaaatctgtcacgtagaacttggatgtacctgcccccaatccatgaaccaagaccattgaattcttggttgaggaaacaaacatgaccctaaatcttgactacagtcaggaaaggaatcatttctatttctcctccatgggagaaaatagataagagtagaaactgcagggaaaattatttgcataacaattcctctactaacaatcagctccttcctggagactgcccagctaaagcaatatgcatttaaatacagtcttccatttgcaagggaaaagtctcttgtaatccgaatctctttttgctttcgaactgctagtcaagtgcgtccacgagctgtttactagggatccctcatctgtccctccgggacctggtgctgcctctacctgacactcccttgggctccctgtaacctcttcagaggccctcgctgccagctctgtatcaggacccagaggaaggggccagaggctcgttgactggctgtgtgttgggattgagtctgtgccacgtgtatgtgctgtggtgtgtccccctctgtccaggcactgagataccagcgaggaggctccagagggcactctgcttgttattagagattacctcctgagaaaaaagcttccgcttggagcagaggggctgaatagcagaaggttgcacctcccccaaccttagatgttctaagtctttccattggatctcattggacccttccatggtgtgatcgtctgactggtgttatcaccgtgggctccctgactgggagttgatcgcctttcccaggtgctacacccttttccagctggatgagaatttgagtgctctgatccctctacagagcttccctgactcattctgaaggagccccattcctgggaaatattccctagaaacttccaaatcccctaagcagaccactgataaaaccatgtagaaaatttgttattttgcaacctcgctggactctcagtctctgagcagtgaatgattcagtgttaaatgtgatgaatactgtattttgtattgtttcaagtgcatctcccagataatgtgaaaatggtccaggagaaggccaattcctatacgcagcgtgctttaaaaaataaataagaaacaactctttgagaaacaacaatttctactttgaagtcataccaatgaaaaaatgtatatgcacttataattttcctaataaagttctgtactcaaatgta

SEQ ID NO: 2459 - DNA, 281 bp, Homo Sapiens
  misc_feature (45)..(45): n is a, c, g, or t
  misc_feature (89)..(89): n is a, c, g, or t
ataaattgcaaaacctaatgaaagtgactgcttggtaaacaaatnattattatattataaaatgctataaaagagccatattgaaagtnccctgttggagacagggcaaatgccacaaaaatgatgtaaatttacatggaggaaaagtagaatctgcctggtttgtaggcagcagaagacatttttcatcagtgggcaggtgttctttaccttttgtagaaatgggagtcaagtctcaaataggaggctccacaaaatctcatgccaggtctctggtacct

SEQ ID NO: 2460 - DNA, 595 bp, Homo Sapiens
  misc_feature (585)..(585): n is a, c, g, or t
tctgttctaatgtatcattaagctccttaaaatactggagaacagcttccttatcgccttggatcattttctcagaatgagatttttgttctttcagcttttcaataagatgggtaagatctgtccagtgtgtgtcagtcaactgttcaagcagtttttgaggagtgtccttttctttcaaataggcactttgaaggtcatctataggatgaccatgatgttgacctatggtaaggcaatgaccacaaactaattttttatctaatagacagtaaacatttaatggttgcctgtaatgttcagggcaggtgacaatatctggatggtcttcttgctggtacttttcaataatagcccttagtgcaaaattaacaggtaaagattcaatgccagttggagcaatttcagtaatacttctgcaattagggcacttgagtggaattcgtaaaggtctccatatataaaagttaccagatgcctgaagaatgttttccaaacaatttctacaaaatgtatgagagcatggcagtacacgaggatcttcaaaaatactataacatatgggacaagttaactcttgctcanaattgtgcat

SEQ ID NO: 2461 - DNA, 2068 bp, Homo Sapiens
atccgaggcaggcgttggttctgtgcgcctcaggagtataatgtctcaggaaggcgattatgggaggtggaccatatctagtagtgatgaaagtgaggaagaaaagccaaaaccagacaagccatctacctcttctcttctctgtgccaggcaaggagcagcaaatgagcccaggtacacctgttccgaggcccagaaagctgcacacaagaggaaaatatcacctgtgaaattcagcaatacagattcagttttacctcccaaaaggcagaaaagcggttcccaggaggacctcggctggtgtctgtccagcagtgatgatgagctgcaaccagaaatgccgcagaagcaggctgagaaagtggtgatcaaaaaggagaaagacatctctgctcccaatgacggcactgcccaaagaactgaaaatcatggcgctcccgcctgccacaggctcaaagaggaggaagacgagtatgagacatcaggggagggccaggacatttgggacatgctggataaagggaaccccttccagttttacctcactagagtctctggagttaagccaaagtataactctggagccctccacatcaaggatattttatctcctttatttgggacgcttgtttcttcagctcagtttaactactgctttgacgtggactggctcgtaaaacagtatccaccagagttcaggaagaagccaatcctgcttgtgcatggtgataagcgagaggctaaggctcacctccatgcccaggccaagccttacgagaacatctctctctgccaggcaaagttggatattgcgtttggaacacaccacacgaaaatgatgctgctgctctatgaagaaggcctccgggttgtcatacacacctccaacctcatccatgctgactggcaccagaaaactcaaggaatatggttgagccccttatacccacgaattgctgatggaacccacaaatctggagagtcgccaacacattttaaagctgatctcatcagttacttgatggcttataatgccccttctctcaaggagtggatagatgtcattcacaagcacgatctctctgaaacaaatgtttatcttattggttcaaccccaggacgctttcaaggaagtcaaaaagataattggggacattttagacttaagaagcttctgaaagaccatgcctcatccatgcctaacccagagtcctggcctgtcgtaggtcagttttcaagcgttggctccttgggagccgatgaatcaaagtggttatgttctgagtttaaagagagcatgctgacactggggaaggaaagcaagactccaggaaaaagctctgttcctctttacttgatctatccttctgtggaaaatgtgcggaccagtttagaaggatatcctgctgggggctctcttccctatagcatccagacagctgaaaaacagaattggctgcattcctattttcacaaatggtcagctgagacttctggccgcagcaatgccatgccacatattaagacatatatgaggccttctccagacttcagtaaaattgcttggttccttgtcacaagcgcaaatctgtccaaggctgcctggggagcattggagaagaatggcacccagctgatgatccgctcctacgagctcggggtccttttcctcccttcagcatttggtctagacagtttcaaagtgaaacagaagttcttcgctggcagccaggagccaatggccacctttcctgtgccatatgatttgcctccagaactgtatggaagtaaagatcggccatggatatggaacattccttatgtcaaagcaccggatacgcatgggaacatgtgggtgccctcctgagaatcttgaggcactgtgaaatttaagtgtatgacattgagccacaaacatggaatctcttctttgtactggatgtccacttcccttaaagtcttatttgcacccttacaaaatctttccaaaggtcactcttatgaatggatgttggttatacttttaatggacattaacattcctaataaagtattagtttcttaattc

SEQ ID NO: 2462 - DNA, 357 bp, Homo Sapiens
gctgtggactcgtcatggcgaccgagcagaggcctttccacctggtggtgttcggcgcgtctggcttcaccggccagttcgtgaccgaggaggtggcccgggagcaggtggacccggagcggagctcccgcctgccctgggccgtggcgggccgctcccgggagaagctgcagcgggtgctggagaaggcggccctgaagctgggaagaccaacactgtcatctgaagttggaatcatcatctgtgatattgctaatccagcctcgcttgatgaaatggctaaacaggcaacagttgtcctcaattgcgtaggaccatatcggttttatggagaacctgtaataaaagcatgtattg

SEQ ID NO: 2463 - DNA, 162 bp, Homo Sapiens
ttttttttttttttttttttgcacttatggtatttattgttggaagattgagtaccttaatgcacaccaatgctcaaatgacttgggggcacataggggactgctgtcaccatgcctcactcctgcagggaaggggctgccctactaaaaccccagcgggcc

SEQ ID NO: 2464 - DNA, 793 bp, Homo Sapiens
  misc_feature (18)..(18): n is a, c, g, or t
  misc_feature (43)..(43): n is a, c, g, or t
  misc_feature (47)..(47): n is a, c, g, or t
  misc_feature (90)..(90): n is a, c, g, or t
  misc_feature (134)..(134): n is a, c, g, or t
  misc_feature (144)..(144): n is a, c, g, or t
  misc_feature (162)..(162): n is a, c, g, or t
  misc_feature (169)..(169): n is a, c, g, or t
  misc_feature (184)..(185): n is a, c, g, or t
  misc_feature (189)..(189): n is a, c, g, or t
  misc_feature (193)..(193): n is a, c, g, or t
  misc_feature (199)..(199): n is a, c, g, or t
  misc_feature (202)..(203): n is a, c, g, or t
  misc_feature (207)..(207): n is a, c, g, or t
  misc_feature (214)..(214): n is a, c, g, or t
  misc_feature (219)..(219): n is a, c, g, or t
  misc_feature (224)..(224): n is a, c, g, or t
  misc_feature (228)..(229): n is a, c, g, or t
  misc_feature (233)..(233): n is a, c, g, or t
  misc_feature (241)..(241): n is a, c, g, or t
  misc_feature (243)..(243): n is a, c, g, or t
  misc_feature (245)..(245): n is a, c, g, or t
  misc_feature (253)..(255): n is a, c, g, or t
  misc_feature (258)..(259): n is a, c, g, or t
  misc_feature (263)..(263): n is a, c, g, or t
  misc_feature (277)..(277): n is a, c, g, or t
  misc_feature (280)..(280): n is a, c, g, or t
  misc_feature (282)..(282): n is a, c, g, or t
  misc_feature (292)..(292): n is a, c, g, or t
  misc_feature (298)..(298): n is a, c, g, or t
  misc_feature (301)..(301): n is a, c, g, or t
  misc_feature (306)..(306): n is a, c, g, or t
  misc_feature (310)..(310): n is a, c, g, or t
  misc_feature (312)..(313): n is a, c, g, or t
  misc_feature (315)..(315): n is a, c, g, or t
  misc_feature (317)..(317): n is a, c, g, or t
  misc_feature (330)..(330): n is a, c, g, or t
  misc_feature (340)..(340): n is a, c, g, or t
  misc_feature (349)..(349): n is a, c, g, or t
  misc_feature (375)..(375): n is a, c, g, or t
  misc_feature (392)..(393): n is a, c, g, or t
  misc_feature (398)..(398): n is a, c, g, or t
  misc_feature (400)..(400): n is a, c, g, or t
  misc_feature (406)..(406): n is a, c, g, or t
  misc_feature (408)..(409): n is a, c, g, or t
  misc_feature (412)..(412): n is a, c, g, or t
  misc_feature (414)..(415): n is a, c, g, or t
  misc_feature (423)..(423): n is a, c, g, or t
  misc_feature (434)..(434): n is a, c, g, or t
  misc_feature (445)..(445): n is a, c, g, or t
  misc_feature (453)..(453): n is a, c, g, or t
  misc_feature (462)..(463): n is a, c, g, or t
  misc_feature (468)..(468): n is a, c, g, or t
  misc_feature (472)..(472): n is a, c, g, or t
  misc_feature (474)..(474): n is a, c, g, or t
  misc_feature (481)..(481): n is a, c, g, or t
  misc_feature (485)..(485): n is a, c, g, or t
  misc_feature (492)..(492): n is a, c, g, or t
  misc_feature (507)..(507): n is a, c, g, or t
  misc_feature (513)..(513): n is a, c, g, or t
  misc_feature (524)..(524): n is a, c, g, or t
  misc_feature (526)..(526): n is a, c, g, or t
  misc_feature (529)..(529): n is a, c, g, or t
  misc_feature (531)..(532): n is a, c, g, or t
  misc_feature (541)..(541): n is a, c, g, or t
  misc_feature (566)..(566): n is a, c, g, or t
  misc_feature (569)..(569): n is a, c, g, or t
  misc_feature (571)..(574): n is a, c, g, or t
  misc_feature (580)..(580): n is a, c, g, or t
  misc_feature (582)..(583): n is a, c, g, or t
  misc_feature (591)..(591): n is a, c, g, or t
  misc_feature (593)..(593): n is a, c, g, or t
  misc_feature (595)..(596): n is a, c, g, or t
  misc_feature (614)..(614): n is a, c, g, or t
  misc_feature (618)..(619): n is a, c, g, or t
  misc_feature (628)..(629): n is a, c, g, or t
  misc_feature (635)..(635): n is a, c, g, or t
  misc_feature (641)..(641): n is a, c, g, or t
  misc_feature (645)..(645): n is a, c, g, or t
  misc_feature (648)..(648): n is a, c, g, or t
  misc_feature (657)..(657): n is a, c, g, or t
  misc_feature (660)..(662): n is a, c, g, or t
  misc_feature (666)..(669): n is a, c, g, or t
  misc_feature (672)..(672): n is a, c, g, or t
  misc_feature (675)..(675): n is a, c, g, or t
  misc_feature (681)..(682): n is a, c, g, or t
  misc_feature (692)..(694): n is a, c, g, or t
  misc_feature (705)..(705): n is a, c, g, or t
  misc_feature (710)..(711): n is a, c, g, or t
  misc_feature (714)..(714): n is a, c, g, or t
  misc_feature (716)..(716): n is a, c, g, or t
  misc_feature (727)..(728): n is a, c, g, or t
  misc_feature (732)..(732): n is a, c, g, or t
  misc_feature (741)..(741): n is a, c, g, or t
  misc_feature (744)..(744): n is a, c, g, or t
  misc_feature (753)..(753): n is a, c, g, or t
  misc_feature (755)..(755): n is a, c, g, or t
  misc_feature (765)..(765): n is a, c, g, or t
  misc_feature (779)..(779): n is a, c, g, or t
  misc_feature (782)..(782): n is a, c, g, or t
  misc_feature (786)..(786): n is a, c, g, or t
  misc_feature (789)..(790): n is a, c, g, or t
ttctctagatgagtcacngtctcatcgtcttcagagccatgtncccntggtcagatggaacatatgaccagctttcagaatccagtagantgcaaggttcttgtaggactagacaattagcagatgtttccagngctttagggncactgtccagcgcctccnacttcanttgactgagttctgnnagcnctgnccactncannttcngcacccngcccncctgntctnnggtntctacgangngntccagttnnncannatanaggggcacggggcnccnanattccaccanctcgtncanatttntttncnntngntccaccccgtccnccacaatgtncacaagggnggtggcccccctaggctccacccccnggattctcagggagtgnnctcgntnttctgncnnccnannacattcanaaagtcatttngggggggtcgntgcagggngtctcaggnnggganagcnangcgccancctnggagggngggcggtgggggganctcacnagggggcaaancnggncnnagatctagntaaggagaggctcaaaggggctggnacntnnnnggaggngnntccggggncntnnaccaaggtggaggtgggncaanngagagttanncaaggnttgaanttgngtngaggaggcnttnnncccnnnnctncgncttggnncaacgagagnnnttgcgaggganggtcnncgngnagaagggatannagcnggagcgagnggngggagcagnanagcggagagnggagagagcgatgnganaganggnnccc

SEQ ID NO: 2465 - DNA, 4171 bp, Homo Sapiens
gggccgcctctgcacgtccgccccggagcccgcacccgcgccccacgcgccgccgaggactcggcccggctcgtggagcccttcgcccgcggcgtgagtacccccgacccgcccgtccccgctctgctcgcgccctgccgctgcgccgccctcggtggcttttccgacgggcgagccccgtgctgtgcgggaaagaatccgacaacttcgcagcccatcccggctggacgcgaccgggagtgcagcagcccgttcccctcctcggtgccgcctctgcccagcgtttgcttggctgggctaccacctgcgctcggacggcgctcggagggtcctcgcccccggcctgcctacctgaaaaccagaactgatggctctatttgcagtctttcagacaacattcttcttaacattgctgtccttgaggacttaccagagtgaagtcttggctgaacgtttaccattgactcctgtatcacttaaagtttccaccaattctacgcgtcagagtttgcacttacaatggactgtccacaaccttccttatcatcaggaattgaaaatggtatttcagatccagatcagtaggattgaaacatccaatgtcatctgggtggggaattacagcaccactgtgaagtggaaccaggttctgcattggagctgggaatctgagctccctttggaatgtgccacacactttgtaagaataaagagtttggtggacgatgccaagttccctgagccaaatttctggagcaactggagttcctgggaggaagtcagtgtacaagattctactggacaggatatattgttcgttttccctaaagataagctggtggaagaaggcaccaatgttaccatttgttacgtttctaggaacattcaaaataatgtatcctgttatttggaagggaaacagattcatggagaacaacttgatccacatgtaactgcattcaacttgaatagtgtgcctttcattaggaataaagggacaaatatctattgtgaggcaagtcaaggaaatgtcagtgaaggcatgaaaggcatcgttctttttgtctcaaaagtacttgaggagcccaaggacttttcttgtgaaaccgaggacttcaagactttgcactgtacttgggatcctgggacggacactgccttggggtggtctaaacaaccttcccaaagctacactttatttgaatcattttctggggaaaagaaactttgtacacacaaaaactggtgtaattggcaaataactcaagactcacaagaaacctataacttcacactcatagctgaaaattacttaaggaagagaagtgtcaatatcctttttaacctgactcatcgagtttatttaatgaatccttttagtgtcaactttgaaaatgtaaatgccacaaatgccatcatgacctggaaggtgcactccataaggaataatttcacatatttgtgtcagattgaactccatggtgaaggaaaaatgatgcaatacaatgtttccatcaaggtgaacggtgagtacttcttaagtgaactggaacctgccacagagtacatggcgcgagtacggtgtgctgatgccagccacttctggaaatggagtgaatggagtggtcagaacttcaccacacttgaagctgctccctcagaggcccctgatgtctggagaattgtgagcttggagccaggaaatcatactgtgaccttattctggaagccattatcaaaactgcatgccaatggaaagatcctgttctataatgtagttgtagaaaacctagacaaaccatccagttcagagctccattccattccagcaccagccaacagcacaaaactaatccttgacaggtgttcctaccaaatctgcgtcatagccaacaacagtgtgggtgcttctcctgcttctgtaatagtcatctctgcagaccccgaaaacaaagaggttgaggaagaaagaattgcaggcacagagggtggattctctctgtcttggaaaccccaacctggagatgttataggctatgttgtggactggtgtgaccatacccaggatgtgctcggtgatttccagtggaagaatgtaggtcccaataccacaagcacagtcattagcacagatgcttttaggccaggagttcgatatgacttcagaatttatgggttatctacaaaaaggattgcttgtttattagagaaaaaaacaggatactctcaggaacttgctccttcagacaaccctcacgtgctggtggatacattgacatcccactccttcactctgagttggaaagattactctactgaatctcaacctggttttatacaagggtaccatgtctatctgaaatccaaggcgaggcagtgccacccacgatttgaaaaggcagttctttcagatggttcagaatgttgcaaatacaaaattgacaacccggaagaaaaggcattgattgtggacaacctaaagccagaatccttctatgagtttttcatcactccattcactagtgctggtgaaggccccagtgctacgttcacgaaggtcacgactccggatgaacactcctcgatgctgattcatatcctactgcccatggttttctgcgtcttgctcatcatggtcatgtgctacttgaaaagtcagtggatcaaggagacctgttatcctgacatccctgacccttacaagagcagcatcctgtcattaataaaattcaaggagaaccctcacctaataataatgaatgtcagtgactgtatcccagatgctattgaagttgtaagcaagccagaagggacaaagatacagttcctaggcactaggaagtcactcacagaaaccgagttgactaagcctaactacctttatctccttccaacagaaaagaatcactctggccctggcccctgcatctgttttgagaacttgacctataaccaggcagcttctgactctggctcttgtggccatgttccagtatccccaaaagccccaagtatgctgggactaatgacctcacctgaaaatgtactaaaggcactagaaaaaaactacatgaactccctgggagaaatcccagctggagaaacaagtttgaattatgtgtcccagttggcttcacccatgtttggagacaaggacagtctcccaacaaacccagtagaggcaccacactgttcagagtataaaatgcaaatggcagtctccctgcgtcttgccttgcctcccccgaccgagaatagcagcctctcctcaattacccttttagatccaggtgaacactactgctaaccagcatgccgatttcataccttatgctacacagacattaagaagagcagagctggcaccctgtcatcaccagtggccttggtccttaatcccagtacaatttgcaggtctggtttatataagaccactacagtctggctaggttaaaggccagaggctatggaacttaacactccccattggagcaagcttgccctagagacggcaggatcatgggagcatgcttaccttctgctgtttgttccaggctcacctttagaacaggagacttgagcttgacctaaggatatgcattaaccactctacagactcccactcagtactgtacagggtggctgtggtcctagaagttcagtttttactgaggaaatatttccattaacagcaattattatattgaaggctttaataaaggccacaggagacattactatagcatagattgtcaaatgtaaatttactgagcgtgttttataaaaaactcacaggtgtttgaggccaaaacagattttagacttaccttgaacggataagaatctatagttcactgacacagtaaaattaactctgtgggtgggggcggggggcatagctctaatctaatatataaaatgtgtgatgaatcaacaagatttccacaattcttctgtcaagcttactacagtgaaagaatgggattggcaagtaacttctgacttactgtcagttgtacttctgctccatagacatcagtattctgccatcatttttgatgactacctcagaacataaaaaggaacgtatatcacataattccagtcacagtttttggttcctcttttctttcaagaactatatataaatgacctgttttcacgcggccgc

SEQ ID NO: 2466 - DNA, 314 bp, Homo Sapiens
gacaaatgtttatcctttatttctggtccaaaaataagtgaggaggaggaccactcaggaatctgaatcctcttgtgattaaagaaaaatataaagatgtgttcctcaggaaaatcttatttgtaaactgaggactagcagattttgaatctagaaataatactagatgtctgtttactaagaccggaggtaaatccttaacttttaggttatcagtgcttccttgttcaggcttcagtttgacagatcttcacaaaatgacacatctgttaaaatgtctttatgtcaagatggtcaacttccaaccccccccc

SEQ ID NO: 2467 - DNA, 2499 bp, Homo Sapiens
tgacagcagttggtaaactgcttttagggatactggctgacttcaagtggattaataccttgtatctttatgttgctaccttaatcatcatgggcctagccttgtgtgcaattccatttgccaaaagctatgtcacattggcgttgctttctgggatcctagggtttcttactggtaattggtccatctttccatatgtgaccacgaagactgtgggaattgaaaaattagcccatgcctatgggatattaatgttctttgctggacttggaaatagcctaggaccacccatcgttggttggttttatgactggacccagacctatgatattgcattttattttagtggcttctgcgtcctgctgggaggttttattctgctgctggcagccttgccctcttgggatacatgcaacaagcaactccccaagccagctccaacaactttcttgtacaaagttgcctctaatgtttagaagaatattggaagacactatttttgctattttataccatatagcaacgatattttaacagattctcaagcaaattttctagagtcaagactattttctcatagcaaaatttcacaatgactgactctgaatgaattatttttttttatatatcctattttttatgtagtgtatgcgtagcctctatctcgtatttttttctatttctcctccccacaccatcaatgggactattctgttttgctgttattcactagttcttaacattgtaaaaagtttgaccagcctcagaaggctttctctgtgtaaagaagtataatttctctgctgactccatttaatccactgcaaggcacctagagagactgctcctattttaaaagtgatgcaagcatcatgataagatatgtgtgaagcccactaggaaataaatcattctcttctctatgtttgacttgctagtaaacagaagacttcaagccagccaggaaattaaagtggcgactaaaacagccttaagaattgcagtggagcaaattggtcattttttaaaaaaatatattttaacctacagtcaccagttttcattattctatttacctcactgaagtactcgcatgttgtttggtacccactgagcaactgtttcagttcctaaggtatttgctgagatgtgggtgaactccaaatggagaagtagtcactgtagactttcttcatggttgaccactccaaccttgctcacttttgcttcttggccatccactcagctgatgtttcctggaagtgctaattttacctgtttccaaattggaaacacatttctcaatcattccgttctggcaaatgggaaacatccatttgctttgggcacagtggggatgggctgcaagttcttgcatatcctcccagtgaagcatttatttgctactatcagattttaccactatcaaatataattcaagggcagaattaaacgtgagtgtgtgtgtgtgtgtgtgtgtgtgtgctatgcatgctctaagtctgcatgggatatgggaatggaaaagggcaataagaaattaatacccttatgcagttgcatttaaccttaagaaaaatgtccttgggataaactccaatgtttaatacattgattttttttctaaagaaatgggttttaaactttggtatgcatcagaattccctatagatctttttgaaaatataggtacctgggtatcacacatagaacttttaattctgctggtgtaggctgttgcccaaacatctataattttactgagctcttcaagtgattctgataacacagcctggattgagaatttttataagattggcaatggaaaaacatttattcttttaaataataatttttttaaaacccaagaggtcaggggattttataaaccaatagccaagtgttctttaaataggaggcacccttcccattgtgccaaaatcatcttttcatttattttgaaatttgtatgattattttatacttgtatgttgcctttcttcgaaggcgcctgaagcactttataaacacaaatcctcacaatacctctgtgaggtaggtaaatagtacttttctatgtagtaaacctggaatatggagaatttcataacagttcattctacttaataatgcaataatggagctccaagttgtcttggacttctacaccacactcagacttctggaaagttttctgtacctcattctttagtccctgtcaaggttagtaaataaaataagtgacataaaaaaaaaaaaaaaactaaactacttgttgtgttgaaagttcctttttgccagttatgttcaggaaacccaataacctgaaaaagtttgactttgatgtgacatcttcatattcatcaatgctgataattgtccaaaggcatcttcactatgtctgctaaataacatccaatgtgggcgttatctgttgtctaggggatgaattttaagttacaataaaatatttttctttgttttgcatcaaaaaaaaaa

SEQ ID NO: 2468 - DNA, 2254 bp, Homo Sapiens
caaccatatccaagcctttgcccgaatacatcctatctgccacacatccagcgtgaggtccctccagctacaaggtgggcaccatggcggagaagtttgactgccactactgcagggatcccttgcaggggaagaagtatgtgcaaaaggatggccaccactgctgcctgaaatgctttgacaagttctgtgccaacacctgtgtggaatgccgcaagcccatcggtgcggactccaaggaggtgcactataagaaccgcttctggcatgacacctgcttccgctgtgccaagtgccttcaacccttggccaatgagacctttgtggccaaggacaacaagatcctgtgcaacaagtgcaccactcgggaggacttccccaagtgcaaggggtgcttcaaggccattgtggcaggagatcaaaacgtggagtacaaggggaccgtctggcacaaagactgcttcacctgtagtaactgcaagcaagtcatcgggactggaagcttcttccctaagggggaggacttctactgcgtgacttgccatgagaccaagttggccaagcattgcgtgaagtgcaacaaggccatcacatctggaggaatcacttaccaggatcagccctggcatgccgattgctttgtgtgtgttacctgctctaagaagctggctgggcagcgtttcaccgctgtggaggaccagtattactgcgtggattgctacaagaacttcgtggccaagaagtgtgctggatgcaagaaccccatcactgggtttggtaaaggctccagtgtggtggcctatgaaggacaatcctggcacgactactgcttccactgcaaaaaatgctccgtgaatctggccaacaagcgctttgttttccaccaggagcaagtgtattgtcccgactgtgccaaaaagctgtaaactgacaggggctcctgtcctgtaaaagggcatttgaatctcgttctttgtgtccttactttctgccctataccatcaataggggaagagtggtccttcccttctttaaagttcctcccttccgtcttttctcccattttacagtattactcaaataagggcacacagtgatcatattagcatttagcaaaaagcaaccctgcagcaaagtgaatttctgtccggctgcaatttaaaaatgaaaacttaggtagattgactcttctgcatgtttctcatagagcagaaaagtgctaatcatttagccacttagtgatgtaagcaagaagcataggagataaaacccccactgagatgcctctcatgcctcagctgggacccaccgtgtagacacacgacatgcaagagttgcagcggctgctccaactcactgctcaccctcttctgtgagcaggaaagaaccctactgacatgcatggtttaacttcctcatcagaactctgcccttccttctgttcttttgtgctttcaaataactaacacgaacttccagaaaattaacatttgaacttagctgtaattctaaactgacctttccccgtactaacgtttggtttccccgtgtggcatgttttctgagcgttcctactttaaagcatggaacatgcaggtgatttgggaagtgtagaaagacctgagaaaacgagcctgtttcagaggaacatcgtcacaacgaatacttctggaagcttaacaaaactaaccctgctgtcctttttattgtttttaattaatatttttgttttaattgatagcaaaatagtttatgggtttggaaacttgcatgaaaatattttagccccctcagatgttcctgcagtgctgaaattcatcctacggaagtaaccgcaaaactctagagggggagttgagcaggcgccagggctgtcatcaacatggatatgacatttcacaacagtgactagttgaatcccttgtaacgtagtagttgtctgctctttgtccatgtgttaatgaggactgcaaagtcccttctgttgtgattcccaggacttttcctcaagaggaaatctggatttccacctaccgcttacctgaaatgcaggatcacctacttactgtattctacattattatatgacatagtataatgagacaatatcaaaagtaaacatgtaatgacaatacatactaacattcttgtaggagtggttagagaagctgatgcctcatttctacattctgtcattagctattatcatctaacgtttcagtgtatccttacagaaataaagcagcatatgaat

SEQ ID NO: 2469 - DNA, 1630 bp, Homo Sapiens
cggcagccgcccgcagctgcagagagtcccgctgcgtctccgccgcgtgcgccctcctcgaccagcagacccgcgctgcgctccgccgctgacatgtgtgccgctcagatgccgcccctggcgcacatcttccgagggacgttcgtccactccacctggacctgccccatggaggtgctgcgggatcacctcctcggcgtgagcgacagcggcaaaatagtgtttttagaagaagcatctcaacaggaaaaactggccaaagaatggtgcttcaagccgtgtgaaataagagaactgagccaccatgagttcttcatgcctgggctggttgatacacacatccatgcctctcagtattcctttgctggaagtagcatagacctgccactcttggagtggctgaccaagtacacatttcctgcagaacacagattccagaacatcgactttgcagaagaagtatataccagagttgtcaggagaacactaaagaatggaacaaccacagcttgttactttgcaacaattcacactgactcatctctgctccttgccgacattacagataaatttggacagcgggcatttgtgggcaaagtttgcatggatttgaatgacacttttccagaatacaaggagaccactgaggaatcgatcaaggaaactgagagatttgtgtcagaaatgctccaaaagaactattctagagtgaagcccatagtgacaccacgtttttccctctcctgctctgagactttgatgggtgaactgggcaacattgctaaaacccgtgatttgcacattcagagccatataagtgaaaatcgtgatgaagttgaagctgtgaaaaacttataccccagttataaaaactacacatctgtgtatgataaaaacaatcttttgacaaataagacagtgatggcacacggctgctacctctctgcagaagaactgaacgtattccatgaacgaggagcatccatcgcacactgtcccaattctaatttatcgctcagcagtggatttctaaatgtgctagaagtcctgaaacatgaagtcaagatagggctgggtacagacgtggctggtggctattcatattccatgcttgatgcaatcagaagagcagtgatggtttccaatatccttttaattaataaggtaaatgagaaaagcctcaccctcaaagaagtcttcagactagctactcttggaggaagccaagccctggggctggatggtgagattggaaactttgaagtgggcaaggaatttgatgccatcctgatcaaccccaaagcatccgactctcccattgacctgttttatggggacttttttggtgatatttctgaggctgttatccagaagttcctctatctaggagatgatcgaaatattgaagaggtttatgtgggcggaaagcaggtggttccgttttccagctcagtgtaagaccctcgggcgtctacaaagttctcctgggattagcgtggttctgcatctcccttgtgcccaggtggagttagaaagtcaaaaaatagtaccttgttcttgggatgactatccctttctgtgtctagttacagtattcacttgacaaatagttcgaaggaagttgcactaa

SEQ ID NO: 2470 - DNA, 4989 bp, Homo Sapiens
ttttttttttttttgagaaagggaatttcatcccaaataaaaggaatgaagtctggctccggaggagggtccccgacctcgctgtgggggctcctgtttctctccgccgcgctctcgctctggccgacgagtggagaaatctgcgggccaggcatcgacatccgcaacgactatcagcagctgaagcgcctggagaactgcacggtgatcgagggctacctccacatcctgctcatctccaaggccgaggactaccgcagctaccgcttccccaagctcacggtcattaccgagtacttgctgctgttccgagtggctggcctcgagagcctcggagacctcttccccaacctcacggtcatccgcggctggaaactcttctacaactacgccctggtcatcttcgagatgaccaatctcaaggatattgggctttacaacctgaggaacattactcggggggccatcaggattgagaaaaatgctgacctctgttacctctccactgtggactggtccctgatcctggatgcggtgtccaataactacattgtggggaataagcccccaaaggaatgtggggacctgtgtccagggaccatggaggagaagccgatgtgtgagaagaccaccatcaacaatgagtacaactaccgctgctggaccacaaaccgctgccagaaaatgtgcccaagcacgtgtgggaagcgggcgtgcaccgagaacaatgagtgctgccaccccgagtgcctgggcagctgcagcgcgcctgacaacgacacggcctgtgtagcttgccgccactactactatgccggtgtctgtgtgcctgcctgcccgcccaacacctacaggtttgagggctggcgctgtgtggaccgtgacttctgcgccaacatcctcagcgccgagagcagcgactccgaggggtttgtgatccacgacggcgagtgcatgcaggagtgcccctcgggcttcatccgcaacggcagccagagcatgtactgcatcccttgtgaaggtccttgcccgaaggtctgtgaggaagaaaagaaaacaaagaccattgattctgttacttctgctcagatgctccaaggatgcaccatcttcaagggcaatttgctcattaacatccgacgggggaataacattgcttcagagctggagaacttcatggggctcatcgaggtggtgacgggctacgtgaagatccgccattctcatgccttggtctccttgtccttcctaaaaaaccttcgcctcatcctaggagaggagcagctagaagggaattactccttctacgtcctcgacaaccagaacttgcagcaactgtgggactgggaccaccgcaacctgaccatcaaagcagggaaaatgtactttgctttcaatcccaaattatgtgtttccgaaatttaccgcatggaggaagtgacggggactaaagggcgccaaagcaaaggggacataaacaccaggaacaacggggagagagcctcctgtgaaagtgacgtcctgcatttcacctccaccaccacgtcgaagaatcgcatcatcataacctggcaccggtaccggccccctgactacagggatctcatcagcttcaccgtttactacaaggaagcaccctttaagaatgtcacagagtatgatgggcaggatgcctgcggctccaacagctggaacatggtggacgtggacctcccgcccaacaaggacgtggagcccggcatcttactacatgggctgaagccctggactcagtacgccgtttacgtcaaggctgtgaccctcaccatggtggagaacgaccatatccgtggggccaagagtgagatcttgtacattcgcaccaatgcttcagttccttccattcccttggacgttctttcagcatcgaactcctcttctcagttaatcgtgaagtggaaccctccctctctgcccaacggcaacctgagttactacattgtgcgctggcagcggcagcctcaggacggctacctttaccggcacaattactgctccaaagacaaaatccccatcaggaagtatgccgacggcaccatcgacattgaggaggtcacagagaaccccaagactgaggtgtgtggtggggagaaagggccttgctgcgcctgccccaaaactgaagccgagaagcaggccgagaaggaggaggctgaataccgcaaagtctttgagaatttcctgcacaactccatcttcgtgcccagacctgaaaggaagcggagagatgtcatgcaagtggccaacaccaccatgtccagccgaagcaggaacaccacggccgcagacacctacaacatcaccgacccggaagagctggagacagagtaccctttctttgagagcagagtggataacaaggagagaactgtcatttctaaccttcggcctttcacattgtaccgcatcgatatccacagctgcaaccacgaggctgagaagctgggctgcagcgcctccaacttcgtctttgcaaggactatgcccgcagaaggagcagatgacattcctgggccagtgacctgggagccaaggcctgaaaactccatctttttaaagtggccggaacctgagaatcccaatggattgattctaatgtatgaaataaaatacggatcacaagttgaggatcagcgagaatgtgtgtccagacaggaatacaggaagtatggaggggccaagctaaaccggctaaacccggggaactacacagcccggattcaggccacatctctctctgggaatgggtcgtggacagatcctgtgttcttctatgtccaggccaaaacaggatatgaaaacttcatccatctgatcatcgctctgcccgtcgctgtcctgttgatcgtgggagggttggtgattatgctgtacgtcttccatagaaagagaaataacagcaggctggggaatggagtgctgtatgcctctgtgaacccggagtacttcagcgctgctgatgtgtacgttcctgatgagtgggaggtggctcgggagaagatcaccatgagccgggaacttgggcaggggtcgtttgggatggtctatgaaggagttgccaagggtgtggtgaaagatgaacctgaaaccagagtggccattaaaacagtgaacgaggccgcaagcatgcgtgagaggattgagtttctcaacgaagcttctgtgatgaaggagttcaattgtcaccatgtggtgcgattgctgggtgtggtgtcccaaggccagccaacactggtcatcatggaactgatgacacggggcgatctcaaaagttatctccggtctctgaggccagaaatggagaataatccagtcctagcacctccaagcctgagcaagatgattcagatggccggagagattgcagacggcatggcatacctcaacgccaataagttcgtccacagagaccttgctgcccggaattgcatggtagccgaagatttcacagtcaaaatcggagattttggtatgacgcgagatatctatgagacagactattaccggaaaggaggcaaagggctgctgcccgtgcgctggatgtctcctgagtccctcaaggatggagtcttcaccacttactcggacgtctggtccttcggggtcgtcctctgggagatcgccacactggccgagcagccctaccagggcttgtccaacgagcaagtccttcgcttcgtcatggagggcggccttctggacaagccagacaactgtcctgacatgctgtttgaactgatgcgcatgtgctggcagtataaccccaagatgaggccttccttcctggagatcatcagcagcatcaaagaggagatggagcctggcttccgggaggtctccttctactacagcgaggagaacaagctgcccgagccggaggagctggacctggagccagagaacatggagagcgtccccctggacccctcggcctcctcgtcctccctgccactgcccgacagacactcaggacacaaggccgagaacggccccggccctggggtgctggtcctccgcgccagcttcgacgagagacagccttacgcccacatgaacgggggccgcaagaacgagcgggccttgccgctgccccagtcttcgacctgctgatccttggatcctgaatctgtgcaaacagtaacgtgtgcgcacgcgcagcggggtggggggggagagagagttttaacaatccattcacaagcctcctgtacctcagtggatcttcagttctgcccttgctgcccgcgggagacagcttctctgcagtaaaacacatttgggatgttccttttttcaatatgcaagcagctttttattccctgcccaaacccttaactgacatgggcctttaagaaccttaatgacaacacttaatagcaacagagcacttgagaaccagtctcctcactctgtccctgtccttccctgttctccctttctctctcctctctgcttcataacggaaaaataattgccacaagtccagctgggaagccctttttatcagtttgaggaagtggctgtccctgtggccccatccaaccactgtacacacccgcctgacaccgtgggtcattacaaaaaaacacgtggagatggaaatttttacctttatctttcacctttctagggacatgaaatttacaaagggccatcgttcatccaaggctgttaccattttaacgctgcctaattttgccaaaatcctgaactttctccctcatcggcccggcgctgattcctcgtgtccggaggcatgggtgagcatggcagctggttgctccatttgagagacacgctggcgacacactccgtccatccgactgcccctgctgtgctgctcaaggccacaggcacacaggtctcattgcttctgactagattattatttgggggaactggacacaataggtctttctctcagtgaaggtggggagaagctgaaccggc

SEQ ID NO: 2471 - DNA, 4198 bp, Homo Sapiens
ggcggagcgaagagaaccggtcgcggcaatcctagcgcgcagcagcagcagcagcagcagcagcagcagcagcagcagcagcagcacccgcatccgctgcgggagtccgagccggaaccacacccaagtagctgccctttcctcttctgtcatctcaccgccccaccacagaccgcgttccccgaggaaaccggccgcccacgcccggagcatcctcccctgttgagcgggcgctgacggacccggcggcatgatgcggctgcgaggctcggggatgctgcgggacctgctcctgcggtcgcccgccggcgtgagcgcgactctgcggcgggcacagcccttggtcaccctgtgccggcgtccccgaggcgggggacggccggccgcgggcccggctgccgccgcgcgactccacccgtggtggggcgggggcggctggccggcggagcccctcgcgcggggcctgtccagctctccttcggagatcttgcaggagctgggcaaggggagcacgcatccgcagcccggggtgtcgccacccgctgccccggcggcgcccggccccaaggacggccccggggagacggacgcgtttggcaacagcgagggcaaagagctggtggcctcaggtgaaaataaaataaaacagggtctgttacctagcttggaagatttgctgttctatacaattgctgaaggacaagagaaaatacctgttcataaatttattacagcactcaaatctacaggattgcgaacgtctgatcccaggttgaaagagtgtatggatatgttaagattaactcttcaaacaacatcagatggtgtcatgctagacaaagatctttttaaaaaatgtgttcagagcaacattgttttgttgacacaagcatttagaagaaagtttgtgattcctgactttatgtcttttacctcacacattgatgagttatatgaaagtgctaaaaagcagtctggaggaaaggttgcagattatattcctcaactggccaaattcagtcccgatttgtggggtgtgtctgtttgtacagtagatggacagaggcattctactggagataccaaagttcccttctgtcttcagtcctgtgtaaaacctttgaaatatgccattgctgttaatgatcttggaactgaatatgtgcatcgatatgttggaaaagagccgagtggactaagattcaacaaactatttttgaatgaagatgataaaccacataatcctatggtaaatgctggagcaattgttgtgacttcactaataaagcaaggagtaaataatgctgaaaaatttgactatgtcatgcagtttttgaataagatggctggtaatgaatatgttggattcagtaatgcaacgtttcagtctgaaagagaaagtggagatcgaaattttgcaataggatattacttaaaagaaaagaagtgttttccagaaggcacagacatggttggtatattagacttctacttccagctgtgctccattgaagtgacttgtgaatcagccagtgtgatggctgcgacactggctaatggtggtttctgcccaattactggtgaaagagtactgagccctgaagcagttcgaaatacattgagtttgatgcattcctgtggcatgtatgacttctcagggcagtttgctttccatgttggtcttcctgcaaaatctggagttgctgggggcattcttttagttgtccccaatgttatgggtatgatgtgctggtctcctcctctggataagatgggcaacagtgttaagggaattcacttttgtcacgatcttgtttctctgtgtaatttccataactatgataatttgagacactttgcaaaaaaacttgatcctcgaagagaaggtggtgatcaaagggtaaagtcagtgataaatcttttgtttgctgcatatactggagatgtgtctgcacttcgaagatttgctttgtcagctatggacatggaacagcgggactatgattctagaacagcactccatgtagctgctgcagagggtcatgttgaagttgttaaatttttgctggaagcctgcaaagtaaaccctttccccaaggacaggtggaataacactcccatggatgaagcactgcactttggacaccatgatgtatttaaaattctccaagaataccaagtccagtacacacctcaaggagattctgacaacgggaaggaaaatcaaaccgtccataagaatcttgatggattgttgtaatggtctcaaatcccaagatttaaatcacttacctatttaattgtggaaaatgattatgaagaacatgtgtatttctatctggtagtgatgtatattttacatttgtcatttcagtgttactggagttttcttcattgtgcacacaggacaaatctgatctctttgggaaaaaatagaaataaaacaatctccctccataatgtgagcaatattacctcgtgcattgtataatttgatgtaaaagaaatagttaccaatgctagcttgtgtggtcttccatgatttatttgtgttttgtgaattttcaatttatggtgatgatctgctgatatgcatttataaagtaagctctgttgtacagtctgtccaaatgggtcaaggttgcctttagaagcaaatagtgtgattttcaagacttcaaatacaaatttagtttaagtgtttgaacaactatatgcacttacggttgtgtgtttaaaatgtctctctctcaccctagcttcatgatgtgactcttaaaaaactataatagttaacaactgttagtaagatagaccaattctgattagactttatcagggaatctgtttaagatatgtttggtgaccaaaacgtatgtgtgaatgtagttataatgcttttgaaaaattttcctttttctatatccccttagtccagcctctcttctcagacatttagctatctgcctctttcctttagctgggaaagtgagagctggcatactatgcagtttttatgttttccatagtaagtcagaaaatgcctcctatttctggcatcagaactttgccatttgtctacagaagacgaaccagagacaaaattactaagtataaattagtcaagtttatcagtctaaaaagcgaagggatgtgcaactgcagctctttaagaagttttttttttttagcttctagggtaaagataaattcagaaatgctctaagctaccaaagttattctgaaagtatgggaactgctacaactaacaaacatttgtttccaagcctgtcattaagagtctgcatcaagagatttgtcctccttgggggaccactggatcattccagatttcttgtgatttttctattgtgtaattcttggtgggctctgtagtttaataataagaaaaaggccatttcattttaaattgtgacctataattctttgtcttgggttggtaattcaggattcatttggaaagtgggtaaaaggggcttcaaaaaacggatagaacaggattttctaggagttacacatacattttatcctgtcatacctcgagataaagtggcatgttagtgaggagttctgatattaagcacacacacacatgcacacaaatggacttctctgaagctgtgtttagtgaaatgagctcaagtacatgaatgttagttgttatcacatacagcaaattcctttttttttctttttctatgagcacactctgctgcttctaaactttacatgcctgatggcaccttactccagcagcctccaggtgctttcattttcacttccagtctaagccagtggctcctgccactgccctcccattacctagatggcacctcctttggtgaaaccacggccaatgttccttagctgcaccaggcccgaagctgttcccatgcttgagcttccatggggaggatgctgagtgagcagtttcctacgccgtggatctagcaagccatggagacaggtagcatttgtaagatgctgcacaggagcagcattatccccaaagatattacagggtagacacgttttaactgaaatcaatcaagataactttattcaaagagcagcccgctttgtgtgactaaaatgaaacaagacagttgaattgtgtgacttgaagattaccaatgattttgaggcttttctataataaaaagaggttctaaccatt

SEQ ID NO: 2472 - DNA, 1019 bp, Homo Sapiens
aaaaatctggcatctggaaatatcctccccgcgctgaaaaaactggctagcaccaacgacgcaaattcttaataaaatccttacttttttaagtaaaactttttttcttttttcttatttcttaagtaaacattttaaattgaaattttttttctgtacagagaaagttgaaacatccattcctatgtttgggatgagaaaagataaattatttatgttattggaaaacagaagattacagactgtcaataaacttttacttttaaatgaataaataatacatgacaattcttttcacatgagagaacgtctgcttctatttcctcctaaaatactgtggcggctgggcatgtcaacagcgccgctggtgtagtggtatcatgcaagattcccattcttgcgacccgggttcgattcccgggcggcgcataggcgttttgcttctcgctcgctaaaaaccagatagcttgaagagtctttatatatctttccaaaagaggaaagatttaggctttttactgtccctgaaggtttccactccctcataattcgcggtcgaaacactcgaatccgcagccagaagacaaaaaagttcacgcaaatcgtgaagtagttaatacttgcgcctgcgcagtctgaggcgtccctcgcgtcgggtggaagagcggctgcgcaacaagtgaacctatggattaaggtgtagccgggcggcccggaggttgagagtgcaagattattctgcgcctgcgcggcccgggtaactttgctggctgctcctaggctcccggctcgccgccatcttgtattggggtttcattgttcccgctgggccgggcggtttagtgtaattgccgccggaggaggaggcggagtaacctctggtcagccgagaaaccccactatcctgtagccataaccgcttaaacgatttgggaggtagtgaagggcagggagctggacctggaggcgccgccgcgacagcagcagccatggaggacgagatgcccaagactctatac

SEQ ID NO: 2473 - DNA, 5823 bp, Homo Sapiens
ggtagctgggtgcagacgccgtggcgctggagacccaaacatggcaaacctggaagaaagcttcccccgaggaggtacaagaaagatccacaaaccagagaaagctttccagcagtcagttgaacaagacaacttatttgatatttctactgaagagggatccaccaaaagaaaaaagagccagaaggggccagcaaaaacaaaaaagttgaaaatcgaaaagagagaaagcagcaagtccgcaagagagaagtttgaaatccttagtgttgagtccctgtgtgagggaatgcgtattttgggttgcgtgaaagaggtgaatgaactggaactggtgattagtctccccaatggcctccagggctttgtgcaagtcactgaaatctgtgatgcctacaccaaaaagctgaatgagcaggtgacacaagaacaacctctgaaggacctacttcacttgcctgaacttttctcacctggaatgctggtaagatgtgtggtgagcagtctgggcatcacagacaggggcaagaagagtgtcaagctgtctctgaaccccaaaaatgtcaacagagtgctgagtgctgaggccctgaagcctggcatgctacttacaggtaccgtatccagcctggaagaccatggctacctagtggacattggtgttgatgggaccagagcttttctgccactgctgaaagcccaggagtacatcagacagaagaacaaaggtgctaaactaaaggtgggtcagtacctgaactgcattgttgaaaaggtgaaaggcaacggaggagttgttagtctgtctgttggtcactcagaggtttctacggccattgctactgaacagcagagctggaaccttaataacttgctaccaggactggtggtcaaagctcaggtacagaaggtgactccatttggccttacgctaaacttcctcacattcttcacgggcgtggttgactttatgcacctggatcccaagaaagctggaacatatttctcaaatcaggcagtgagggcctgcatcctttgcgtccatcctcgaaccagagttgtgcacctgagcctgcgccccatcttcctacagcctggacgcccactcacccgactctcttgccagaaccttggagcagtgctggatgatgttcctgtccagggttttttcaaaaaggctggggccacctttaggctgaaggatggggttctggcctatgcccggctcagccatctctctgattctaagaacgtcttcaatcctgaggccttcaagccagggaacactcacaagtgtagaattattgactacagccaaatggatgaactggccttgctctctctacgaacgtctattattgaagctcagtaccttagatatcatgacatcgaacctggggcagtggtaaagggcacagtgctaaccataaagtcatatgggatgctggtgaaggtgggcgagcagatgaggggcctggtacctcccatgcacctggctgacatcctgatgaagaatccggagaagaagtaccacatcggggatgaggtcaagtgccgggttttgctttgtgaccctgaagccaagaagctgatgatgaccctgaaaaaaaccctgattgagtccaaactacctgtcattacctgctatgccgatgccaagcctggtctgcagacacatggcttcatcatcagggtcaaggactatggctgcattgtgaagttctacaacaatgtgcagggactggtgcccaagcatgagctcagtactgagtatatccctgacccggagagagttttttacactggccaggtggtgaaggttgtcgtattgaactgtgagccatccaaagagaggatgctcttatccttcaagctgtcgagtgatccagagccaaagaaagagcctgcaggacacagtcagaagaaaggaaaagccattaacattgggcagttggtagatgtgaaggttttagagaagaccaaagatgggctggaggtggctgtcctgccccacaacatccgtgctttcctccccacatctcatctgtcggaccacgttgccaacggcccattgttacatcattggctccaggcaggtgacatccttcaccgagtcctgtgtctgagccagagcgaggggcgtgttcttctttgcaggaagccagccttggtctccacagtagaaggtggccaggatcccaagaacttctcagaaatccatcctggaatgctgctcattggttttgtgaagagcatcaaggactatggcgtgttcatccagttcccctcaggtcttagcggactggccccaaaagctatcatgagtgacaaatttgtgacctccacaagtgaccactttgttgagggccagacagtagcggcaaaggtgaccaatgtggatgaggagaagcagcggatgctgctgtcactgcggctgtcggactgtggtctgggggacttggctatcaccagcctcctcctcctgaatcagtgcctggaggagctgcagggcgtgcgcagccttatgagcaaccgagactctgtgttgatccagacgctggccgagatgaccccaggaatgttccttgacctagtggtgcaggaggtgttggaagatggctctgtggtattcagtgggggtccagtgcccgacctggtcctgaaagccagcagataccatcgcgcagggcaggaggtggaatctgggcagaaaaagaaggttgttatcttaaatgttgatcttttgaagttggaagtgcacgtttcccttcaccaggacttggtgaatagaaaagctagaaagctgaggaaaggcagcgaacaccaggcgattgtgcagcacttggagaagtcctttgccattgcctccttggtagagacgggccacctggcagctttctccctgacctctcacctcaacgacaccttccgctttgactcagagaaattgcaggtgggacagggtgtctccctaaccctcaagaccacagaaccaggagtgactggccttcttttggctgtggaggggccggctgccaagaggaccatgaggccgacccagaaggactctgagacagttgatgaggatgaagaagtggatccagctctgactgtagggaccataaagaagcacaccctctccatcggggacatggtcacagggactgtcaagtccattaagcctacccatgtggttgtgactctggaagatggcattattggctgtatccatgcctcccacattctagatgatgttccagagggcacctctcctactaccaagctgaaggttgggaagacggtcactgcccgagtgattggcgggcgagacatgaagacattcaagtatctcccaataagtcaccccagattcgttcgaaccatcccggagctgagtgttcggccaagtgagctggaggatggccacactgctcttaacactcactctgttagccccatggagaagattaaacagtaccaggccggccagactgttacttgcttcttaaagaaatacaatgtggtgaagaaatggcttgaggtggagattgccccagacatccgggggagaattcccttattgctcacttctctgagcttcaaggttctgaagcatccagataagaagttccgggttggccaggccctgagggccaccgttgttggcccagattcctccaagaccttcttatgtctgtccctcacaggtcctcacaagcttgaggaaggggaagtggccatgggccgagtggtgaaggtgactcccaacgaggggctgaccgtctccttcccctttgggaagataggaacagtcagtatatttcacatgagtgactcctactccgagacgcccctggaagacttcgtcccccagaaggttgtcagatgttacatcctgtccactgcagacaacgtattgactttgtcgctgcgatcatccagaacaaacccggagacgaaaagcaaagtagaagatccagagattaactccatccaggacattaaggaagggcagcttctgaggggctatgtagggtccatccagccacacggtgtgttctttcgccttggcccctccgttgtgggtttggctcggtactcccatgtctcccagcacagcccgtccaagaaagccctttataacaaacacctccctgaagggaagctgctcacagccagggtcctacgccttaaccaccagaagaacctggtagagctgtctttcctccccggagacactgggaagccagacgtgctttctgcttccttggaagggcaacttacaaagcaagaggagaggaaaacagaggctgaggagagagaccaaaaaggggaaaagaaaaatcagaaaaggaacgagaagaagaaccagaaggggcaggaggaggtggagatgcccagcaaggagaagcaacagccccagaagccacaggcgcagaagcggggcgggcgggagtgccgggagtctgggagtgagcaggaaagagtgagcaagaagccaaagaaagccggcctgtcagaggaggacgacagccttgtggacgtgtactatcgggagggaaaagaggaggcagaagagacgaatgtgctgcccaaggagaagcaaaccaagccagcagaagcgccccggctgcagctgtcttcaggcttcgcttggaatgtgggactagactctctgaccccggccttgccacctctagcagagagctcagacagcgaggaggatgagaagccacaccaagccacgataaagaaaagcaagaaagaaagggagttggagaagcagaaggcagagaaggaactgtcccgcattgaggaggcgctgatggatcctgggcggcagccagagtccgcggatgattttgaccgactggtgctgagctcccccaacagctccattctgtggctgcagtacatggctttccacctgcaggccacggagatcgagaaggcccgtgccgtggctgagagggcccttaagaccatctccttcagagaggagcaggagaagctgaacgtgtgggtggctctgctgaacctggagaacatgtacggctctcaggagtccctgaccaaggtctttgagcgagccgtgcagtacaacgagcctctcaaagtctttctccacctggctgacatctacgccaagtcagagaaattccaggaagctggtgaactctacaaccggatgctgaagcgtttccggcaggagaaagctgtgtggatcaaatacggcgccttccttctgcggaggagccaggctgcagccagtcaccgcgtgctgcagcgagccctggagtgcctgcctagcaaggagcatgtggatgtcattgccaagtttgcccagcttgagtttcagctgggggatgcagagcgggccaaagccatttttgagaacacgctgagcacctacccaaagcgcacagatgtctggtcggtctatatcgacatgaccatcaagcacggcagccagaaggacgtccgggacatctttgagcgggtcattcatctgagcttggcccccaagagaatgaagttcttcttcaagcgctacctggactacgagaagcagcatggcactgagaaggatgtgcaggcagtcaaggccaaggccctggagtatgtggaggccaagagctcagtgctagaggactagtggcaggctggctctgtgggacactgtcaacaatgggccagcccggccccgcctcgagtgcctgggcactcggaaaactgttacctcaggactctatttaaatgctgctttttctgcagcacgcttggggaaatcctgtcaggatgaaaaggaagttgagatttttt

SEQ ID NO: 2474 - DNA, 476 bp, Homo Sapiens
aaaatgtagtcaactttattctccttaaaccacaaaatagagtctttggttgtacaaacatcactagttacagtctcgccgaggtctcgcgtgggtttggggcagttagttagtcacaggccagaactcctgtggggtctctttaaaatgctaacacccaggttaaaagacttggggcaagggtggtgctggagctggcagggccccaccccaagtctaggggaggtgcctgctcctctaggagggcacagggccatggcacggcgcccaggccttacggggcggcggctgctgcacagtgccacatcttcagggcccacagcgccggtgtgagggcctgccagtaagcaccagagccacttctccatcctcctcctgcgggccagggctgggagatggttcagtgacctcaactcctcagcaaagtccggtgacaggcgtccgggtgaggtgctggtctgggggccgaggtcttg

SEQ ID NO: 2475 - DNA, 3213 bp, Homo Sapiens
atgtgcttcagtttcataatgcctcctgctatggcagacatccttgacatctgggcggtggattcacagatagcatctgatggctccatacctgtggatttccttttgcccactgggatttatatccagttggaggtacctcgggaagctaccatttcttatattaagcagatgttatggaagcaagttcacaattacccaatgttcaacctccttatggatattgactcctatatgtttgcatgtgtgaatcagactgctgtatatgaggagcttgaagatgaaacacgaagactctgtgatgtcagaccttttcttccagttctcaaattagtgacaagaagttgtgacccaggggaaaaattagactcaaaaattggagtccttataggaaaaggtctgcatgaatttgattccttgaaggatcctgaagtaaatgaatttcgaagaaaaatgcgcaaattcagcgaggaaaaaatcctgtcacttgtgggattgtcttggatggactggctaaaacaaacatatccaccagagcatgaaccatccatccctgaaaacttagaagataaactttatgggggaaagctcatcgtagctgttcattttgaaaactgccaggacgtgtttagctttcaagtgtctcctaatatgaatcctatcaaagtaaatgaattggcaatccaaaaacgtttgactattcatgggaaggaagatgaagttagcccctatgattatgtgttgcaagtcagcgggagagtagaatatgtttttggtgatcatccactaattcagttccagtatatccggaactgtgtgatgaacagagccctgccccattttatacttgtggaatgctgcaagatcaagaaaatgtatgaacaagaaatgattgccatagaggctgccataaatcgaaattcatctaatcttcctcttccattaccaccaaagaaaacacgaattatttctcatgtttgggaaaataacaaccctttccaaattgtcttggttaagggaaataaacttaacacagaggaaactgtaaaagttcatgtcagggctggtctttttcatggtactgagctcctgtgtaaaaccatcgtaagctcagaggtatcagggaaaaatgatcatatttggaatgaaccactggaatttgatattaatatttgtgacttaccaagaatggctcgattatgttttgctgtttatgcagttttggataaagtaaaaacgaagaaatcaacgaaaactattaatccctctaaatatcagaccatcaggaaagctggaaaagtgcattatcctgtagcgtgggtaaatacgatggtttttgactttaaaggacaattgagaactggagacataatattacacagctggtcttcatttcctgatgaactcgaagaaatgttgaatccaatgggaactgttcaaacaaatccatatactgaaaatgcaacagctttgcatgttaaatttccagagaataaaaaacaaccttattattaccctcccttcgataagattattgaaaaggcagctgagattgcaagcagtgatagtgctaatgtgtcaagtcgaggtggaaaaaagtttcttcctgtattgaaagaaatcttggacagggatcccttgtctcaactgtgtgaaaatgaaatggatcttatttggactttgcgacaagactgccgagagattttcccacaatcactgccaaaattactgctgtcaatcaagtggaataaacttgaggatgttgctcagcttcaggcgctgcttcagatttggcctaaactgcccccccgggaggccctagagcttctggatttcaactatccagaccagtacgttcgagaatatgctgtaggctgcctgcgacagatgagtgatgaagaactttctcaatatcttttacaactggtgcaagtgttaaaatatgagccttttcttgattgtgccctctctagattcctattagaaagagcacttggtaatcggaggatagggcagtttctattttggcatcttaggtcagaagtgcacattcctgctgtctcagtacaatttggtgtcatccttgaagcatactgccggggaagtgtggggcacatgaaagtgctttctaagcaggttgaagcactcaataagttaaaaactttaaatagtttaatcaaactgaatgccgtgaagttaaacagagccaaagggaaggaggccatgcatacctgtttaaaacagagtgcttaccgggaagccctctctgacctgcagtcacccctgaacccatgtgttatcctctcagaactctatgttgaaaagtgcaaatacatggattccaaaatgaagcctttgtggctggtatacaataacaaggtatttggtgaggattcagttggagtgatttttaaaaatggtgatgatttacgacaggatatgttgacactccaaatgttgcgcttgatggatttactctggaaagaagctggtttggatcttcggatgttgccttatggctgtttagcaacaggagatcgctctggcctcattgaagttgtgagcacctctgaaacaattgctgacattcagctgaacagtagcaatgtggctgctgcagcagccttcaacaaagatgcccttctgaactggcttaaagaatacaactctggggatgacctggaccgagccattgaggaatttacactgtcctgtgctggctactgtgtagcttcttatgtccttgggattggtgacagacatagtgacaacatcatggtcaaaaaaactggccagctcttccacattgactttggacatattcttggaaatttcaaatctaagtttggcattaaaagggagcgagtgccttttattcttacctatgatttcatccatgtcattcaacaaggaaaaacaggaaatacagaaaagtttggccggttccgccagtgttgtgaggatgcatatctgattttacgacggcatgggaatctcttcatcactctctttgcgctgatgttgactgcagggcttcctgaactcacatcagtcaaagatatacagtatcttaaggactctcttgcattagggaagagtgaagaagaagcactcaaacagtttaagcaaaaatttgatgaggcgctcagggaaagctggactactaaagtgaactggatggcccacacagttcggaaagactacagatcttaa

SEQ ID NO: 2476 - DNA, 599 bp, Homo Sapiens
gttggaacacctggcgagtcctcggtgtcggtggccggcagtcatctcgcggccgttcagaattataaggctgtctgcagagatttgaaaaatggcaacaaatgaaagtgtcagcatctttagttcagcatccttggctgtggaatatgtagattcacttttacctgagaatcctctgcaagaaccatttaaaaatgcttggaactatatgttgaataattatacaaagttccagattgcaacatggggatcccttatagttcatgaagccctttatttcttattctgtttacctggatttttatttcaatttataccttatatgaaaaaatacaaaattcaaaaggataagccagagacatgggaaaaccaatggaagtgtttcaaagttcttctctttaatcacttctgtatccagctgcctttgatttgtggaacctattattttacagagtatttcaataatccctatgaatgggaaagaatgcccaagatgggtattttctttggcaggatgctttggttgtgcagtcattgaagatccttggcactattttctgcatagactcttacacccaaaggaatttccagtatttcct

SEQ ID NO: 2477 - DNA, 633 bp, Homo Sapiens
ctacaataataaaggtgagtgttggcagtggcttgaccagagcagaagtgggaatgaaacagttggattctgtttgttttcaaagaagagctcatagaacttactgatggattgttatgtaggatgtgaaagaaaaccacagaaatgactccaactaaaacagtaaaatgccattcactaatttcaagatgatgagagaagctgttttgcagagataatgaaagaaattctgtttgaagcctattaaagtttgaagtgcatattaattggactttcaagttgagatgtcaagtaagtagcagggtctctgagtatggaatacaaggctgtgggctagtgacttaacgtctgcaacatcaacatataggcagcatctccatagcaacaaacatcagttcaaaataatcagacagattttcatcctccacgtccatcttctcagatccatcaggagccacagaactgcaaatctacacatgtgcacagtaactacttctcagcaaaaatctggaacaaagcaggataacaagatgtctgctcttttatgacaaaagtgggcgccctgataagggctttggttgaaatgaaataagagtgcgcaagcaggagcctagcaacggagcgaaagagtgt

SEQ ID NO: 2478 - DNA, 539 bp, Homo Sapiens
tttttttttttttttttttttttttactaaacaaagggaatttattaagtaacaattcagctttcatttatcaacaatatgtaagggctagattaaaatacctgatcaatatgagatgacaatggggttctagtgaagacacagaaatccagtgatgaagccttatcatgagtaaatggatggtttccattagattttgtcaaatattgaatacagatatccattaatatctctgggctcgagggtcccaaataaaaaacactcgtaaagacagtcaagaggaaaaggaaaccatgagatatagagaatctggggtaaggcaagttcttgccatgcgcatcccctcttctgcttcatcagcaaattatctgcatgtttttcagagtgtatgttacttgtgtattttgaacctttttcactaataccatgctctgctatctaccaagtttccaatctgtgatggtctgttaggttacaataaatgtttcgatgacattaatgagctcatttgtgatcagtaaataggagcatgaactcag

SEQ ID NO: 2479 - DNA, 585 bp, Homo Sapiens
tcacggattactcaatgggacaatattgcaagtacacatgttgtatataaaatctatttttaaaaatctaaaatgggtgtggtggctcaagtctgtaatcccagttattcaggaggctgaggaggaaggatagcttgaggccaggagtttgagactagactgggcaacatagcaagaccccgtctctacaaagcaaaacgaaaaacaacaaatggagctgtgctatgttgtattgctttgcacaaaattaggaacaggtgtttgacaattgaatttgttttctgtgaattctaacctctaaaggcatgcttagaggtcaaggaccttcctgtgtagttggtgcaaaagcaatctccacaggacagcactgcttccatgcttcatacatcaggaaatgaggccagaacttgagtatttactaacacgtttttcaaaagatgtcagtgttatacctgaagctaaaaaaaagcaagggtttgtcatagagggaacctctaaataatttcaggggtaggggagatgttgtcaataggaaatgggataaaatatcaagagacaatgaaaacactgccttgacatgaggac

SEQ ID NO: 2480 - DNA, 602 bp, Homo Sapiens
  misc_feature (49)..(49): n is a, c, g, or t
tacgactcgagctgagaccatgtcccctagcggccatacaatgaatttngcttacacgtctttaatttcttttaattcctcatgtccagttctatgagatgggagtagatgaatggctgtcctggtgtgaggtccttacattttacttctctttaaaaatgaaaacaaaaaaaaatgtcgctggtcagaccacacaaagccacacaggcttataacagagctcaggaatcttctgtcctttccagagcaggcacagagacacgtggtcttcagcagagcctatggggttcagatgattcacataagaatagaagtttcagggctggacctggggaggcagcctgagcctgagccggctgtcctgagcctgagtactctagctgccttgtcgtcatcgcatctggctgccatccagcgccagcacacagtaatgagtggccgagcttcctctgggagggaggaaccagttaaaatcttgcagcagctgcaatcatctaggcgtggtcctcttgtctgactggggctgcacagatccggggccatgggacagaagaaagacagcctaggagcagagcttcccagatggttgagtgggatctaat

SEQ ID NO: 2481 - DNA, 3008 bp, Homo Sapiens
cctgaatccttggagactgacatttttcccccctaaaggcatagacaacaaaagaaattttattgagaggaaaacacaagtccttaaactgcaaagatgtttgccaggatgtctgatctccatgttctgctgttaatggctctggtgggaaagacagcctgtgggttctccctgatgtctttattggaaagcctggacccagactggacccctgaccagtatgattacagctacgaggattataatcaggaagagaacaccagtagcacacttacccatgctgagaatcctgactggtactacactgaggaccaagctgatccatgccagcccaacccctgtgaacacggtggggactgcctcgtccatgggagcaccttcacatgcagctgcctggctcctttctctgggaataagtgtcagaaagtgcaaaatacgtgcaaggacaacccatgtggccggggccaatgtctcattacccagagtcctccctactaccgctgtgtctgtaaacacccttacacaggtcccagctgctcccaagtggttcctgtatgcaggccaaacccctgccagaatggggctacctgctcccggcataagcggagatccaagttcacctgtgcctgtcccgaccagttcaaggggaaattctgtgaaataggttctgatgactgctatgttggcgatggctactcttaccgagggaaaatgaataggacagtcaaccagcatgcgtgcctttactggaactcccacctcctcttgcaggagaattacaacatgtttatggaggatgctgaaacccatgggattggggaacacaatttctgcagaaacccagatgcggacgaaaagccctggtgctttattaaagttaccaatgacaaggtgaaatgggaatactgtgatgtctcagcctgctcagcccaggacgttgcctacccagaggaaagccccactgagccatcaaccaagcttccggggtttgactcctgtggaaagactgagatagcagagaggaagatcaagagaatctatggaggctttaagagcacggcgggcaagcacccatggcaggcgtccctccagtcctcgctgcctctgaccatctccatgccccagggccacttctgtggtggggcgctgatccacccctgctgggtgctcactgctgcccactgcaccgacataaaaaccagacatctaaaggtggtgctaggggaccaggacctgaagaaagaagaatttcatgagcagagctttagggtggagaagatattcaagtacagccactacaatgaaagagatgagattccccacaatgatattgcattgctcaagttaaagccagtggatggtcactgtgctctagaatccaaatacgtgaagactgtgtgcttgcctgatgggtcctttccctctgggagtgagtgccacatctctggctggggtgttacagaaacaggaaaagggtcccgccagctcctggatgccaaagtcaagctgattgccaacactttgtgcaactcccgccaactctatgaccacatgattgatgacagtatgatctgtgcaggaaatcttcagaaacctgggcaagacacctgccagggtgactctggaggccccctgacctgtgagaaggacggcacctactacgtctatgggatagtgagctggggcctggagtgtgggaagaggccaggggtctacacccaagttaccaaattcctgaattggatcaaagccaccatcaaaagtgaaagtggcttctaaggtactgtcttctggacctcagagcccactctccttggcaccctgacaccgggaggcctcatggccaacaatggacacctccagagcctccaggggaccacacagtagactatccctactctaagcagagacaactgccacccagcctgggccttcccagaccagcatttgcacaatatcaccaggcttcttctgcctcccttggtaacccaaggaatgatggaatcaacacaacatagtatgtttgctttccttacccaattgtaccttctagaaaatcagtgttcacagagactgcctccaccacaggcatcctgcaaatgcagactccagaatccccagcatcagcgggaaccaccatcacatctttattcctcagcccagacactcgaggcactcaacagaatcagccatccacgtctaggtatcagagaggaccacaaatacaacattctccatctgctttcagagttattattttaataaaggaagatctgggatgggctggtgggccattccagcttgccgaaatcaaagccatctgaagcctgtctctggtgaacaaacttcctctctggcctctcaggaatcagggtggcatggctcacaacagcagggccttcttctttttgacgtgcagaatctcagtggcatctgggttcacctccccactctgatgatctccagcctccactgcttctgccccccgctgctgaaatcaaacataccccaagttaaaatgaagctcccccacccccactcccggccccggttcccacaggacacgctaagaagcacagggagcatttaacaggctcaccctccctttccttttcccctcttctaccctccccaagaaaaagggccttcaaggcaggaatgagaaagcaaagccaatctctcatttagacctggcttctttcttctgaacaaagtagggttcaaaatgcagactgtcatatccagcgagtccctgaccctttctgcgaatgtaacgagcaagcagtcagcacagcctgggctgccctggcccgggattgatgtagccccggtaggtttgcctctgcagaactaatggctgtgacttcagagaagccctgcaggaagtttaacctacgtgtcatctgcctggtcatctcagacccatgaaattaggcgccttgtttgagctgcgtttcacacttctttagacgctagctgacctttggccaaaaataaactttgaaaag

SEQ ID NO: 2482 - DNA, 526 bp, Homo Sapiens
tttgacattttgtttattttattttaaatattaatatattcctcaccttgttctggggaggatttgagactgctcatatgatatgcatgccataaattagtaaaatgcaataaaaaataaagcatcagaccacagaaactatgccatgggtggtatagcaggccgtaggcggctgtaaagttgatccggaattggccttcagtctcttagtggtcaactgaaagggtgttgtggtcacatacatggctctcattcacaagagggcaatgtaccagctcttagaagaagcaaaactttttctagtacttgactctaaggaaaattacccacctcggcccagatgaaagagactagcgtggataatgtcctcaaaacatggcagcaaattcaggctcagtttctctgggctgtgtcctgcaggaagatccaaggtggtcaccctcagcctctgctcagtgagagcactgaaatccacactcccttgagcaaagaaacgatctgtatgtttcaattctttcttcagcac

SEQ ID NO: 2483 - DNA, 527 bp, Homo Sapiens
gaaaaaaaaaaaaaaaaaaaaaaaagtgaaattgcttacccaaatctacagttaactgttttgttttttaatgcttgatgaatttgcatgtcattcttgggcagtggcatgctgtcttctctgtattgttccaatttgggtatatgtgctgccaaagtgagtactgcagaattatttcttgagagaggcacttacatgtgctgattggcactaaagcagtggaatgggaagaagagacttggaaggcagcccagacgatccaggcgtgtgctagatggcaactgaggagcacggtgctaccatctttactggtgtttccacctatgtgccaggggttctgtgagctacctgagaatactgaagtatataatgctctggcacatagttaggcactaatcagtggtatttatcaaggtgattaaaagcagatttaaaaagcagctcacagttgggcgcggtggctcacacctgtaatcccaaatgctgagattagaggcatgagtcactgcacccagcccgcagcctct

SEQ ID NO: 2484 - DNA, 5456 bp, Homo Sapiens
  misc_feature (659)..(659): n is a, c, g, or t
  misc_feature (5367)..(5367): n is a, c, g, or t
  misc_feature (5374)..(5374): n is a, c, g, or t
  misc_feature (5379)..(5379): n is a, c, g, or t
  misc_feature (5398)..(5398): n is a, c, g, or t
  misc_feature (5403)..(5403): n is a, c, g, or t
  misc_feature (5436)..(5436): n is a, c, g, or t
  misc_feature (5449)..(5449): n is a, c, g, or t
  misc_feature (5454)..(5454): n is a, c, g, or t
aacttggctagttacagggtctcaaggaatctttattctgcgtcttcattctgaactggatggaaccttcctgagcgcagagtcctttccactgtgaattatgggtttgttatcgtttttgttcgttgctggttgtacgtgacgggagttcagctttttgctgcgggacggcagagataggatgcggggcttcctgagaggcgccggggcagggccgcacaggtccatccacctcccctgggaccccagccctgcagcagccccaggggagcggccggggatcggggcggggtgcccaggacgcgccctgattggcccagtgttagccaatcaaagctctcgcatccccatggtgctgattggtccgcctcccaggcctgacccaatcggagcattcctaggaggagcggccccagagcccctgactcgggggtcccagagccctctgcacaccacagccccggtgtccccgtgtgtccctgggttctcccagccctggtgtcccctgagtctcttcttcaccgtcagccctggtgtctcccgtgtccctgccacaccctcatccctggtgtcccccgtcaccccatcccctcacctcctgggctcctgaaggtcccatcttgtgggcctcattcatggaaccaggacggggcaggtgnaggcctctggggagtttgtccagagaatggaggagaagcagggtcatgagcaggagcggtctgggccacccctgcctctcccccggggggtgcagcccggaaggagtccagatggatatggccccgcagtgcagagtcagccccaaaccaggctggtcccaggcagggtgggggcaggaggagccccggagtggccctgtgttgggggtcggggggcaggcagggggtcctggggctcagaagcggaggaggtgggctggaggccccagtgaccaacaggcccaggggagtcgggaggtggggtggacggacctgcagggacagtgtcagcgctgaatgggatggagagcacagggagctggggccggggatgagaccatggggagctggggctggggctgggactagtccatggggagctggggctgaagttgggggtgagtccatggggagctgggctgggcctcctggggttgcacctgcactcctctctgctcttccctctgcgtatgaagctcagatcccatgataaggaggcacctgcagaccaggggacctgcacggacagccccagaggtggacattgaggactcgtaggaggacttgggtctcatacggcgggtggggagcagggccccttcctggctgaggacacttggtgctgtcccctctcaaggctgtttccccatctgacaaaggggtctcacgtgagcccccaaccaagtgagtcgaggagggctggccccacccccgtggattcggagtccgtaggaggggtgtcacccgtcatgtccccaccccgtgggcaccttcccgtctcttggagcgtggcccatggacatgagttcctcacccgtgtccctcttggggaaacaggtttcaggagcgacgggtcttgtagcctggggcagccaggccacctgggtgcagcaatgcctgaaggcctcctggcaccgagacaggggcaggagcagatcccaccagcgggaaggtggtgggttccagtgctgggatccaccagctgacaggtggagctgccagtctccagtgctcagccctcagcggggcctgcctggcagccccacacacagagggcatcggggtggcgggggcacgtgttacacgggggccctgggtctgagtcatccacttcctccgagtctggatgggaggacccagcgcccctcctccgccccctcctgatctggaaggataaatggggaggggagagcccactgggtagaaggaacagggagcggccagggtaagtccccactctcagagaccctgacatcagcgtcacctggagcagagtggcccagcctcagactcagagcaccaagacccaggcccgcaggcctggacccaccccggtccccccgtcccagctccattcttcaccccacaatctgtagcccccagccctgccctgtgaggcccggccaggcccacgatgctcctccttgctccccagatgctgaatctgctgctgctggcgctgcccgtcctggcgagccgcgcctacgcggcccctggtgagtcccagccggggtccaccctgcccctcaccacattccacaggtcagggcctgggtgggttctggggaggtcgggctggcccccacacagggaagggctgggcccaggcctggggctgcttcctggtcctgacctggcacctgccccagccccaggccaggccctgcagcgagtgggcatcgtcgggggtcaggaggcccccaggagcaagtggccctggcaggtgagcctgagagtccacggcccatactggatgcacttctgcgggggctccctcatccacccccagtgggtgctgaccgcagcgcactgcgtgggaccgtgagtctcccggggcctggaggggtggggaagggctggatgtgagccctggctcccgggtgctcctgggggctgcccagggccctgagtgggatcctccgctgcccagggacgtcaaggatctggccgccctcagggtgcaactgcgggagcagcacctctactaccaggaccagctgctgccggtcagcaggatcatcgtgcacccacagttctacaccgcccagatcggagcggacatcgccctgctggagctggaggagccggtgaacgtctccagccacgtccacacggtcaccctgccccctgcctcagagaccttccccccggggatgccgtgctgggtcactggctggggcgatgtggacaatgatggtgggtctggggacagtggaggtggggccagggtcttagccacagcccagcccctgggctccctctgggctccaggtgggggttgcccggccccctcctgaggctgcaccctcttccccacctgcagagcgcctcccaccgccatttcctctgaagcaggtgaaggtccccataatggaaaaccacatttgtgacgcaaaataccaccttggcgcctacacgggagacgacgtccgcatcgtccgtgacgacatgctgtgtgccgggaacacccggagggactcatgccaggtgggccccgcctgtcccccgccccccgccccccaacccccactcccaggcctgttcggcgagcgctgacctctgaccttcccagggcgactccggagggcccctggtgtgcaaggtgaatggcacctggctgcaggcgggcgtggtcagctggggcgagggctgtgcccagcccaaccggcctggcatctacacccgtgtcacctactacttggactggatccaccactatgtccccaaaaagccgtgagtcaggcctgggttggccacctgggtcactggaggaccaacccctgctgtccaaaacaccactgcttcctacccaggtggcgactgccccccacaccttccctgccccgtcctgagtgccccttcctgtcctaagccccctgctctcttctgagccccttcccctgtcctgaggacccttccctatcctgagcccccttccctgtcctaagcctgacgcctgcaccgggccctccagccctcccctgcccagatagctggtggtgggcgctaatcctcctgagtgctggacctcattaaagtgcatggaaatcactggtgtgcatcgctgtgtttctggttgtggatgtcactgggagagaaggggtccaggtgtgctgaggacacctgccacagtgtgaggtcctagccctcaaggcacagccagtcaccgtgggacggggcctcctgggcagccctggtccccgagctggcttctccccacacgatgcatccaacattcgggtcacacagagccactcgggcaactcagttgattataaaggacagccaggtccctgcaaccgggtcaagacagagaatggtcgccgggagccccagggctgcccatcatgagcccctaccccacgcttcccacgagctcttctcccggcccctctgtccactgcttgtgctttgcctagtgtttgctttgagacgggatctcgctgtgtcatccaggctgaagtgcagtggtgtgatcagggctcactgcagccttaactcctgggctcaagcgatcctcccatcttggcctcccatatagctgggccacaggcgtgagccaccacgcccagttaatttttgtattttcagtagagatggggtttcgccatgttggccagtctggtctcgaactcctgacctcaagtgatccgcccgcctcggcctcccaaagtgctgggatgacaggcgtgagccaccgcacccggcctgagtttgacattttcaaattcattttgaggtctttctctacatcaataggtgagccctctgcgtctggcgagtgttgcattttatcccgggctcttgtttgcattttttatttgaacatgattacacccaggaatgaaatgcggggctgttctggttgaaaacaactctctaaagaaacattcactctttccttccaactgtcagatgcagagatgtgcatttagtctctccaatctctgcaaatgacctctgtcctcacaaggggtggactcgactcccagcgccctctccagccccacgtgacctctgcctctgcagcccctgaaggcccatccctcggctcctgttctgcaggcccagcgtcttgtctatgaagatggacctggaactcgggccctccttcctccctctggcccatcccaccttctagggatcacagagacagcacggggtgacccccagggaacactgagcccctagaagcacttccacacgcccactggaggttttgcggggtgggagtcggagggatgagaccccgaagggaagcaagacagcccctcaggacagggctgccggtgtaaggaaaggtggacagcaggggccggtcactgggtggagggggagggcgggctccagccccagagcttcccaaattagatctaagatccctgggaagctcagtgaagctcagcgcagtgacactggcagatgtgagcgtcagcttcagcaggaagggtctctcaggacgtgacaggcaggctgctggccagggctgcagccacctgcgttttgactgggacggggacacctgatccaaggtcacccacgtggctgccggcaggaggccctggttccccgtcacaggggggtgtgagggggagggccagtggtggcgacagggttcccacccgagaggacagtgcccaagtggccaggccacccgtggacagaaacnatcccangtctnccaaggtcctggacaacangagancccaccaaagcttgggggcaattaaccaagggncaggccccccctnccggntc

SEQ ID NO: 2485 - DNA, 487 bp, Homo Sapiens
  misc_feature (413)..(413): n is a, c, g, or t
atataatgtttggtatagtcaatcttcttaatctgccatttctatggcagagtacccagtgaaacatcttgtttggtgtgtcagtcaccccctgctgcagagttccctgtcacacaaatacatgcaaaagggtaataaataaatgggaaacaaagtatagttttagtaatcaacatgcaagattctaacaaaagctggagataactgcttatgccagataatttaagtaagagaaagtaagtagaagaggtggtaagaaagatttatcagatgagcactgaccccaaaccactaagatgatatggtccaaagaatgtcagaatgactaattcaattatccaactctgctcagctggaagaggaaagaagggaataaagatgttagatcctttaccaggacttccatgcacggngagagaagttgaaagtcaaaactgtaacaggaataaatacaaaaattctttccaaacatacctaatattctttg

SEQ ID NO: 2486 - DNA, 503 bp, Homo Sapiens
gcccatccctttttcctttttcttaggttcatacgatcctaagacaaaagacttgtttaaatatctggttcctttaaagaattcattaatattgacccctcctccccgggttttctcatgaaggtgagcgatggcagccagctgttctgagcttgcataatcctgcctttcctccaacaccatcacgaagtcgttcttgctgatgcttccatcacccctgtctaaaaccgcaaaggcttcccggaggaaagcctcacgttctacggaccaatcgtgcagtctaagggcccactgtggatttggatttttggctcctggcctggctagtttattagcgattctctctgctcggcgtatttctttgcttgctgctttgaagccgccttccttagccacagccctgggcgttttatgatctaaattcttccatttcaggtcacatcctcgctgagctatatatttacagcagtctgcaaaaccacccatggcagcataatgaagtg

SEQ ID NO: 2487 - DNA, 392 bp, Homo Sapiens
  misc_feature (339)..(339): n is a, c, g, or t
ttttttgggaaaaaattattttatttaacatcacctaacatgttctcattagttattgctaaggtattataataaaaacaatgctgtggttgcatgtaaatgtatacaaatgaacatcatcatcatcatcatcatcactatttttctgagcatttggaaagaaaactgttgcatttgtcttagataaaagactcagataattccctagaagcctgaggacaagattctagatcaatcctctaaactaggttgattcctcatccactttctgacctcctactttcttggtgagaaatgattattgaccctcctcaatgagggtgtaatgatagagcatantattttgtcccctattggatgttgcatggagagttgggctgaaattcttctgt

SEQ ID NO: 2488 - DNA, 221 bp, Homo Sapiens
tttttttttttttttttttttttttttacttgaattgatttaaaatttattcaccccagtgttcactcccaccttagccccattccatgcgcccttacccttactcatcgcagtatcaaaataactcccaaatgggattggtgggcttgaacacctcccattatgccttttaccttttgcatgcatttagttagttcctgaagcatacagcccccttacct

SEQ ID NO: 2489 - DNA, 3555 bp, Homo Sapiens
ggtactgtatatacaatctgggtcagctgcagctggttactgcatttctccatgtggcagacagagcaaagccacaacgctttctctgctggattaaagacggcccacagaccagaacttccactatactacttaaaattacataggtggcttgtcaaattcaattgattagtattgtaaaaggaaaaagaagttccttcttacagcttggattcaacggtccaaaacaaaaatgcagctgccattaaagtcacagatgaacaaacttctacactgatttttaaaatcaagaataagggcagcaagtttctggattcactgaatcaacagacacaaaaagctggcaatatagcaactatgaagagaaaagctactaataaaattaacccaacgcatagaagacttttttttctcttctaaaaacaactaagtaaagacttaaatttaaacacatcattttacaacctcatttcaaaatgaagacttttacctggaccctaggtgtgctattcttcctactagtggacactggacattgcagaggtggacaattcaaaattaaaaaaataaaccagagaagataccctcgtgccacagatggtaaagaggaagcaaagaaatgtgcatacacattcctggtacctgaacaaagaataacagggccaatctgtgtcaacaccaaggggcaagatgcaagtaccattaaagacatgatcaccaggatggaccttgaaaacctgaaggatgtgctctccaggcagaagcgggagatagatgttctgcaactggtggtggatgtagatggaaacattgtgaatgaggtaaagctgctgagaaaggaaagccgtaacatgaactctcgtgttactcaactctatatgcaattattacatgagattatccgtaagagggataattcacttgaactttcccaactggaaaacaaaatcctcaatgtcaccacagaaatgttgaagatggcaacaagatacagggaactagaggtgaaatacgcttccttgactgatcttgtcaataaccaatctgtgatgatcactttgttggaagaacagtgcttgaggatattttcccgacaagacacccatgtgtctcccccacttgtccaggtggtgccacaacatattcctaacagccaacagtatactcctggtctgctgggaggtaacgagattcagagggatccaggttatcccagagatttaatgccaccacctgatctggcaacttctcccaccaaaagccctttcaagataccaccggtaactttcatcaatgaaggaccattcaaagactgtcagcaagcaaaagaagctgggcattcggtcagtgggatttatatgattaaacctgaaaacagcaatggaccaatgcagttatggtgtgaaaacagtttggaccctgggggttggactgttattcagaaaagaacagacggctctgtcaacttcttcagaaattgggaaaattataagaaagggtttggaaacattgacggagaatactggcttggactggaaaatatctatatgcttagcaatcaagataattacaagttattgattgaattagaagactggagtgataaaaaagtctatgcagaatacagcagctttcgtctggaacctgaaagtgaattctatagactgcgcctgggaacttaccagggaaatgcaggggattctatgatgtggcataatggtaaacaattcaccacactggacagagataaagatatgtatgcaggaaactgcgcccactttcataaaggaggctggtggtacaatgcctgtgcacattctaacctaaatggagtatggtacagaggaggccattacagaagcaagcaccaagatggaattttctgggccgaatacagaggcgggtcatactccttaagagcagttcagatgatgatcaagcctattgactgaagagagacactcgccaatttaaatgacacagaactttgtacttttcagctcttaaaaatgtaaatgttacatgtatattacttggcacaatttatttctacacagaaagtttttaaaatgaattttaccgtaactataaaagggaacctataaatgtagtttcatctgtcgtcaattactgcagaaaattatgtgtatccacaacctagttattttaaaaattatgttgactaaatacaaagtttgttttctaaaatgtaaatatttgccacaatgtaaagcaaatcttagctatattttaaatcataaataacatgttcaagatacttaacaatttatttaaaatctaagattgctctaacgtctagtgaaaaaaatatttttaaaatttcagccaaataatgcattttatttataaaaatacagacagaaaattagggagaaacctctagttttgccaatagaaaatgcttcttccattgaataaaagttatttcaaattgaatttgtgcctttcacacgtaatgattaaatctgaattcttaataatatatcctatgctgattttcccaaaacatgacccatagtattaaatacatatcatttttaaaaataaaaaaaaacccaaaaataatgcatgcataatttaaatggtcaatttataaagacaaatctatgaatgaatttttcagtgttatcttcatatgatatgctgaacaccaaaatctccagaaatgcattttatgtagttctaaaatcagcaaaatattggtattacaaaaatgcagaatatttagtgtgctacagatctgaattatagttctaatttattattactttttttctaatttactgatcttactactacaaagaaaaaaaaacccaaccaatctgcaattcaaatcagaaagtttggacagctttacaagtattagtgcatgctcagaacaggtgggactaaaacaaactcaaggaactgttggctgttttcccgatactgagaattcaacagctccagagcagaagccacaggggcatagcttagtccaaactgctaatttcattttacagtgtatgtaacgcttagtctcacagtgtctttaactcatctttgcaatcaacaactttactagtgactttctggaacaatttcctttcaggaatacatattcactgcttagaggtgaccttgccttaatatatttgtgaagttaaaattttaaagatagctcatgaaacttttgcttaagcaaaaagaaaacctcgaattgaaatgtgtgaggcaaactatgcatgggaatagcttaatgtgaagataatcatttggacaactcaaatccatcaacatgaccaatgtttttcatctgccacatctcaaaataaaacttctggtgaaacaaattaaacaaaatatccaaacctcatagtggtattattctttgttttacctgtggtcatcttaaactggtttttcagtccctctccacttccttcagaaccaaagaatctgttataagattcctggaaggaactgggcatctaactgttacaccaaatcttaagtgaataaaactttaccaaggcttctcagttaaaaaaaaaa

SEQ ID NO: 2490 - DNA, 137 bp, Homo Sapiens
tttgaaaaacaaaatacctttatttagttaacactgaatttgcaaacacagaaaggaatagaaaacctgactccacttggacgcacaggcctttggggagttctgacaccagggccccatcggcagctccaccagag

SEQ ID NO: 2491 - DNA, 537 bp, Homo Sapiens
cgctgccgggttctggcgcgccctttcagttctgcttgctgtccgcaccgctgcgttacccggaaccgccgggccgaacagcatgacgtccgctttggagaactacatcaaccgaactgttgccgttattacatcagatgggagaatgattgtgggaacactgaaaggttttgaccagaccattaatttgattttggatgaaagccatgaacgagtattcagctcttcacagggggtagaacaagtggtactaggattatacattgtaagaggtgacaacgttgcagtcattggagaaatcgatgaagaaacagattctgcgcttgatttggggaatattcgagcagaacctttaaattctgtagcacactgaggaaaaactacatacttggacatctgtaaatctttgtacagaaactgattattctgaggatgatatatggagtttttatgagtgtgtctctggattttgaccccttattgattcattgtaatatgtaaattaaaatatttctacattttattgaaaaaaaaaaa

SEQ ID NO: 2492 - DNA, 1891 bp, Homo Sapiens
cacttaacagccacttgtttcatcccacctgggcattaggttgacttcaaagatgcctcagttactgcaaaacattaatgggatcatcgaggccttcaggcgctatgcaaggacggagggcaactgcacagcgctcacccgaggggagctgaaaagactcttggagcaagagtttgccgatgtgattgtgaaaccccacgatccagcaactgtggatgaggtcctgcgtctgctggatgaagaccacacagggactgtggaattcaaggaattcctggtcttagtgtttaaagttgcccaggcctgtttcaagacactgagcgagagtgctgagggagcctgcggctctcaagagtctggaagcctccactctggggcctcgcaggagctgggcgaaggacagagaagtggcactgaagtgggaagggcggggaaagggcagcattatgaggggagcagccacagacagagccagcagggttccagagggcagaacaggcctggggttcagacccagggtcaggccactggctctgcgtgggtcagcagctatgacaggcaagctgagtcccagagccaggaaagaataagcccgcagatacaactctctgggcagacagagcagacccagaaagctggagaaggcaagaggaatcagacaacagagatgaggccagagagacagccacagaccagggaacaggacagagcccaccagacaggtgagactgtgactggatctggaactcagacccaggcaggtgccacccagactgtggagcaggacagcagccaccagacaggaagaaccagcaagcagacacaggaggccaccaatgaccagaacagagggactgagacccacggtcaaggcaggagccagaccagccaggctgtgacaggaggacatgctcagatacaggcagggacacacacccagacacccacccagaccgtggagcaggacagcagccaccagacaggaagcaccagcacccagacacaggagtccaccaatggccagaacagagggactgagatccacggtcaaggcaggagccagaccagccaggctgtgacaggaggacacactcagatacaggcagggtcacacaccgagactgtggagcaggacagaagccaaactgtaagccacggaggggctagagaacagggacagacccagacgcagccaggcagtggtcaaagatggatgcaagtgagcaaccctgaggcaggagagacagtaccgggaggacaggcccagactggggcaagcactgagtcaggaaggcaggagtggagcagcactcacccaaggcgctgtgtgacagaagggcagggagacagacagcccacagtggttggtgaggaatgggttgatgaccactcaagggagacagtgatcctcaggctggaccagggcaacttgcataccagtgtttcctcagcacagggccaggatgcagcccagtcagaagagaagcgaggcatcacagctagagagctgtattcctacttgagaagcaccaagccatgacttccccgactccaatgtccagtactggaagaagacagctggagagagtttggcttgtcctgcatggccaatccagtgggtgcatccctggacatcagctcttcattatgcagcttcccttttaggtctttctcaatgagataatttctgcaaggagctttctatcctgaactcttctttcttacctgctttgcggtgcagaccctctcaggagcaggaagactcagagcaagtcacccctttgtactgaattgtcctcatcttgtggggggtttcaggactatttttatctctgacatctctctattgccccatctaccctaatgcatcaataaaaccttaagccgctgg

SEQ ID NO: 2493 - DNA, 2870 bp, Homo Sapiens
aggtcgcaggcgggcgtgcgtggagcgggggccgcggccgcgccgcagagatgtgactcgggccgaaggccagctggagcgtcggcgctgcggggccgcgggggtcgaatgttcgtggcatcagagagaaagatgagagctcaccaggtgctcaccttcctcctgctcttcgtgatcacctcggtggcctctgaaaacgccagcacatcccgaggctgtgggctggacctcctccctcagtacgtgtccctgtgcgacctggacgccatctggggcattgtggtggaggcggtggccggggcgggcgccctgatcacactgctcctgatgctcatcctcctggtgcggctgcccttcatcaaggagaaggagaagaagagccctgtgggcctccactttctgttcctcctggggaccctgggcctctttgggctgacgtttgccttcatcatccaggaggacgagaccatctgctctgtccgccgcttcctctggggcgtcctctttgcgctctgcttctcctgcctgctgagccaggcatggcgcgtgcggaggctggtgcggcatggcacgggccccgcgggctggcagctggtgggcctggcgctgtgcctgatgctggtgcaagtcatcatcgctgtggagtggctggtgctcaccgtgctgcgtgacacaaggccagcctgcgcctacgagcccatggactttgtgatggccctcatctacgacatggtactgcttgtggtcaccctggggctggccctcttcactctgtgcggcaagttcaagaggtggaagctgaacggggccttcctcctcatcacagccttcctctctgtgctcatctgggtggcctggatgaccatgtacctcttcggcaatgtcaagctgcagcagggggatgcctggaacgaccccaccttggccatcacgctggcggccagcggctgggtcttcgtcatcttccacgccatccctgagatccactgcacccttctgccagccctgcaggagaacacgcccaactacttcgacacgtcgcagcccaggatgcgggagacggccttcgaggaggacgtgcagctgccgcgggcctatatggagaacaaggccttctccatggatgaacacaatgcagctctccgaacagcaggatttcccaacggcagcttgggaaaaagacccagtggcagcttggggaaaagacccagcgctccgtttagaagcaacgtgtatcagccaactgagatggccgtcgtgctcaacggtgggaccatcccaactgctccgccaagtcacacaggaagacacctttggtgaaagactttaagttccagagaatcagaatttctcttaccgatttgcctccctggctgtgtctttcttgagggagaaatcggtaacagttgccgaaccaggccgcctcacagccaggaaatttggaaatcctagccaaggggatttcgtgtaaatgtgaacactgacgaactgaaaagctaacaccgactgcccgcccctcccctgccacacacacagacacgtaataccagaccaacctcaatccccgcaaactaaagcaaagctaattgcaaatagtattaggctcactggaaaatgtggctgggaagactgtttcatcctctgggggtagaacagaaccaaattcacagctggtgggccagactggtgttggttggaggtggggggctcccactcttatcacctctccccagcaagtgctggaccccaggtagcctcttggagatgaccgttgcgttgaggacaaatggggactttgccaccggcttgcctggtggtttgcacatttcaggggggtcaggagagttaaggaggttgtgggtgggattccaaggtgaggcccaactgaatcgtggggtgagctttatagccagtagaggtggagggaccctggcatgtgccaaagaagaggccctctgggtgatgaagtgaccatcacatttggaaagtgatcaaccactgttccttctatggggctcttgctctaatgtctatggtgagaacacaggccccgccccttcccttgtagagccatagaaatattctggcttggggcagcagtcccttcttcccttgatcatctcgccctgttcctacacttacgggtgtatctccaaatcctctcccaattttattcccttattcatttcaagagctccaatggggtctccagctgaaagcccctccgggaggcaggttggaaggcaggcaccacggcaggttttccgcgatgatgtcacctagcagggcttcaggggttcccactaggatgcagagatgacctctcgctgcctcacaagcagtgacacctcgggtcctttccgttgctatggtgaaaattcctggatggaatggatcacatgagggtttcttgttgcttttggagggtgtgggggatattttgttttggtttttctgcaggttccatgaaaacagcccttttccaagcccattgtttctgtcatggtttccatctgtcctgagcaagtcattcctttgttatttagcatttcgaacatctcggccattcaaagcccccatgttctctgcactgtttggccagcataacctctagcatcgattcaaagcagagttttaacctgacggcatggaatgtataaatgagggtgggtccttctgcagatactctaatcactacattgctttttctataaaactacccataagcctttaacctttaaagaaaaatgaaaaaggttagtgtttgggggccgggggaggactgaccgcttcataagccagtacgtctgagctgagtatgtttcaataaaccttttgatatttctcaaaaaaaaaaaaaaaaaaaaaaa

SEQ ID NO: 2494 - DNA, 260 bp, Homo Sapiens
gacacatataaccaatcaatacctcagccacctcctcggaaaattaagcgacccaaacgaaaaatgtacagggaagaacccacttcaataatgaatgctattaaactacgacccaggcaagtyctgtgtgataaatgtaaaaacagtgttgttgctgaaaaaaaggaaattagaaaaggtagtagtgcaactgcactcttctaaatatggaagataaaaamcggggaaatgtaagtgtaactactgtgaacaaaaacttg

SEQ ID NO: 2495 - DNA, 1626 bp, Homo Sapiens
caaaataatgtttataaatttatttgtctatactagtagaagtgatcagtgacatactataaataatcctaaatggttatatttgatagaattcataacacattaaagagaaaatttcacattaaaggaaggtttaaaaatctattttcagattataaaaggtgtctttactggttttcattccttttatctacatgtaattggacatgtaaacttgttaaaaatcaaaatcttactgattgtacagggagaaattaagcattctgttttaaaaattaggcttattgctagactgtaagtttaaaaacaattcatgttcaaaggagcttttcaaattacccagtccaccacagaatcagctaatgtgacagaagtaaatatagtgcgtcataattgctaaaaacagggtgaatttctttcacttaagttggaaaaccagcctctaaaaaattaggtgctggtaatgagagcttaataccatggttccctgcaggtctcagaaacattagtagttcctttcttggccctcactgtccttccagtgttggcctctggcctcttcccctcacatttatgttcattctccgggcttatattcattctctgctgctttctcccttcacccgtgggactctcacccttcttgctcattctccagcacccattcctactttagtctctttgaaatcttttttggagattttccttcagctacaaatgttccagtacaaccaatattactcctgaggggcaaagactttttcttatttatgtccctagtatctggtatggcgcctggcatatggcatttcagaatatgttcatagttgaaacagtaggatagatatttgtcatcttgacaagtagccctttgcaatttatacttgagttcactcctggtcaatggcacatggctggaaaatgcagaaagcaagttcacttacagcctgaggcttataaagcttgtacagctgcctcccggcagtccaggaaaactgcaaaaaatgggaagtaaggtcctggcaggcagacccggcatgtagccgctggccatcttgaatcctagggcatgaagttgccccaaagttcagcacttggttaagcctgatccctctggtttatcacaaagaataggatgggataaagaaagtggacacttaaataagctataaattatatggtccttgtctagcaggagacaactgcacaggtatactaccagcgtttggatattgatatatacatggcaaatctgaatattgttttatgagaggcctggcaatgggtaaaacaccaaacttgaaatcagaacataggtgcaaatggccactcctgtagtttcttttctgtaaaatgggatctggacgaatgataccaaacgtttctttctaacattgtattttataactctggcctatgattgtgttgtgtcttgcattaaaaaaaaaaatttgagagtggtagaattacttctgttatctgaaatacctgagatgcactttaaactgttgaaatgtaagctctgagggcagggaccgtatcttatttactgttagtatccgttgcatctagtgtggtgcacctggcacacagtaggcactcaataaatatgtattgattaaaaac

SEQ ID NO: 2496 - DNA, 3405 bp, Homo Sapiens
cgcccaacccaagttcaaaggctgataagagagaaaatctcatgaggaggttttagtctagggaaagtcattcagtggatgtgatcttggctcacaggggacgatgtcaagctcttcctggctccttctcagccttgttgctgtaactgctgctcagtccaccattgaggaacaggccaagacatttttggacaagtttaaccacgaagccgaagacctgttctatcaaagttcacttgcttcttggaattataacaccaatattactgaagagaatgtccaaaacatgaataatgctggggacaaatggtctgcctttttaaaggaacagtccacacttgcccaaatgtatccactacaagaaattcagaatctcacagtcaagcttcagctgcaggctcttcagcaaaatgggtcttcagtgctctcagaagacaagagcaaacggttgaacacaattctaaatacaatgagcaccatctacagtactggaaaagtttgtaacccagataatccacaagaatgcttattacttgaaccaggtttgaatgaaataatggcaaacagtttagactacaatgagaggctctgggcttgggaaagctggagatctgaggtcggcaagcagctgaggccattatatgaagagtatgtggtcttgaaaaatgagatggcaagagcaaatcattatgaggactatggggattattggagaggagactatgaagtaaatggggtagatggctatgactacagccgcggccagttgattgaagatgtggaacatacctttgaagagattaaaccattatatgaacatcttcatgcctatgtgagggcaaagttgatgaatgcctatccttcctatatcagtccaattggatgcctccctgctcatttgcttggtgatatgtggggtagattttggacaaatctgtactctttgacagttccctttggacagaaaccaaacatagatgttactgatgcaatggtggaccaggcctgggatgcacagagaatattcaaggaggccgagaagttctttgtatctgttggtcttcctaatatgactcaaggattctgggaaaattccatgctaacggacccaggaaatgttcagaaagcagtctgccatcccacagcttgggacctggggaagggcgacttcaggatccttatgtgcacaaaggtgacaatggacgacttcctgacagctcatcatgagatggggcatatccagtatgatatggcatatgctgcacaaccttttctgctaagaaatggagctaatgaaggattccatgaagctgttggggaaatcatgtcactttctgcagccacacctaagcatttaaaatccattggtcttctgtcacccgattttcaagaagacaatgaaacagaaataaacttcctgctcaaacaagcactcacgattgttgggactctgccatttacttacatgttagagaagtggaggtggatggtctttaaaggggaaattcccaaagaccagtggatgaaaaagtggtgggagatgaagcgagagatagttggggtggtggaacctgtgccccatgatgaaacatactgtgaccccgcatctctgttccatgtttctaatgattactcattcattcgatattacacaaggaccctttaccaattccagtttcaagaagcactttgtcaagcagctaaacatgaaggccctctgcacaaatgtgacatctcaaactctacagaagctggacagaaactgttcaatatgctgaggcttggaaaatcagaaccctggaccctagcattggaaaatgttgtaggagcaaagaacatgaatgtaaggccactgctcaactactttgagcccttatttacctggctgaaagaccagaacaagaattcttttgtgggatggagtaccgactggagtccatatgcagaccaaagcatcaaagtgaggataagcctaaaatcagctcttggagataaagcatatgaatggaacgacaatgaaatgtacctgttccgatcatctgttgcatatgctatgaggcagtactttttaaaagtaaaaaatcagatgattctttttggggaggaggatgtgcgagtggctaatttgaaaccaagaatctcctttaatttctttgtcactgcacctaaaaatgtgtctgatatcattcctagaactgaagttgaaaaggccatcaggatgtcccggagccgtatcaatgatgctttccgtctgaatgacaacagcctagagtttctggggatacagccaacacttggacctcctaaccagccccctgtttccatatggctgattgtttttggagttgtgatgggagtgatagtggttggcattgtcatcctgatcttcactgggatcagagatcggaagaagaaaaataaagcaagaagtggagaaaatccttatgcctccatcgatattagcaaaggagaaaataatccaggattccaaaacactgatgatgttcagacctccttttagaaaaatctatgtttttcctcttgaggtgattttgttgtatgtaaatgttaatttcatggtatagaaaatataagatgataaagatatcattaaatgtcaaaactatgactctgttcagaaaaaaaattgtccaaagacaacatggccaaggagagagcatcttcattgacattgctttcagtatttatttctgtctctggatttgacttctgttctgtttcttaataaggattttgtattagagtatattagggaaagtgtgtatttggtctcacaggctgttcagggataatctaaatgtaaatgtctgttgaatttctgaagttgaaaacaaggatatatcattggagcaagtgttggatcttgtatggaatatggatggatcacttgtaaggacagtgcctgggaactggtgtagctgcaaggattgagaatggcatgcattagctcactttcatttaatccattgtcaaggatgacatgctttcttcacagtaactcagttcaagtactatggtgatttgcctacagtgatgtttggaatcgatcatgctttcttcaaggtgacaggtctaaagagagaagaatccagggaacaggtagaggacattgctttttcacttccaaggtgcttgatcaacatctccctgacaacacaaaactagagccaggggcctccgtgaactcccagagcatgcctgatagaaactcatttctactgttctctaactgtggagtgaatggaaattccaactgtatgttcaccctctgaagtgggtacccagtctcttaaatcttttgtatttgctcacagtgtttgagcagtgctgagcacaaagcagacactcaataaatgctagatttacacactcaaaaaaaaaaaa

SEQ ID NO: 2497 - DNA, 4266 bp, Homo Sapiens
ccgggctgtgagtctctcgccgccggaggaagatgaggctgaagattgggttcatcttacgcagtttgctggtggtgggaagcttcctggggctagtggtcctctggtcttccctgaccccgcggccggacgacccaagcccgctgagcaggatgagggaagacagagatgtcaatgaccccatgcccaaccgaggcggcaatggactagctcctggggaggacagattcaaacctgtggtaccatggcctcatgttgaaggagtagaagtggacttagagtctattagaagaataaacaaggccaaaaatgaacaagagcaccatgctggaggagattcccagaaagatatcatgcagaggcagtatctcacatttaagcctcagacattcacctaccatgatcctgtgcttcgcccagggatcctcggtaactttgaacccaaagaacctgagcctcctggagtggttggtggccctggagagaaagccaagccattggttttgggaccagaattcaaacaagcaattcaagccagcattaaagagtttggatttaacatggtggcaagtgacatgatctcactggaccgcaacgtcaatgacttacgccaagaagaatgcaagtattggcattatgatgaaaacttgctcacttcgagcgttgtcattgtcttccataatgaaggatggtcaaccctcatgagaacagtccacagtgtaattaaaaggactccaaggaaatatttagcagaaattgtgttaattgacgatttcagtaataaagaacacttaaaagaaaaactggatgaatatattaagctgtggaatggcctagtgaaggtatttcgaaatgaaagaagggaaggtttaattcaagcacgaagtattggtgctcagaaggctaaacttggacaggttttgatataccttgatgcccactgtgaagtggcagttaactggtatgcaccacttgtagctcccatatctaaggacagaaccatttgcactgtgccgcttatagatgtcataaatggcaacacatatgaaattataccccaagggggtggtgatgaagatgggtatgcccgaggagcatgggattggagtatgctctggaaacgggtgcctctgacccctcaagagaagagactgagaaaaacaaaaactgaaccgtatcggtccccagccatggctgggggattatgtgccattgaacgagagttcttctttgaattgggtctctatgatccaagtctccagatttggggtggtgaaaactttgagatctcatacaagatatggcagtgtggtggcaaattattatttgttccttgttctcgtgttggacatatctaccgtcttgagggctggcaaggaaatcctccgcccatttatgttgggtcttctccaactctgaagaattatgttagagttgtggaggtttggtgggatgaatataaagactacttctatgctagtcgtcctgaatcgcaggcattaccatatggggatatatcggagctgaaaaaatttcgagaagatcacaactgccaaagttttaagtggttcatggaagaaatagcttatgatatcacctcacactaccctttgccacccaaaaatgttgactggggagaaatcagaggcttcgaaactgcttactgcattgatagcatgggaaaaacaaatggaggctttgttgaactaggaccctgccacaggatgggagggaatcagcttttcagaatcaatgaagcaaatcaactcatgcagtatgaccagtgtttgacaaagggagctgatggatcaaaagttatgattacacactgtaatctaaatgaatttaaggaatggcagtacttcaagaacctgcacagatttactcatattccttcaggaaagtgtttagatcgctcagaggtcctgcatcaagtattcatctccaattgtgactccagtaaaacgactcaaaaatgggaaatgaataacatccatagtgtttagagagaaaaaaataaaccaataacctacctactgacaagtaaatttatacaggactgaaaaccgcctggaaacctgctgcaactattgttattaactctgtatagctccaaacctggaacctcctgatcagtttgaaggacattgataaactgtgattttacaataacattatcatctgcagttactgtttacaagactgctttttaccttaaactttgtagatgtttacatcttttttgttgtgttttaaagatgatgttggtaatttgtgccttttagctctgttttattaaacagagttaaagcatgttgtcttctttgggattacactcaggggttctgaaaggcagtttgatttttatttttaacacacttgaaaaaaggttggagtaaccagactttcatatataacttggtgattatcaacctgttgtgtctttatttaattttacatctttttgaagcactgccacaggttattagccaaggtggccttccttcacagtcatgctgcttttttgaaaggtgaatttcaacacatttagtgcctctttcatttctcagtatatatttcaagagcttgtgatgaaatctataggatggtaatgatggacttgtcacctgtatggggaatacttttactactcagaaatgaatttatgtgctgccatttgctataaagttgaactttgtatggcttgaaaaagaaatgaccatatggaacatcccaaggctgtcccataagggttggaagttgtgtagcattcactcccttacctactggcattcccagtgccctctgtccatacctacttctaggattgcaaagggagtcttccaactagaagaaaaattgtccactgacatttgggatttacttttctccaatacctgccaatacagaaaactattatcagttgttattgttatcccttgaaaagcgagggtgacaaaaacaacaaaacaccgttataaacacatcaaaggttcattctgactgaggtaagactttccaagcccttgttagattaggccttataaaacttgtgtgcattataacctaagctgtgcaacctggtgaagccaagagtgaactgatgtttcatttatattttcatccaaatgacattatctgcacgtttttaaaatttaaaaacaaaggactatttaaaaatacagtttattaacaaacgtgaaactactttctgttacattaggtgttccctagtgtttcttaatttctttttagaaagtgtatttttattagtatttttccggtgaacagaagatttgtttggatttaaacatttactaagacagtacctattaggaaaaccaaatattgcaaatggtcaattcgattttaatttctcaaaagatactctgttatccagaagattaaaatgcctacattgagtgcttaaaaaaaaaaacaactgtgatgatgtgagcagaatggcaagtaagttaagcatttttgatcctgtaatcatggtatcattacaatgaaaggaattcacaaactactgccagaggaagtttgttttttaatttaagagggaaatataacctataaatttgtttcttccaagcttagctcttaaatttgggagactcaaagttaaacatcctcaacagagttttatttataattttgaattgtcaatttgtattttgctactgatctgtgatcaaccattttaactttcatctctagggatgtttaacatttataattgcaaaataaaccaactataaaaaaagaaactaagagagaattggtactttaattacttgtgtgtttgcaaataggctccattttccatgttgagtagattataaccttattaactaggcataggcctaagaaaggtggcaatgaactgtgcatgtaaattttaaatgggtactttgtgcaattcgttaaaagaagatactctatgaatatgattctatatattgaaatcagaaaacctaccaaacaaaaacatcagaagctgctgccataatgactattttctactgtaggctgctttggaaataattcccatatccttgctttgtaagttggtaatatcactatgcatttctacacattttataaatttgatttatgcagattttgatacactgtatgtttctgtagaaattgtataaatattcaaaattttattaggataaatttgagaaacttacgtatatcttaattctgggttgcttgttttttaggtgacaaaaataaaatattgtattttaattc

SEQ ID NO: 2498 - DNA, 1778 bp, Homo Sapiens
agttgcaggcgagcaggcgaggaatcgccgtggcgtcttggtgttctccacgctggttcgcaggtgaagagatggcgtttgtgaagagtggctggttgctgcgacagagtactattttgaagcgctggaagaagaactggtttgatctgtggtcggatggtcacctgatctattatgatgaccagactcggcagaatatcgaggataaggtccacatgccaatggactgcatcaacatccgcacggggcaggaatgtcgggatactcagcccccggatggaaagtcaaaagactgcatgctccagattgtttgtcgagatgggaaaacaattagtctttgtgcagaaagcacagatgattgcttggcctggaaatttacactccaagattctaggacaaacacagcgtatgtgggctctgcagtcatgaccgatgagacatccgtggtttcctcacctccaccatacacggcctatgctgcaccggcccctgaggcttatggctatgggccatacggtggtgcgtacccgccaggaactcaagttgtctacgctgcgaatgggcaggcgtatgccgtgccccaccagtacccatatgcaggactttatggacagcagcctgctaaccaagtcatcattcgagagcgctatcgagacaacgacagcgacctggcactgggcatgctggcaggagcagccacgggcatggccttagggtctctattttgggtcttctaggggcctcaaggtcttgatgtgcatagcttctgataaccctgtgtgcaataatatgatttgcagggcatttctgtttgtgacaaaagtttttaataatagttttaatcattcctttgaaagtagtgatgtcataattgtactaatccacataagtaccacagagaagggtttgaactgtgctattttgttcaaatgttgactctccgggggcactggctcattccaagactgttcttgtgcaactctcagaataccttatttgagcatacctgttttgaaaggcattttctttttagagttaggtgtagtgcttaagggttaatttattttcatgttatgccagtaatatagtgttgtatgcctattgagtgattgtggcaagaaaagctacagcttctttgcgtttaactttttcaaaccacagaccagaactggttgcatgttactttaggagttgtgggttggtaagctcccaggtacttcccgaggctatggtgtgagagcccccgtcctgccctctggggctccacaggcccctggcaaggccgatggctcaggatgatggggcacagcccgcctttgaacaatcatgcttcagaaatctgcctgaccctagctgctgctgctgctcactttattcttgtatggctttggtaggcatacttggagaacatatcccacattaggaattgatttaagcctgagagtttgagggctttaatcctttaaaacttggagaagctggctgggcgcggtggctcacgcctgtaatcccagcactttgagagaccgaggcgggcggatcacgaggtcaggagatcgagaccatcctggctaacacggtgaaaccccatctctactaaaaatacaaaaaattagctgggcgtggtggcaggcgcctgtggtcccagctactcgggaggctgaggcaggagaatagtgtgaacccaggaggcggagcttgcagtgagccaagatagtgccactgcacttcagcctgggtgacagagtgagactctgtctcaaaaaaaaaaaaaaaaa

SEQ ID NO: 2499 - DNA, 2957 bp, Homo Sapiens
acgtctgctcagctccgcggtaatggaggctagggatgggtgctgaagtatcaggctctggctctagctttagctctggcactggaactgcgtcggagtctgggtctgagtctggcagcccgaagcctggacaccttttcttgattctctaggcgggggctgcctgcgtccaagcagctggtttgcagcgttccaacgctgggagggagttcccttacctggggtccagtctgtaaagttgtcgccgctttctagggaccccgccccaccggctgggactcttccatgcagttgaaactggttgacaaccattaacctgggttgcaactacaggtggcactggaagcagactggttcctggacatgcccggtggaaggaggggccctagtcggcaacagctaagccgttcagctttaccttctttgcagactttggttggtggaggctgtggcaatggaacaggcttgagaaacaggaatggtagtgctattggccttccagtcccacctatcacagccttaatcaccccaggtcctgttcgtcattgccaaattcctgacttgcctgtggatgggagcctactctttgaattcctttttttcatctacctgttggttgctcttttcattcagtacatcaacatttataaaacagtgtggtggtatccttacaatcatcctgcttcttgtacatcactgaattttcatctcattgattatcatctggcagcattcatcacagtgatgcttgcgaggaggcttgtatgggctctcatctcagaggctactaaggcaggtgcagcatcaatgattcactacatggttctgatatcagctcgcttggtactactcactttgtgtggatgggtactttgttggaccctcgtcaatctctttcgaagccattcagtcctcaatctccttttccttggctacccgtttggtgtttatgttcctctttgctgttttcatcaagatagtagagcacatcttcttctcacagactacaactatgtggttcagcacgaggcagtagaggaaagtgcctcgactgtgggaggcttggccaaatccaaagactttctctccttgttgctggagtcgctaaaagaacagtttaataatgccacacccatccccacccacagttgtcccctatctccagacctcattcgcaatgaagtagaatgtctgaaagcagatttcaaccacagaatcaaggaggttctcttcaactccctcttcagtgcctactatgttgcatttctccccctgtgttttgtgaagagtacccagtactatgacatgcgctggtcatgtgagcacctcattatggtgtggatcaatgcttttgtcatgctcaccacgcaactgttgccatccaaatactgtgatttgctacataaatcagctgctcacctgggcaagtggcagaagttggaacatgggtcctacagcaatgctccacagcacatttggtcagaaaatacaatatggcctcaaggggtgctggtgcggcacagcagatgtttatatagagccatggggccttacaacgtggcagtgccttcagatgtatctcatgcccgcttttatttcttatttcatcgaccattaaggctgttaaatctgctcatccttattgagggcagtgtcgtcttctatcagctctattccttgctgcggtcggagaagtggaaccacacactttccatggctctcatcctcttctgcaactactatgttttatttaaacttctccgggacagaatagtattaggcagggcatactcctacccactcaacagttatgagctcaaggcaaactaagctgcctctcaacaatgagggagaactcagataaaaatattttcatacgttctatttttttcttgtgatttttataaatatttaagatattttatattttgtatactattatgttttgaaagtcgggaagagtaagggatattaaatgtatccgtaaacaaggtgatgtgatctttcatgtgttagtatattcgaataatatacatatgagaggtatgcctgtccagtaaagagattgatttgtttgtatggctctggaataactcattcgtttatgaacacatctcatgtattacttgacacagtacctttggtatgtctgcttttctttcaatcctcattatctttagccctcagctggccagtacttattgctaaagaaagggagatcaatggagttgcctaccagcacccattctcttttagttcagctggctaatagtattggaatacattgggaaaagagtgggttaaagtcctaggtggggttctctttgttgcctaccaggagaaagcagtaggcttcctttctaagatacggactcagctggtctattttaccctgtgacatttaaatatacttttgaataagctactatcctgaggctgagggttttgctgccacttttcctgtgtttccacttctgcttccaaagattttcctcttagttgtttgaaataatactttgccagacaggaagtctttagactgcccacattcatgaagaagatgatgtgtggctggatcagtaggagaagctgagtgcaaatgccatgtgggctagagtatgggaaggttgaaaattccaagtaactgggagagtgggcaagtcctcagctgaacaatcttggatgtagtctagcagcaacccacctacaatggcgttatgtttggagttatgaggggaagtgaaagataagaattacctacagctttgtactcagataatttatatccaaaatttgtgttttaaatttcatactccagaactttcatgtttatgagtattagccttttaagttatgggaggtgatatacttagtccattgatgttgtcacttgtcatctaaacttatgagaccttgtcttagagaatctaaaatatattgtcatatgttttctgtgc

SEQ ID NO: 2500 - DNA, 771 bp, Homo Sapiens
aaagtggcaggaaccaaatgaagatagtattaacaaccaaccaggtttttcctacaacagttctgaccaatcaggatcagatcatcgttataaattctggtagaagccactgctcattcagctgcttgctttcagagcatagctttctcaactatggcccggacgaagcagacagctcgcaagtctaccggcggcaaggcaccgcggaagcagctggccaccaaggcagcgcgcaaaagcgctccagcgactggcggtgtgaagaagccccaccgctacaggccaggcaccgtggccttgcgtgagatccgccgttatcagaagtcgactgagctgctcatccgcaaactgccatttcagcgcctggtgcgagaaatcgcgcaggatttcaaaaccgaccttcgtttccagagctcggcggtgatggcgctgcaagaggcgtgcgaggcctatctggtgggtctctttgaagacaccaacctctgtgctattcacgccaagcgtgtcactattatgcctaaggacatccagcttgcgcgtcgtatccgtggcgagcgagcataatcccctgctctatcttgggtttcttaattgcttccaagcttccaaaggctcttttcagagccacttacattctcactgaggatagctgtcacaccattggtcgactgtcttaaatcaactttaaagcagggataaactggcggaaagtcgtcaagggttgttcattctgattccttgcagtgtcctttgtcttctaagacggtcctt

SEQ ID NO: 2501 - DNA, 134 bp, Homo Sapiens
gcagtcatcattcagattaggaaattctgagaaatctagctgaccatcactgttggtgtacagatttcttcatcatgcgggtcatggacaccagggtccttctggcttctttgtgaaggcagctagttctgtat

SEQ ID NO: 2502 - DNA, 507 bp, Homo Sapiens
accgtttatgtttctcatctaatcaaatagagttaatctctaagccagaagctgtaaactcatctcttttccctttattcaagctgtcaatttttgtctcctaaacatcttctagttatattctcatttctctgttcacattgcattaataatgatgataaacatttgcattcttattctgtgccaggcaacatgctaactgctgtatatatattattatatttgtactttggcaagaatcctgtgaagatttttatctttggactactagaagagaaagctgagttgtagagagagtatgtatttaagtccgtttgggctgctataacagaataccacagactgggtaacgtgatgaacaaaaatttaattggctcacagttctggaacccgggaaatccaaaggcatgatgctagcatctggtgagggcctttgtgctttgtcatcccatgccagaaggcagaagggtaagagagggcaagagtgagcaagagatggaagttgca

SEQ ID NO: 2503 - DNA, 423 bp, Homo Sapiens
gctggtacgcctgcaggtaccggtccggaattcccgggtcgactactactactaaattcgcggccgcgtcgacttgcctttggggatcaagaaggaagttcccccgggtgggtggtagaactggaagtagtgtcacaggccatgggctcttttgcatttctcttactgtctctcacttggcctgaatgatttatcacacgatcagttgcaactgccaaagtttgggagcactacattgatgtgaagttctggagacaaaaagggacacaaactgataaaggtagagaagacaaattggtgaaagagagggctaacgactggcagaaagagagctgactaaaaaaagaaaaagtcgacgcggccgcgaatttagtagtcatgggcgggcggtctagagggaccacgcttacttacccgtgcatg

SEQ ID NO: 2504 - DNA, 3516 bp, Homo Sapiens
tcgagggtgcgatggcgcggacgcgggaccgcgtacgcctgctgcttctcctgatctgctttaacgttggaagtggacttcacttacaggtcttaagcacaagaaatgaaaataagctgcttcctaaacatcctcatttagtgcggcaaaagcgcgcctggatcaccgcccccgtggctcttcgggagggagaggatctgtccaagaagaatccaattgccaagatacattctgatcttgcagaagaaagaggactcaaaattacttacaaatacactggaaaagggattacagagccaccttttggtatatttgtctttaacaaagatactggagaactgaatgttaccagcattcttgatcgagaagaaacaccattttttctgctaacaggttacgctttggatgcaagaggaaacaatgtagagaaacccttagagctacgcattaaggttcttgatatcaatgacaacgaaccagtgttcacacaggatgtctttgttgggtctgttgaagagttgagtgcagcacatactcttgtgatgaaaatcaatgcaacagatgcagatgagcccaataccctgaattcgaaaatttcctatagaatcgtatctctggagcctgcttatcctccagtgttctacctaaataaagatacaggagagatttatacaaccagtgttaccttggacagagaggaacacagcagctacactttgacagtagaagcaagagatggcaatggagaagttacagacaaacctgtaaaacaagctcaagttcagattcgtattttggatgtcaatgacaatatacctgtagtagaaaataaagtgcttgaagggatggttgaagaaaatcaagtcaatgtagaagttacgcgcataaaagtgttcgatgcagatgaaataggttctgataattggctggcaaattttacatttgcatcaggaaatgaaggaggttatttccacatagaaacagatgctcaaactaacgaaggaattgtgacccttattaaggaagtagattatgaagaaatgaagaatcttgacttcagtgttattgtcgctaataaagcagcttttcacaagtcgattaggagtaaatacaagcctacacccattcccatcaaggtcaaagtgaaaaatgtgaaagaaggcattcattttaaaagcagcgtcatctcaatttatgttagcgagagcatggatagatcaagcaaaggccaaataattggaaattttcaagcttttgatgaggacactggactaccagcccatgcaagatatgtaaaattagaagatagagataattggatctctgtggattctgtcacatctgaaattaaacttgcaaaacttcctgattttgaatctagatatgttcaaaatggcacatacactgtaaagattgtggccatatcagaagattatcctagaaaaaccatcactggcacagtccttatcaatgttgaagacatcaacgacaactgtcccacactgatagagcctgtgcagacaatctgtcacgatgcagagtatgtgaatgttactgcagaggacctggatggacacccaaacagtggccctttcagtttctccgtcattgacaaaccacctggcatggcagaaaaatggaaaatagcacgccaagaaagtaccagtgtgctgctgcaacaaagtgagaaaaagcttgggagaagtgaaattcagttcctgatttcagacaatcagggttttagttgtcctgaaaagcaggtccttacactcacagtttgtgaggttctgcatggcagcggctgcagggaagcacagcatgactcctatgtgggcctgggacccgcagcaattgcgctcatgattttggcctttctgctcctgctattggtaccacttttactgctgatgtgccattgcggaaagggcgccaaagcgtttacccccatacctggcaccatagagatgctgcatccttggaataatgaaggagcaccacctgaagacaaggtggtgccatcatttctgccagtggatcaagggggcagtctagtaggaagaaatggagtaggaggtatggccaaggaagccacgatgaaaggaagtagctctgcttccattgtcaaagggcaacatgagatgtccgagatggatggaaggtgggaagaacacagaagcctgctttctggtagagctacccagtttacaggggccacaggcgctatcatgaccactgaaaccacgaagaccgcaagggccacaggggcttccagagacatggccggagctcaggcagctgctgttgcactgaacgaagaattcttaagaaattatttcactgataaagcggcctcttacactgaggaagatgaaaatcacacagccaaagattgccttctggtttattctcaggaagaaactgaatcgctgaatgcttctattggttgttgcagttttattgaaggagagctagatgaccgcttcttagatgatttgggacttaaattcaagacgctagctgaagtttgcctgggtcaaaaaatagatataaataaggaaattgagcagagacaaaaacctgccacagaaacaagtatgaacacagcttcacattcactctgtgagcaaactatggttaattcagagaatacctactcctctggcagtagcttcccagttccaaaatctttgcaagaagccaatgcagagaaagtaactcaggaaatagtcactgaaagatctgtgtcttctaggcaggcgcaaaaggtagctacacctcttcctgacccaatggcttctagaaatgtgatagcaacagaaacttcctatgtcacagggtccactatgccaccaaccactgtgatcctgggtcctagccagccacagagccttattgtgacagagagggtgtatgctccagcttctaccttggtagatcagccttatgctaatgaaggtacagttgtggtcactgaaagagtaatacagcctcatgggggtggatcgaatcctctggaaggcactcagcatcttcaagatgtaccttacgtcatggtgagggaaagagagagcttccttgcccccagctcaggtgtgcagcctactctggccatgcctaatatagcagtaggacagaatgtgacagtgacagaaagagttctagcacctgcttccactctgcaatccagttaccagattcccactgaaaattctatgacggctaggaacaccacggtgtctggagctggagtccctggccctctgccagattttggtttagaggaatctggtcattctaattctaccataaccacatcttccaccagagtcaccaagcatagcactgtacagcattcttactcctaaacagcagtcagccacaaactgacccagagtttaattagcagtgactaatttcatgtttccaatgtacctgatttttcatgagccttacagacacacagagacacatacacattgatcttaaaatttttctcagtcactgatatgcaaagga

SEQ ID NO: 2505 - DNA, 339 bp, Homo Sapiens
aataacaatggtatgtacagaatcaataatcacagtttggtgacttcaacagtccatattctagcagagtattatttccctttggtttgatataaaamccttggttggtgtatgataaagaagagaacaagaacaagacgcccctttcctttaagtgcactgttagctatcttacaggctcgcatttscttcccgggccctggcttcacgctggggccctcgctggggagatcaacttcgagcgccaaaatgctatttaaaaaaaaaaaagaaagaaagaaagaaagaaaagaaaggctaagtggggtgtcaggrggaagaggttgggttttyaaattt

SEQ ID NO: 2506 - DNA, 2996 bp, Homo Sapiens
gaattccaggcttgtggattcagtggagaagaaggactaggtgaataaatacaaattaacatggaattatttactgataagatgtctgaagatgagaggtggctttttcctgtggtgccaggcttttgtaatctttgctcttgaccttcgccgggagggggtgcagaagtttggagcaccatggatgtaacctttcaatcctttggccgttgagtgtcagcactacagtttggattaaagctcttattcacaaagcagcatccagcttttagtagacttctcagcaaacaaaatatttatgtgatcaagactgtgttgaaaatagtatatagaggaatagtggtaaaatgaatggggtaaatggagaacaatttccagcaaggagtggtaaagagagagattaagggccaaaggaggaaaagatgcttaagaagcaattcttgaagtagatggaaggcagaagtggtaagatagctgtctgtactagaggatgatagacaaaattattttgtagtgccttggtcctgagtttgaaattatagcaggccatagcacccaatactgaattgttgtcccaaagctgcatctgtatagtgatatgacatgagactctttcttaatccatgtatgtttcaacaattctaaatggacacatttaatggtcaactaataataatattgatcttctcccctacatacagtatgcacacaagataattctatatttgagttttttcccccgagcccagcactgtaagtaatctaacagtgagacagtttctcttaagaaaaacagacttgggttcaaatcttaactctaccacataccagctgtgtgtcctttgtcatagcttctctgagcctcaatttccttatctgcaaaatggggataataactatctcataagactattaagaattaaagagctaatacatgtaaagcatctagtgtattagtaagtgctcagtaaatgatagtatcattatcttgagttaattttagggctgattatagctatcagtctatatcaagacagtttatgaggaatattcatgttaagaggtaagaagctaaacctctgctcttgttccctcttacttctgcaggtacctggcatatacagatcctgggctttcctctcagaccaaaccgaggactataccaactagttagagccactgtggtttaccgccatcatctccaactaactcgcttcaatctctcctgccatgtggagccctgggtgcagaaaaacccaaccaaccacttcccttcctcagaaggagattcctcaaaaccttccctgatgtctaacgcttggaaagagatggatatcacacaacttgttcagcaaaggttctggaataacaagggacacaggatcctacgactccgttttatgtgtcagcagcaaaaagatagtggtggtcttgagctctggcatggcacttcatccttggacattgccttcttgttactctatttcaatgatactcataaaagcattcggaaggctaaatttcttcccaggggcatggaggagttcatggaaagggaatctcttctccggagaacccgacaagcagatggtatctcagctgaggttactgcctcttcctcaaaacatagcgggcctgaaaataaccagtgttccctccaccctttccaaatcagcttccgccagctgggttgggatcactggatcattgctccccctttctacaccccaaactactgtaaaggaacttgtctccgagtactacgcgatggtctcaattcccccaatcacgccattattcagaaccttatcaatcagttggtggaccagagtgtcccccggccctcctgtgtcccgtataagtatgttccaattagtgtccttatgattgaggcaaatgggagtattttgtacaaggagtatgagggtatgattgctgagtcttgtacatgcagatgacagcaacagtacggctagatcaggtttcccaggaaactggaggagagtttaaaatatcagtgttaaagctgcaagtaatcctgtaccaatctgtaggttatatttcttgccttaagtgttacttaagtctcttcccccacttgtgagctagtcagtttatagaaacagttctgataccagtcccctagcatgaatcagtacagtttgaccactaatcagagcccttaatgcttgggtaaaatgtcctctattttactttccttggggctttgtcaaaagtcagcagtcagtagtggtagaacttcagaaattttccaacttttcccagcctgggaaaggtgggtgtccatattttcctagtgtccatattctgacgctctataagatttggggtggtgaaaatagcttgggattttatactcctcttcttgcctcctatgtcctggaaactactagtagctaatcagataaattgcctgcttctgtgttagtattaccttctaaaacttttctcagactggaaatttttcaggtaacagtctttatagaaatcttttgagggactagaaggaaggaaatgtttttctaaaccagcagggcttttcctcttagcctctgaatctgggaaaagtatctgggattatttcctgtcctaggtgagtacagtagcatttaatgaagcccataaggaaactagagtatggagctgtctgagataatctacttcaaacctgcatttatggtgaagaagagaaaacctgtcattgctgattagtattatgaatgggggagttattttaagtattctatggaacaatagagttcagagtattttccttatgtgacacttaaacccctgtaaattatcctacaaagttccttggtggctccgaggctaggagttggcctgattgggggtgcaggggattagagggctgtgaaggaaggactacagaataagggtgaaacctgccaaggcctggagctgactttattctgggcttgcctgtttcttgtgttcagtttggatccgaattc

SEQ ID NO: 2507 - DNA, 542 bp, Homo Sapiens
ttttttttaaaagaaaaaaaaaatcacgtttattttacaaggcagttattttcctaaagtgttacatatcaaggaaagttgagctgtctgtaggaaaacaatataattttaggaaattacagaagagtcaacattgtgcttaaaactttaaaatagtttttaaaaatagcagagtaagtgaatattgccaggtatgaacagccttaaaaagtgaggtggacacaacgatatagaagctcaatattaaagccgctagtgataagtcgctttgagaagtgttcaggctactaagagaacactgcttcaaccttaatcgaaaaaagaagtcatagcactaactgaaacatggccttttcctagaacagctaactctcagttatctacagtaatgaaaaagagcagtgacaatttttaaatggtgaataattccaaaattaatgttgagaagtgccctatttctgtgttgatgtgagagacactgatatccgggaacttacagcactgaccacgtgtgtggaactcccactggcttcccccttctt

SEQ ID NO: 2508 - DNA, 243 bp, Homo Sapiens
  misc_feature (130)..(130): n is a, c, g, or t
  misc_feature (155)..(155): n is a, c, g, or t
aggctcggctccggaatcactgcagcccccctcgccctgagccagagcaccccgggtcccgccagcccctcacactcccagcaaaatgggcaaggagaagacccacatcaacatcgtggtcatcggccangtggactccggaaagtccaccaccncgggccacctcatctacaaatgcggaggtattgacaaaaggaccattgagaagttcgagaaggaggcggctgagatggggaagggatc

SEQ ID NO: 2509 - DNA, 323 bp, Homo Sapiens
aaaagtttttttttttttttttttaatccaaacaccaacttgaacaagagactttcagttttaaaacattttaagtgggaaaccctgcctgtcaatgcatcattattgcccttcttgattgctgtcttggtagatgattcactgcccctccctagaagaggactatgtgtcatctgcctgccccatgacctcagccttggccacatgacttgtggtaccagtctctacagaagaaggatgcctccttatatgcaaactcaggtgtggccatgtgatctgcactggccaatgaaatgtgggcacaagtgacacctggtcgacgc

SEQ ID NO: 2510 - DNA, 645 bp, Homo Sapiens
acactatagaagagctatgacgtcgcatgcacgcgtacgtaagcttggatcctctatagcggccgtctactactactaaattcgcggccgcgtcgactttttttttttttttttttttttaacattcgacaaaatagcctgtattcttcaaaaatgtcatggtaatgaaagacaaaagaaagttgaggaatctgcagtattgagagacacacgtttacaaatgtaacatgatcctgcacaaggtaaaagaatggctacaaaggacattattgggataaatggcaaaatttaaatatgaatcatgggttagataacagtattaaatcactgttaaacttcctgattttgataataatacttaaaaaaatactgaataatgcttaaagtaattctcttcttctcttagaagagaatgtcctgttcttagggaaatgcatactgttttgggcataatggggtatctgtgcaaattattctcaaatgattaagaaaatgcaacatgaaatatagataaggcaaatgggataaaatgtaaacactcagtaaatctggataaaagatatataggagttctttgtgatattcctgcaacttttctgtcgacgcgggcccgaatttagtagtagtagtcgacccgggaattcc

SEQ ID NO: 2511 - DNA, 497 bp, Homo Sapiens
tttttttttttttttaatgaggaaaaactccgggaaggaagcaaatttaattttcttttcctctttgacacctttcttccctgtccaaagggaggttcttaattgaagtctgtgaggggagcgctccatctctttatcaccaagtggcctcagtacacagaacgctcgctttttattgtagattataccttccttttcccccttggctctggaaaggataagtgattacaactttgttatcttctaaattaaaaagaaggtgaagttgactgggctggagccatctgcacagcagtttgacaactggggcgacagcataatactgggcaattttttgcacaattcaaaagctttttttctcttttttgccaaggaatcagtttaacaaacatcctactcttgctgaaaataatttcttttcccaactcttctaggaataaaacacttttaatgtatttgtcaggaatcgacacttcatttaataggatttaaaaagt

SEQ ID NO: 2512 - DNA, 248 bp, Homo Sapiens
ttttttttttttttttttttttttttttttttttttttttctttttccaatggtcttttattttcaaaggctccactaaaattactttttttagatttctgggctatgggtttttagttgtgaattcaaagataaaagtcaagtagagcactgcatgagaataattcattttacagggcaatcaatcagaatttgcacatttgttatatccgagatgtacagttaggactcaccccttcttccactca

SEQ ID NO: 2513 - DNA, 433 bp, Homo Sapiens
agagatcatccggggctttaatagttaatggcccccaaaactccgtaagaagcaggaaatgcagcccaagttttacaaatgggtaaacagaggcactgagagatagatggtagtttggtacttctggttcccagtgcccaggaatggtccactcccaagaaattcaggaaagaaagactgaggagaaggtgtgggaacattctggatgtttcgggagagttggggaaactcctcctcttaggaaaggctaatactagggtaatccttgggcccattgaattaggggtgaggccccagaacccgttatctatgagttgtatgggggagccatctgaagctgtagccaccagggatgcagctagctgaggagtttggggtgttgggttggacaaggcaggttagtagactcagattcttgcttcaaagagccttg

SEQ ID NO: 2514 - DNA, 440 bp, Homo Sapiens
ggcaagctgcttaccaccttccagggtccagcacaggtgcatgcccctagctttggccctcacaaacttgtgagcatgccctgaaacaaattggcatttcagattttccaaaacaaaagtcaaaaaaccccatcaccaccatcatccaccctacaccaaccagggtcactatggggacttagcacagggcctggggagggtgggagctgctgctggactggcccgaggactccacagagtgggggacgttgaagacactggcgcactattggctgctctgctgggtgctttaacctctggggctgggcgaatgcacgccacggtgcccttctgagcctttttttcttttcctgtactggatctgcttggatgtggctgtcctgtttgtgagaaaacatgcagaaagattatcaagcttttcatttctctttattgtagtt

SEQ ID NO: 2515 - DNA, 533 bp, Homo Sapiens
aattttagcagacaagtgaccaggctaggtccaggctgccagttccacctaccttctctgggttctggtaccaatatcaattcagttttcaaagccatttgcagtactcttcagatgggtttcatatgtagactagttctcaaggtctttgatgttttgtttgggatcagatccatgctgcacagtttggaggtgattctgggagtttatacacaaaagtatgggatcactcttttatgctctctcctctctacaatctccctcatcagtttttggctctttggggcctccttttccagtctctcagccagaaatctaggactttaatttcccagctctgctatgtacttataactgcatctgtgtctggggccaagcagcaggagaacagaaggcagagggattggggtgtgagggtggagacagaagtaacaggaatttccccatgctcttgggctcacggcttttctggtaggagaagttttttctgtctaagaattaggcatctacttggctaatgctgctatcaccat

SEQ ID NO: 2516 - DNA, 345 bp, Homo Sapiens
ctgcctgtgctgactcagcccccgtctgcatctgccttgctgggagcctcgatcaagctcacctgcaccctaagcagtgagcacagcacctacaccatcgaatggtatcaacagagaccagggaggtccccccagtatataatgaaggttaagagtgatggcagccacagcaagggggacgggatccccgatcgcttcatgggctccagttctggggctgaccgctacctcaccttctccaacctccagtctgacgatgaggctgggtatcactgtggagagagccacacgattgatggccaagtcggttgggtattcggcggagggaccaagctgaccgtccta

SEQ ID NO: 2517 - DNA, 558 bp, Homo Sapiens
ttttttctagagtgatatatattttttgttctttttctttttttcttccaaaacaaacaattagagctctaggcccctcgccctccccactcccacccagaaccctcccatataatcgacaactgaaaacaagcgagacaatcacccccaaagaaatcacgaaacacaagcacaatttcacgacagccaccgacaaagcaaaaaacttctactggaatgtccccttgcaggatcaggagaagcaggagcaagagtctacaaattgaaggggactgagaagtaggggagcagggggaggaacggaagcagagagtaagcttccatctgatgcttaggtgccattttgcccctttcctttgcacgcgggactgtttcccagaagcgcgcgcacgcaccagccacgcagatctgcatccaggcccatgaagcaggaggccaagcccggccctggggcgggtctcctttggcgctggggctagagccgccaagcccggggcttctctgcgtgggtcgagaagccgacgggattcggaggaacgcgcagagcgttgcgcgctg

SEQ ID NO: 2518 - DNA, 291 bp, Homo Sapiens
  misc_feature (47)..(47): n is a, c, g, or t
tcgtgactatctatcctgaatctaacagtgacttataactaggagantgaattagacccttaaggtatagtgtgtgttgcaaatcactctgcaatggaaacttttatattcagggtaggtttgtgtcttaaactaggtgttctaatcaatgtacaagactttaccatacacgcaactatagtttttctaaaccttcatcattttgtgattctttgagaaagggcttttaggaactttatgttctaaaaaatgtttttaacaataataagataaaagaaaaacctgtgattc

SEQ ID NO: 2519 - DNA, 627 bp, Homo Sapiens
atgtggaaatggatactgacacattgtgcctcagcctttccccacctgcccggctgctgctgctgctgctttttgttgctgttcttggtgtcttccgtccctgtcacctgccaagcccttggtcaggacatggtgtcaccagaggccaccaactcttcttcctcctccttctcctctccttccagcgcgggaaggcatgtgcggagctacaatcaccttcaaggagatgtccgctggagaaagctattctctttcaccaagtactttctcaagattgagaagaacgggaaggtcagcgggaccaagaaggagaactgcccgtacagcatcctggagataacatcagtagaaatcggagttgttgccgtcaaagccattaacagcaactattacttagccatgaacaagaaggggaaactctatggctcaaaagaatttaacaatgactgtaagctgaaggagaggatagaggaaaatggatacaatacctatgcatcatttaactggcagcataatgggaggcaaatgtatgtggcattgaatggaaaaggagctccaaggagaggacagaaaacacgaaggaaaaacacctctgctcactttcttccaatggtggtacactcatag

SEQ ID NO: 2520 - DNA, 11143 bp, Homo Sapiens
gggctggctgagcgcgggcgagtgtgagcgcgagtgtgcgcacgccgcgggagcctctctgccctctcctcgcaccctgctcagggcatctgaagagcctggaaacgtgaacaggcttgaagtatggcatgttgcaaagatggtttctgccaagaaggtacccgcgatcgctctgtccgccggggtcagtttcgccctcctgcgcttcctgtgcctggcggtttgtttaaacgaatccccaggacagaaccaaaaggaggagaaattgtgcacagaaaatttcacccgcatcctggacagtttgctcgatggttatgacaacaggctgcgtcctggatttgggggtcctgttacagaagtgaaaactgacatatatgtcaccagctttggacctgtttctgatgttgaaatggaatacacaatggatgtgttcttcaggcagacatggattgacaaaagattaaaatatgacggccccattgaaattttgagattgaacaatatgatggtaacgaaagtgtggacccctgatactttcttcaggaatggaaagaaatctgtctcacataatatgacagctccaaataagctttttagaattatgagaaatggtactattttatacacaatgagactcaccataagtgcggagtgtcccatgagattggtggattttcccatggatggtcatgcatgccctttgaaattcgggagttatgcctatccaaagagtgagatgatctatacctggacaaaaggtcctgagaaatcagttgaagttccgaaggagtcttccagcttagttcaatatgatttgattgggcaaaccgtatcaagtgaaaccatcaaatcaattacgggtgaatatattgttatgacggtttacttccacctcagacggaagatgggttattttatgattcagacctatattccgtgcattatgacagtgattctttctcaagtttcattttggataaataaagaatcagttcccgctaggactgtatttggaataacaactgtcctcaccatgaccacactaagcatcagtgcacgacattctttgcccaaagtgtcctatgctaccgccatggactggttcatagctgtctgctttgcttttgtattttcggcccttatcgagtttgctgctgtcaactatttcaccaatattcaaatggaaaaagccaaaaggaagacatcaaagccccctcaggaagttcccgctgctccagtgcagagagagaagcatcctgaagcccctctgcagaatacaaatgccaatttgaacatgagaaaaagaacaaatgctttggttcactctgaatctgatgttggcaacagaactgaggtgggaaaccattcaagcaaatcttccacagttgttcaagaatcttctaaaggcacacctcggtcttacttagcttccagtccaaacccattcagccgtgcaaatgcagctgaaaccatatctgcagcaagagcacttccatctgcttctcctacttctatccgaactggatatatgcctcgaaaggcttcagttggatctgcttctactcgtcacgtgtttggatcaagactgcagaggataaagaccacagttaataccataggggctactgggaagttgtcagctactcctcctccatcggctccaccaccttctggatctggcacaagtaaaatagacaaatatgcccgtattctctttccagtcacatttggggcatttaacatggtttattgggttgtttatttatctaaggacactatggagaaatcagaaagtctaatgtaatttcgttgctatagtagtttgctaaaagatgatgaaaatgcagaatgtctttttaaatgtttttaaatataaacaaatattctttactaaaataaaaactctgtgtaatttttccatttaaagatataagccagttattgggagagttaattaattcctgagtgaaaaagtgaactatgttttttttcagaaaaattattttaaaagaactcagcattcagttagatagaatacacaccatcctggaaagttgggataagagaaatagagctattagagacaagtggcgcatattttttcattgatatttgaaaacagactatgacattttaaaaatctgccctatgagtatcaacctgccaccctaaatttcccagtggcactacccttaaccagaattgtttattagatgtcatatgcagtgacctttggtgatcttcttaggaacttcaagaaaaggaattttcctgttaaattaaacattggcaaaaggaaatggaatagtataaacactgatcaatagagtaaaatatctgctgcataaaaaactaagacaaagaccagaggaaatatcttccctttcttatgttggctaaacagtacttaacagttgacttgaaattttgttctctgagccaaagtttaactcattgtatgaattctttttcatggtagttcattcagttatgtgtttatttactacatagttattcagagcctactgtgttccaggaactatgctagaaactgtctctctaggaaagctcttgcacctttatctacaatattacttaaaaagtagaacagtcaatgcatgccaaagaaccataaactagcagaggacattgcattctttagtgaaggacatttatttagagtctgacaacatattcaaaatatttttcagcctctactgatagtggataacaaatatatttgttcacataaccactttgatgtcagtacaacttcagcaattggttttcaaaatagatgagaatatggtacagattgttctataagtgaaaagcattatgtacttgaaagtaaaaatcagggcaatataagacttaatagattaactgtcgcaaatttgatcagagtcacagagtagaatttgatcagaatcacagaatcatcagacataggaactgagcacaggctttttcaggtgctttccccaagatagatctagatattagctagtgaaatgctaaattttgaagagttttgtgtccgtagttctgtaattctgggcagtcatcatgttggtttttttgggagtttttttaaggtttaataactaaggggaatattttaaaattaagagagcagcaaatgaaaggagtaaagaaaaaaatagctgtcgggtaggatgccactgactctgctatgtgatttatcagggttttcatctactgacttctttctcattaggtaggcttaacaacttacttgagaattttgcaactgtctatgcagctgaatctaagtatggttttttgtcatattgcctctagattttcttctgtgcttctctctatctgctctggaatggatgagtgaatgtgttctgggtgttttagggaacatattgatagaaatgaccaccttgcagacaaaatctctctctctctttttgtttttatagaaaagaagtgatagtagttaattggcatcgatttttcagatattgcactaccttataatggttgtttttgatacctgaaaattgtgcaaatgccaaatattaattgtaagtcatatctgagaaatcattcttggctgtctttctaggtattccatagaatcaacacattttaaggctgaaagatactgtcgaaatcacccagtcccaaccccccaatttaaaattgattctagtaaaattaggtccagtaacacctgtatatatgtatatatttaataaagagtacttgtacaaaaaagcttatcataaattatttcatgaatgtgaatagatttctggccttgaggacgatgtttggaaatatggttggaagcacaattcattcgctactagttattcagagcgtactttgttccaggaactatgctggaaactgatagttcactattctgatgaaaaggctggttttgttgttgttgttgttgttgttgttgttgtttttggtgaggaactcttactctttgctaatctattggcctatcttaagaaataattatttggttattcattggcttcctttaaaaaaaagtgttcttctacaaatcttacagagtgtaaagagataaaaagaaatgattttttttcttacctttacatatgaaggtttaaaaatacatcatgtggccaaagaatgagaaaggacagaattaaccaaggattcttaattgttaatttgaagaacacattaaccagaaagcttaaacattattattaaaataaattatttcatttgcacacaatgataataatgatgataataataataataataataataataataataataataataatatgttgtttgctttccttaactgaatttcatcaaattcattcagtgatttttattttggtcattatttctatcttcccaataacccagaggtacatcaagtaaaaacacttttgcaaagagccagtcacttttccctcttagaaaatctcagaagaatgattaggggcacccaaagttctggttatctatgaataataatgaataattttggctgagaatggtacctttatataactcttttaaagatgaaattcagaataattttattcaggacctagtatctgcagtccatgttggccactaactgctacataattactttcaatttcctccaggcatgactaggtataaacatatatttacatgattaatccacattttaaaatgacttgcacttgtgcatatacatagtactttgaataatgtatattttaaattggacctcacaaatcttgtattaaagtaggtagagagtagagtcacactttttttgatgaaatgagtcacagagaagttacatgacaaagataaaatcacagggttggaaagaactttgaaaggtcatttttcaataatctcaccttaaaagtgaccccttttcaaacaaagcataaacaatttatttgtggcttattttacccatgagctggccaatacttcctggcctagaaaaatatctccactctccccattcctgttcttaatggtcttctcttctcaatttgtaaatattctccagtaaaagacaccaggtgtggagatgggtcacttaatttcaagttctgagtgtcttgtggttttaaacaagtctcttaacctctctaagactgattcctcatttataacagggaggaggtggattatgtaatatctaagagcttttcagttttaatactctctgattctcatagtaaatacaagcatactcttgtaagaaaaacactgaatactttgaaccacaaataagtgtttatggacaaaaatttagttctactgcttgattactttaagttcattgcttgcttcaaactaaggtttccctaccttcaaaaatatatataacatctctccatttagataaagtatattcttccccagggaagactgtattctttaaagacagtagaatattggctatttctcttttctgggatttcctgggcttttattcactaaatgggctcctgcccagtttgggtactgtgctgatttttagatatacagagataaaaatagcccctttccttgcaggtagtcacagtccggaagagatgatagatgcatagacaaaaaattatgggatgtaactaatgcttcagtagaatacagcagggccaaaactagagtgatactcatctcaggcacaaatatatatggggacatcaaaacttcaataatcaagatacctaatatttaagtgaatatttttaaaactcaaaattaatgcaaaagatttatgatgaacagaatatacaaattttaaataaattaatagaatcagtagtaataatattttcttctgcctcaggctccaaaattgctcagcatagcactgatctagatagaggtggataaaagatccacataacttaattacattgttgaaggagaggaacaagagtgatagcagagaaggtttcacagatataatcttaagctaaattttatagaatgatttggagttcttatagcctccattcccacttccacaaacaaacaaaaaaatgaaagcgcaattttatcagcacctgaggcaggagaagagatgaggatgtggaaagtcaaggggaactcttactacaaattcttagttctgtgtttggaggtaagggtgaatgcagggaagtgagagttgttgatgttggaaagacctaaagagcctggattaggaagagttttgtgtaaattactgaaggaatggaatttgatcaggattagtggcaatttattaaaaatcttgaagaataatacgatgaaaactaacatccttatttttctgttttagagaaagcacctgattattgtgtgaactatggtttggagggccacaaatctagaggtagtggaacagttgagatctcttattttttctttcctgtcttaaactttgccttctattccttttttctttttttgaccgcaatgacttcattgtcatttgtaaaagtgatacatgactgttaaagatagacattgtagaaacttaaaaacaatctcaaaattctaccacccagaaatcagaaatattttgtatttggatatgtttgtctagaagagtagattgcttgattaaaagacagagttttataaatgtagaagccaatatgacatacatgctgccattaaataataaaaaattaaattgacttttatctcaagataagattaaaattggagggtaaaactgaagaaattgttgaaatttggatggtgcttctttaaagcaagagatttagagagtcagagctttttatcccaggtttcaatctttatttcaggaaaattttctgcaattttgtctaagttaattttttttttttaagaaatgccaattatgtcaaatcccttttgtctctatacaatagtccccaactgttttggcaacaggcacgggtgagggtgggggaatggttttcagatgaaattgttccatctcagatcatcaggcattagtcgattctcataaggagcggacaaccttgcatgccctcctatgagaatctaatgccgccgctaatctgacaggaggcagagctcaggcgataatgctcaatgggtgccactcacctcctgttgtgctgcccaattcctaacaggtcatggataagtactggtcagtggcccaggggttggggaccactgctctgtaactatttacagtattctttgtaactactttggtatctttaaaattttctttaacttttgtcaaccataaccctagtgagttttcagttgtgattattctattttgtaacttccaatgtacttttcaacttcataatggttaattttgttttccattgctttcttggtcactgtcatttcatttttcttctctttctctatttttaccattgctttattgaaatatcttctttgagcttctcatgtttctctattaatgagatcatgtctataatattttttgagactacagagacctatttatataaactcttcctctatttcttgaaaaagtttttatctggcgtgagcttcatctgctttttcattgaggttttatctcccttgcctatttttggggctggtttctttctattaatcactgagcagagccagctatttactgaactacagtgtgggaagtggtgggagggtgagtcagatcagcccacagaagctatttaaatttcaggtttcaagcccacctccccaaaaccgttttatgtgttttttcttctgcccaggcaccatatttttatatctatttttgacatttgggcggcctatgtagttcacagtgtaaaactctctgttttactttctttatgttattgctagtgattattgcttgtagtcccacccccttccccacattagccttagtattctatattattcagcaagcttgttcacaactctcaaatatagtctatcagaatttttatctttacctctacattccactattcggaagtatatagtaaaatcgtatgaagacagattttgtctttttcttgcctgtttacactctatcttacagaggtttcaaacaaaccatctttgtttgaaacatcgcaggataatgatacttattgaaatctacatcctgcccaagatatatgccagtcaatttcctttctcctattagtgcaaatggctacctacttaaaagctgctgactatagtttgtcatcaattacttgttaattacagatatggttttcatttttttttctcaatttttcattatgttatttttggagactgtcttaggtggggagtgaattataaatatttttatttcaccacctttaactgagtcaccatatgttatttgcacttccaatagaccagggattgaccagagtatcttttactgatatgaccaccagagctacatggcttttaccttctgtatatcagatgtcactggaatcaagcattaaacctagattaaatctggattaaaccagctgtatggcaccttagaaaattgagaaggactaggaagctgatagaaagaactcctgtataaaaaataaattctttttacattttccttggtagtatttctgcaagcttctttagtttctataggggaatcccagagttttcctctgagattgcttccctttcctttgtattttcatttttccctcttgggctttacttttcagtcgtgtatttctatcccaatgttaatttattacactgtttatattttcctgtccttcaattcatcagtagattagtgaagtacttattcctttaattataagtataaacgtttttaatttctttttggataacgatacatttaatggaaaatttttaaatgctatggtttcttaatagcttttctctaccactaattacttccgttaaaaaaaaaaagaaatacccatgcgtaatataaaagaaattttgaataaaatgttatcctttccttttactagagacaaacatctccacttcaaaatggaaaaatggaactatgcaaaggaaatttacgatattcaagagtatgatattatcactgaaccgattaatttaattgaaaatactaacctgcaaaaaagaattacacaaatgtatttgaaatgtcatcagatacctcaagctatgacagagttgattatgttacacaagtagtaaaggataaattaaatatattctatattaacactaagatttaaaactaattatagtcttctttaatttttctactgtatacatttcatctagttttcagtaaaacaaacttttcattacttttacttatcccatgcaaatctagttgctataagatataacctaatttggaaatacctccctgtaatacattggaattttggtgtgagtgtgtgtgatcagagaggataaacaaatggtgtcagcaaaatagaatgtaaaatatggagataatgtggatttacacaatttgataaaaattctcccttgaattttgcagatcatatatgaatatcatcatgtgaagtgcaattaggattttttcatatattaatacatatacatcatctctttaataaaatattttgctgaactcgtttaatatttctcatgtctcatatttcatattttctcatatgtctcatattttatattttctcatatgtgtctcatttttattattactatagtatccattaaaggagactggcaaatacctgaacaaagttatgttgttggcaatataagatattaccaattgcataatattatttccaaaggcaaattaatatgcaaactatagatttccatgggtatctatacaaattattacttgaagtccatagaaaacagcttccttagagggaagtaaaagaagctctgataacagacaatgtatagcatttcagttaaagtttgattgacatatttttttctcagtcttttatacttgtgaattatagtctacattttgtctttacagatgttgctaacacagtgcagcatgttggcttgtcattttactgattatgtatattgtctcctagttcaagtatacagtaaatcagagctttcatttttcaaggggcagaaaaataattgttggttgataaggtaaggttatatgattttgagggagcttcattgtaaattgaatgagaatccggttttcatgcaaaggtgtatctatgcgataatactttgaatgtctgtagtttgaaatagaaggttaattttttccactggcttatccttaatgaaggaaatcccctgataattactttgattctgaaaatgttgaaaactccagaagaaataaagcttttctttgatttctcagctgaagtgttgtacaaactgaggaatatgaagtccattcccttctttcttctcttgaataattttaaaattgtttgtttagttgtacaattgaaaatattccttattatagaagtaaaaaaacaataatgcatatttcctcatatcataaaaactaaatttgttatcatctgagcttcaatattcttgctcaattagaatagtaaatataaagtgtgatatttataacagttcaaggtttgataggagatagaggtgttttgattttatgggaaaattacttcctcaagaacacatttcttgaggttttagtaatcacatttgactccctgaaattggcaattttattcaatgtaggaatattatcatggtatattatagtgaggagcacatagtcattattattttgtttttgcaaatttattttgaaaaaaaggagcattatcaaatattggtttactattttaaagtaattcatcaggaaatgattttttaaacactgtccctttaagtaaatgtcccttgcttttcaaagctcaacttattacttatggtaatagagttactttgcttcttaaaacaaagtttatactagagcatagcattgtagaattattcaggtctcaatttctcactggaaaatgagtctttaaaatagtaaggatttaaatttctataaaatttaatcacagatacttatattttaagataaatgtgttggagctaaactctggaattattaaaatataaaacattatatccctctaatgtattttttctatttaaatttaaaacaataaacataaatatctttggaaaaaaaaaaaaaaaa

SEQ ID NO: 2521 - DNA, 402 bp, Homo Sapiens
cataattttaaagtttacttaaaaaatgtaaagaactcccaatatttaacaggtaaaaaaaatagcatattggtctatgggtttgttatattttattttccaagtaatactgattaaaaatatttacacacctacttttaagtccacagtttagcactcttatttgtatggctttaaaagttatagcacaagatctttacattaagaattgggggaaaagattccattcaaaacaaagcctgataattatatacatgtctttctctgtactttattttaaatacattaatttttaaatgctgctcatctttttctcatctggtggtaaaatactagtgcaacttttcatcaaaataaagtttaccacagatgtaaataaattttcccaattgaaaatggccc

SEQ ID NO: 2522 - DNA, 985 bp, Homo Sapiens
cgctcataagtgggctcaggcctctctgcggggctcactctgcgcttcaccatggctttcattgccaagtccttctatgacctcagtgccatcagcctggatggggagaaggtagatttcaatacgttccggggcagggccgtgctgattgagaatgtgcgttcgctctgaggcacaaccacccgggacttcacccagctcaacgagctgcaatgccgctttcccaggcgcctggtggtccttggcttcccttgcaaccaatttggacatcaggagaacagtcagaatgaggagatcctgaacagtctcaagtatgtccgtcctgggggtggataccagcccaccttcacccttgtccaaaaatgtgaggtgaatgggcagaacgagcatcctgtcttcgcctacctgaaggacaagctcccctacccttatgatgacccattttccctcatgaccgatcccaagctcatcatttggagccctgtgcgccgctcagatgtggcctggaactttgagaagttcctcatagggccggagggagagcccttccgacgctacagccgcaccttcccaaccatcaacattgagcctgacatcaagcgcctccttaaagttgccatatagatgtgaactgctcaacacacagatctcctcatccatccagtcctgaggagccttaggatgcagcatgccttcaggagacactgctggacctcagcattcccttgatatcagtccccttcactgcagagccttgcctttcccctctgcctgtttccttttcctctcccaaccctctggttggtgattcaacttgggctccaagacttgggtaagctctgggccttcacagaatgatggcaccttcctaaaccctcatgggtggtgtctgagaggcgtgaagggcctggtgccactctgctagaagagaccaataaagggcaggtgtggaaaaaaaaaaaaaaaaaaaaaaaaaaaaaaaaaa

SEQ ID NO: 2523 - DNA, 460 bp, Homo Sapiens
tttttttttttttttttatcattgaatttattttattttaaagttatctatgtacaccaagtaaatacacacagggggttgcgcagtttggtttgtcttccacgctggcatgcaacattttggcagatgtgagtgggcaggccaggtgccccttgcagtgaccctggctctgaaagggatgcggtgaaggtggggagcaggaggaggaggaggatgtagtgtgaagcttctggtgaagggtttgcgtgtgtgttgtttcttttttatgtaagtgaattatatttcccttacatcttgctaaagagaaggctgctccctctgtgtcatctctctcctcatctgcgctacaccctcacatttccttatgtgtttttaaaagaaccatgtggtggcaacattacataaaaccccctggattcttaagtgccctgctgacagcaaatattagcctaagtccaca

SEQ ID NO: 2524 - DNA, 2566 bp, Homo Sapiens
acatttcagggacaccatgaagggtggcttcactgggggtgatgagtaccagaagcacttcctgcccagggactacttggctacttactacagcttcgatggcagcccctcacccgaggccgagatgctgaagtttaacttggaatgtctccacaagaccttcggccctggaggcctccaaggggacacgctgattgacattggctcaggtcctaccatctaccaagttcttgctgcctgtgattccttccaagacatcactctctccgactttaccgaccgcaaccgggaggagctggaaaagtggctgaagaaggagccgggggcctatgactggaccccagcggtgaaattcgcctgtgagctggaaggaaacagcggccgatgggaggagaaggaggagaagctgcgggcagcggtgaagcgggtgctcaagtgcgatgtccacctgggcaacccgctggccccggctgtgttgcctctcgccgactgtgtgctcaccctgctggccatggagtgtgcctgctgtagccttgatgcctaccgcgctgccctgtgcaaccttgcctcactgctcaagccgggtggccacctggtgaccactgtcacgcttcggctcccgtcctacatggtggggaagcgtgaattttcctgcgtggccctggagaaaggggaggtggagcaggctgtcctggatgctggctttgacattgaacagctcctacacagtccccagagctactctgtcaccaatgctgccaacaatggggtctgctgcattgtggctcgcaagaagcctgggccctgagccaggagggccagccagaggtctggtcaggctgtgaggccttggccatctgtatgctagagaggggtgaggaatggatgctgtctaacagtctctgatttcaacactaacattccatcttctgaaattctgagattctaacatccttgttttagaattctaagtttccaacattcctcattctaggatcctaggagtggaattttccattttctaatatactaagccttacagctatcttagatgcgatctgactcctgtgtgactgtggagcacccagggacgtggttttagagtctacctaatatgttaaggacaaggaaacctctgagtctacctaatatgttaaggacaaggaaacctctggacagtggtatattggggaattttttttttttttttgagacggagtctggctctgtcacccaggctagagtgcaatggcacgatctcggctcactgcaagctctgcgtcctgggttgacgccattctcctgcctcagcctcctgagtagctgggactacaggagctcgccaccacacccagctaattttttttttttttttttttttttatttgagacggagtttcgctctgtcgcccaggctggagtgcagtggcgcgatctcgactcactgcaagctccgcctcccgggttcacgccattctcctgcctcagcctcccgtgtagctgggactacaggcacgcgccaccatgcccggctaatttttgtatttttagtagatatggggtttcaccgtgttagccaggatggtctcgatctcctgacctggtgatccacccacctcggcctcccaaagtgctgggattacaggcgtgagccaccgcacccagccagggggaatgttctataaccagctctgtaaaggaaaagcactgatgtgtggtagtcaccaatttctgtggtgtaaatactcccaccatggttgatttcaagccaccagtggtttaataaccagctcataaatctcctaaatattttacagttgactctcatgagctgattggagtcagctggaacataccactgcctctagactaaggccagcagatttagcaaatacagactgccccagttcattgaattttagataaatgaaataaatctataaggttaagtatgtccccagaactgcatggaacatgcttaatctaaacaatgatttgttgttcacctgaaattcaaatttagctgggtgtcctgtatttcatctggcaaccctacttcagacccaggtgtaaggtacatggatgtgctttggtcaaggaataggccaaggcagagatccatgcctgcatgactcagtgggtttggtgcacaggcacacacctccacttgttatataacctgtttgtgtaagttcatacttggtctgagccactgttgtctgtaaaaggtaattgtcctgctaatgctgtacaggggctcttggggttcggctcagctcaacatggcttgacatggtgggcacactggcgcccagtaagagagagagagccaaagctgtccgttttgcagatggacaggaaggggccaggacacagctcagcttgctcacgcccagagagagaaaaagttaagctgctgaccctgaaggcaagggagagcaggctgcacagctgtgtgtggaagccacgggctcaagcagccaaggcagggtggacagtgtgagagagctagtgtaagctgttgatgagagctgttgctgaataaaaccatattcacctgccaagg

SEQ ID NO: 2525 - DNA, 2178 bp, Homo Sapiens
atggcagacgaagacctcatcttccgcctggaaggtgttgatggcggccagtccccccgagctggccatgatggtgattctgatggggacagcgacgatgaggaaggttacttcatctgccccatcacggatgacccaagctcgaaccagaatgtcaattccaaggttaataagtactacagcaacctaacaaaaagtgagcggtatagctccagcgggtccccggcaaactccttccacttcaaggaagcctggaagcacgcaatccagaaggccaagcacatgcccgacccctgggctgagttccacctggaagatattgccaccgaacgtgctactcgacacaggtacaacgccgtcaccggggaatggctggatgatgaagttctgatcaagatggcatctcagcccttcggccgaggagcaatgagggagtgcttccggacgaagaagctctccaacttcttgcatgcccagcagtggaagggcgcctccaactacgtggcgaagcgctacatcgagcccgtagaccgggatgtgtactttgaggacgtgcgtctacagatggaggccaagctctggggggaggagtataatcggcacaagccccccaagcaggtggacatcatgcagatgtgcatcatcgagctgaaggacagaccgggcaagcccctcttccacctggagcactacatcgagggcaagtacatcaagtacaactccaactctggctttgtccgtgatgacaacatccgactgacgccgcaggccttcagccacttcacttttgagcgttccggccatcagctgatagtggtggacatccagggagttggggatctctacactgacccacagatccacacggagacgggcactgactttggagacggcaacctaggtgtccgcgggatggcgctcttcttctactctcatgcctgcaaccggatttgcgagagcatgggccttgctccctttgacctctcgccccgggagagggatgcagtgaatcagaacaccaagctgctgcaatcagccaagaccatcttgagaggaacagaggaaaaatgtgggagcccccgagtaaggaccctctctgggagccggccacccctgctccgtcccctttcagagaactctggagacgagaacatgagcgacgtgaccttcgactctctcccttcttccccatcttcggccacaccacacagccagaagctagaccacctccattggccagtgttcagtgacctcgataacatggcatccagagaccatgatcatctagacaaccaccgggagtctgagaatagtggggacagcggataccccagtgagaagcggggtgagctggatgaccctgagccccgagaacatggccactcatacagtaatcggaagtacgagtctgacgaagacagcctgggcagctctggacgggtatgtgtagagaagtggaatctcctcaactcctcccgcctccacctgccgagggcttcggccgtggccctggaagtgcaaaggcttaatgctctggacctcgaaaagaaaatcgggaagtccattttggggaaggtccatctggccatggtgcgctaccacgagggtgggcgcttctgcgagaagggcgaggagtgggaccaggagtcggctgtcttccacctggagcacgcagccaacctgggcgagctggaggccatcgtgggcctgggactcatgtactcgcagttgcctcatcacatcctagccgatgtctctctgaaggagacagaagagaacaaaaccaaaggatttgattacttactaaaggccgctgaagctggcgacaggcagtccatgatcctagtggcgcgagcttttgactctggccagaacctcagcccggacaggtgccaagactggctagaggccctgcactggtacaacactgccctggagatgacggactgtgatgagggcggtgagtacgacggaatgcaggacgagccccggtacatgatgctggccagggaggcagagatgctgttcacaggaggctacgggctggagaaggacccgcagagatcaggggacttgtatacccaggcagcagaggcagcgatggaagccatgaagggccgactggccaaccagtactaccaaaaggctgaagaggcctgggcccagatggaggaataa

SEQ ID NO: 2526 - DNA, 408 bp, Homo Sapiens
  misc_feature (54)..(54): n is a, c, g, or t
  misc_feature (56)..(56): n is a, c, g, or t
  misc_feature (61)..(61): n is a, c, g, or t
  misc_feature (313)..(313): n is a, c, g, or t
  misc_feature (320)..(320): n is a, c, g, or t
ggccctcgcactttaagaggctgtgcaggcagacagacctccaggcccgctagnantccgngccatggaggccgcccgggactatgcaggagccctcatcaggcccctgacatttatgggatcacagactaagcgagtcctgttcaccccgctcatgcatccagctcgccctttccgggtctccaaccatgacaggagcagccggcgtggggtgatggcaagcagcctgcaggagcttcatcagcaagactctgggatgccctcgttcattcgctaccggactgggtcactctgggtgctgggagggaagatnggcaccntggttgggacacaggaagagttcttttcaggacctttgggggagacaacacgcttttcattgatctttgggaaaaagggacagaattg

SEQ ID NO: 2527 - DNA, 693 bp, Homo Sapiens
ttttttcaatctaacatttatttatttcaggtttgttttttttttggcaactataaattacattcactagtacacctggaattcttcatagtgtgttcaactaaagaataagcaaacacagcatagatcagtttaaaagaaatcatggtacttcttagagcaatttgcaaaaggggaaaaaagtcttaggctcactccttggaaataaatatcaagtaaccataaaaatattcagccatttttcagttattcggggagttcaggcatggtcccacgcagagcatcagagttcctctttgaaataacccagctttgccaatgacatctcttttctcaactgcataacctcccaaaacatctgatcaacatcctgctgtttcacgagtccctgctgaatgtatcgaatgtatgtaaaaaagttacatacagaagtgatcctgtatctgcaaaaaggagaaatataataatagttgcttgagtcccctaatttaattctgtgtttacaggacttactctggccagtgagagcacatttttttggtcctccgcattcaactgcagaagctttcacaaaccggataggttgtaatcccactggttcaatgcttagagtattgttttccacagcccccagaacagccgaagccaacccccctttttgagaaatgttaaacagggaaagaaatcttcccg

SEQ ID NO: 2528 - DNA, 1053 bp, Homo Sapiens
gggggcggaaatattgctaggtcaggctggtgtgaatggcgaggagcagacgcgggctgggctgctgtgagctgtggtctcggcatggcccccgtccgcccccgcgcctccttctcgccgtgcgaggtcagcggctgcctggtggacggtgctgtgctggtgtactgccgtgtgggccctgctctacgactctccagcttccgtgctggaccaccctgggtggctgagcatgtgctgctgtgggcatgctgggccagggacatcagcgccgagcgtggacggggccgctgcacaggcactcgtgcaacgcgcgccgctggctggagcagtactactgtgggagagctccgcttggggagcagcaagggctccatggagaacgagcctgtagcccttgaggaaactcagaagacagatcctgctatggaaccacggttcaaagtggtggattgggacaatggacctgggtggactgcgaaagcctctccttgtggcacggtgggccacttgggagagaagtaacgattgagtgggtacaccagcccgttgaccaggcccatccgcctcgttccaactcaggacctcattgaggggcctctctaagactgtctggtacaggtgtccccatcatctgggtgccccctggtgctgtatctcaaaggtggtacctactaccgaacctttgcccagggcaaacgtcagaatcttcaacgtcatttacaaccagagtacacgggtgatcagtagcccaagtccatgttcccggggctctacatgctggggagattcctctggagcctcatcgagttacttcatccaccgcttcctgtcaaattgaagccccacaggaaaggtattacctaatatgctgcatcggcaatgcatggcagcaaacgaagagaacctatcgaggatccgggtggtcatccccacggtgcagctcctgataatgggggatacaaatgggatcacgcaacccgcgaggcaaatggggcaggttggtggcggccgggcatctctaataatcactatactcctttccagaggctaata

SEQ ID NO: 2529 - DNA, 509 bp, Homo Sapiens
cacgaggtccgaaggaggggtaggcgctgcccgcgcgcagaggccgcgcccctcctggccccggcttcttggctgtcaaacagatgcagcaacgtcggctcctgccgaggagcccaaggggtcccgggatccgccgcacaggctggcactgcttgaagaggaggctactcggagactgcgccgcgcggtggattcattgccctcggagtttcaaccagttatgagtgagggattggccagaagatcggggcgcaggcaagcaggagtgctctattaggataagcaagtttgacaggaagaagctgctcttctccgaattacacagaggtgatgtgttcgtattgcacgtagacgtgtgtataacaggacctccttccccgcgccccgccaccccgacacacacaggagctgcctaaagtatccttgccttgcagattggaggctccccaaatattttgtgatctgaggatccagctcaagtgaggtgccataggacgtgttcctgagtt

SEQ ID NO: 2530 - DNA, 2157 bp, Homo Sapiens
gctcccagccaagaacctcggggccgctgcgcggtggggaggagttccccgaaacccggccgctaagcgaggcctcctcctcccgcagatccgaacggcctgggcggggtcaccccggctgggacaagaagccgccgcctgcctgcccgggcccggggagggggctggggctggggccggaggcggggtgtgagtgggtgtgtgcggggggcggaggcttgatgcaatcccgataagaaatgctcgggtgtcttgggcacctacccgtggggcccgtaaggcgctactatataaggctgccggcccggagccgccgcgccgtcagagcaggagcgctgcgtccaggatctagggccacgaccatcccaacccggcactcacagccccgcagcgcatcccggtcgccgcccagcctcccgcacccccatcgccggagctgcgccgagagccccagggaggtgccatgcggagcgggtgtgtggtggtccacgtatggatcctggccggcctctggctggccgtggccgggcgccccctcgccttctcggacgcggggccccacgtgcactacggctggggcgaccccatccgcctgcggcacctgtacacctccggcccccacgggctctccagctgcttcctgcgcatccgtgccgacggcgtcgtggactgcgcgcggggccagagcgcgcacagtttgctggagatcaaggcagtcgctctgcggaccgtggccatcaagggcgtgcacagcgtgcggtacctctgcatgggcgccgacggcaagatgcaggggctgcttcagtactcggaggaagactgtgctttcgaggaggagatccgcccagatggctacaatgtgtaccgatccgagaagcaccgcctcccggtctccctgagcagtgccaaacagcggcagctgtacaagaacagaggctttcttccactctctcatttcctgcccatgctgcccatggtcccagaggagcctgaggacctcaggggccacttggaatctgacatgttctcttcgcccctggagaccgacagcatggacccatttgggcttgtcaccggactggaggccgtgaggagtcccagctttgagaagtaactgagaccatgcccgggcctcttcactgctgccaggggctgtggtacctgcagcgtgggggacgtgcttctacaagaacagtcctgagtccacgttctgtttagctttaggaagaaacatctagaagttgtacatattcagagttttccattggcagtgccagtttctagccaatagacttgtctgatcataacattgtaagcctgtagcttgcccagctgctgcctgggcccccattctgctccctcgaggttgctggacaagctgctgcactgtctcagttctgcttgaatacctccatcgatggggaactcacttcctttggaaaaattcttatgtcaagctgaaattctctaattttttctcatcacttccccaggagcagccagaagacaggcagtagttttaatttcaggaacaggtgatccactctgtaaaacagcaggtaaatttcactcaaccccatgtgggaattgatctatatctctacttccagggaccatttgcccttcccaaatccctccaggccagaactgactggagcaggcatggcccaccaggcttcaggagtaggggaagcctggagccccactccagccctgggacaacttgagaattccccctgaggccagttctgtcatggatgctgtcctgagaataacttgctgtcccggtgtcacctgcttccatctcccagcccaccagccctctgcccacctcacatgcctccccatggattggggcctcccaggccccccaccttatgtcaacctgcacttcttgttcaaaaatcaggaaaagaaaagatttgaagaccccaagtcttgtcaataacttgctgtgtggaagcagcgggggaagacctagaaccctttccccagcacttggttttccaacatgatatttatgagtaatttattttgatatgtacatctcttattttcttacattatttatgcccccaaattatatttatgtatgtaagtgaggtttgttttgtatattaaaatggagtttgtttgtaaaaaaaaaaaaaaaaaaaa

SEQ ID NO: 2531 - DNA, 3168 bp, Homo Sapiens
gaattcggcacgagcgggagcccaggacgccgcttccccgcccatccccgctccccgaggccggccgcctggtcatggcgcagcgggcccggcttcccagcctgacgtttctcttcagcaacgggtagcagaattggaaaaaattaatgcagaatttttacgtgcacaacagcagcttgaacaagaatttaatcaaaagagagcaaaatttaaggagttatatttggctaaagaggaggatctgaagaggcaaaatgcagtattacaagctgcacaagatgatttgggacaccttcgaacccagctgtgggaagctcaagcagagatggagaatattaaggcgattgccacagtctctgagaacaccaagcaagaagctatagatgaagtgaaaagacagtggagagaagaagttgcttcacttcaggctgttatgaaagaaacagttcgtgactatgagcaccagttccaccttaggctggagcaggagcgaacacagtgggcacagtatagagaatccgcagagagggaaatagctgatttaagaagaaggctgtctgaaggtcaagaggaggaaaatttagaaaatgaaatgaaaaaggcccaagaggatgctgagaaacttcggtccgttgtgatgccaatggaaaaggaaattgcagctttgaaggataaactgacagaggctgaagacaaaattaaagagctggaggcctcaaaggttaaagaactgaatcattatctggaagctgagaaatcttgtaggactgatctagagatgtatgtagctgttttgaatactcagaaatctgttctacaggaagatgctgagaaactgcggaaagaattgcatgaagtttgccatctcttggagcaagagcgacaacaacacaaccagttaaaacatacgtggcagaaggccaatgaccagtttctggaatctcagcgtttactgatgagagacatgcagcgaatggagattgtgctaacttcagaacagctccgacaagttgaagaactgaagaagaaagatcaggaggatgatgaacaacaaagactcaataagagaaaggatcacaaaaaagcagatgttgaggaagaaataaaaataccagtagtgtgtgctttaactcaagaagaatcttcagcccagttatcaaatgaagaggagcatttagacagcacccgtggctcagttcattccttagatgcaggcttgctgttgccatctggagatcctttcagtaaatcggacaatgacatgtttaaagatggactcaggagagcacagtctacagacagcttgggaacctcgggctcattgcaatccaaagctttaggctataactacaaagcaaaatctgctggaaacctggacgagtcagattttggaccactggtaggagcagattcagtgtctgagaactttgatactgcatcccttgggtcactccagatgccaagtgggtttatgttaaccaaagatcaggaaagagcaatcaaggcgatgacaccagaacaagaagagacagcgtccctcctctccagcgttacccagggcatggagagtgcctatgtgtcccctagtggttatcgtttagttagtgaaacagaatggaatctcttgcagaaagaggtacataatgctggaaataaacttggtagacgttgtgatatgtgttccaattacgaaaaacagttacaaggaattcagattcaggaggctgaaacgagagaccaggtgaaaaaactacagctgatgctaaggcaagctaatgaccagttagagaagacaatgaaagataagcaggagctggaagacttcataaagcaaagcagcgaagattcgagtcaccagatctctgcactcgtcctaagagcccaggcctccgagatcttacttgaagagttacagcaggggctttcccaggcaaagagggatgttcaggaacagatggcggtgctgatgcagtcacgggaacaggtttcagaagagctggtgaggttacagaaagataatgacagtctccagggaaagcacagcctgcatgtgtcattacagcaagcagaagacttcatcctcccagacactacagaggcactgcgggagttggtattaaaataccgtgaggacatcattaatgtgcggacagcagcagaccacgtagaagaaaagctgaaggctgagatacttttcctaaaagagcagatccaagcagaacagtgtttaaaagaaaatcttgaagaaactctgcaactagaaatagaaaactgcaaggaggaaatagcttctatttctagcctaaaagctgaattagaaagaataaaagtggaaaaaggacagttggagtccacattaagagagaagtctcaacagcttgagagtcttcaggaaataaagatcagtttggaagagcagttaaagaaagagactgctgctaaggctaccgttgaacagctaatgtttgaagagaagaacaaagctcagagattacagacagaattagatgtcagtgagcaagtccagagagattttgtaaagctttcacagacccttcaggtgcagttagagcggatccggcaagctgactccttggagagaatccgggcaattctgaatgatactaaactgacagacattaaccagcttcctgagacatgacaccctcatggcaggattctagcctgcactttgggtttttaactcatctttagagcaacagtaattattatttaactcttaactgaagaaagagaagtcacaacaaaaggaagactggagaaatgcttacttctagagggagaagactgtgcggcacaggaaacagcaaacagcggggtgatctgcagcccagagaccttcaaatgcgaacactataaactccaggcttgattccaacaggcgtgggatcagatttggtgatggaaaaagcgctgtttccttgcctgctttctccaagacagattttcggaacacatttccctaccctaaagcgacatcccagtagtgtttggaattttctgttcatagatattggaagagagaatttgctttatctgttgtctagagctcatcagtaacagtattcagttagcagacagaagtgtagtatgctgtatgaatattttatattaaaatatgaaggtttgagagcaggcagcctcgag

SEQ ID NO: 2532 - DNA, 2041 bp, Homo Sapiens
gaattcccgttgggcggggcagggagttcgtagccgcctctgggtaactcgactcgggcggccaaacctccggagccggggacggaaggcgggcccgcagcagatcctggatccggaatctcccgggcaggagcggaatctgtcccgaaccgggtctgtgagggactcgcgaacttggattaggaaatcccggagcccggatcgacaaatcccggaacccggaataagatcgccaagtcccggatcgcggagcacagagcacggagtggactcgacgcggagcccggagtccggatcgcggcaccgcgggacgggacggagcgatgtcgggccgaggcgcgggcgggttccccgtgcccccgctaagccctggcggcggcgccgtggctgcggccctgggagcgccgcctccccccgcgggacccggcatgctgcccggaccggcgctccggggaccgggtccggcgcagtaccagcgacctggcatgtcaccagggaaccggatgcccatggctcggcttgcaggtgggaccccctgctggctccccatttggtgcagcagctccgcttcgacctggcatcccacccaccatgatggatccattccgaaaacgcctgcttgtgccccagcgcagcctcccatgcctgcccagcgccgggggttaaagaggaggaagatggcagataaggttctacctcagcgaatccgggagcttgttccagagtctcaggcgtacatggatctcttggcttttgagcggaagctggaccagaccattgctcgcaagcggatggagatccaggaggccatcaaaaagcctctgacacaaaagcgaaagcttcggatctacatttccaatacgttcagtcccagcaaggcggaaggcgatagtgcaggaactgcagggacccctgggggaaccccagcaggggacaaggtggcttcctgggaactccgagtggaaggaaaactgctggatgatcctagcaaacagaagaggaagttttcttcattctttaagagcctcgtcattgagctggacaaggagctgtacgggcctgacggtcacctggtggagtggtattggatgcccaccacccaggagacagatggcttccaagtaaaacggcctggagacctcaacgtcaagtgcaccctcctgctcatgctggatcatcagcctccccagtacaaattggacccccgattggcaaggctgctgggagtgcacacgcagacgagggccgccatcatgcaggccctgtggctttacatcaagcacaaccagctgcaggatgggcacgagcgggagtacatcaactgcaaccgttacttccgccagatcttcagttgtggccgactccgtttctccgagattcccatgaagctggcagggttgctgcagcatccagaccccattgtcatcaaccatgtcattagtgtcgaccctaacgaccagaagaagacagcctgttacgacatcgatgtggaggtggacgacccactgaaggcccaaatgagcaattttctggcctctaccaccaatcagcaggagatcgcctcccttgatgtcaagatccatgagaccattgagtccatcaaccagctgaagacccagagagatttcatgctcagttttagcaccgacccccaggacttcatccaggaatggctccgttcccagcgccgagaccttaagatcatcactgatgtgactggaaatcctgaggaggagagacgagctgctttctaccaccagccctgggcccaggaagcagtaggcaggcacatctttgccaaggtgcagcagcgaaggcaggaactggaacaggtgctgggaattcgcctgacctaactgctcagggatctttcttcccagccctggagcctggagggagaccaccctctgggtccttgctggggccgcagacacgtaggctggggtgaggagtgtctgctgtcaccctctactctccagctttagttttataaatgtagtgataggattccttgttgcttggtccccaaagccttatactt

SEQ ID NO: 2533 - DNA, 584 bp, Homo Sapiens
cacctgcaccccgcccgggcatagcaccatgcctgcttgtcgcctaggcccgctagccgccgccctcctcctcagcctgctgctgttcggcttcaccctagtctcaggcacaggagcagagaagactggcgtgtgccccgagctccaggctgaccagaactgcacgcaagagtgcgtctcggacagcgaatgcgccgacaacctcaagtgctgcagcgcgggctgtgccaccttctgccttctctgcccaaatgataaggagggttcctgcccccaggtgaacattaactttccccagctcggcctctgtcgggaccagtgccaggtggacagccagtgtcctggccagatgaaatgctgccgcaatggctgtgggaaggtgtcctgtgtcactcccaatttctgaggtccagccaccaccaggctgagcagtgaggagagaaagtttctgcctggccctgcatctggttccagcccacctgccctcccctttttcgggactctgtattccctcttgggctgaccacagcttctccctttcccaaccaataaagtaaccactttcagcaaaaaaaaaaaaaaaa

SEQ ID NO: 2534 - DNA, 535 bp, Homo Sapiens
gctcgacatgtcctttgacaagtttaaaaatctgtctgctaaaatctatcaaatacattaaggaaaagtcccacttggcacatctcccacaccagatgttaattattcatactgcatgactgaggattttggaggcagagagagattcatctgcaatatttggaacaccaatggaggtctacgtcaacacagaatttatacagcagctggtgctagtcagagctaatgacagaatttcagtttaataaaaagacccccaactgagcacaccatcttgaaaaaagtatacttatcaaacagctttcaatcagttcaagagagacaccttaattggggagaggaagaattgcagagtagtttgtaatcatgccaattccagatcaataactgcatgtctgttctttggtagaaatagcttttgctttatattaagtaatcacatatatattctctctatttggataagggaaccttcgctttatttgacaatgtataatgatatactcttctaattcacctctgtgtcttcacaata

SEQ ID NO: 2535 - DNA, 336 bp, Homo Sapiens
aatcttcacattgttttgatcccaaaatgtttgtgttgtccttactcaaaactaggaaaaacaattatgtggtaagaggctcagagccacttacttaaatctcaactagatttatttgtgagaacatctgttttctgatatttagacacttcctcttccattgctgtttcctatgactcatgcacagttatttgttcaggtttcatggaatttcccaagtgtatttacctttgtttggtttttaaaatgtaaattatattgccccaataaatgagtatgtgtgtcagggggactgtggctgggtcattgcatgtggaaggggagttacagaagaga

SEQ ID NO: 2536 - DNA, 4085 bp, Homo Sapiens
ccgggcctcgagccgaggcagcagtgggaacgactcatcctttttccagccctggggcgtggctggggtcggggtcggggtcggggccggtgggggccccgcccccgtctcctggcctgcccccttcatgggccgcgatgatggcggccctgtacccgagcacggacctctcgggcgcctcctcctcctccctgccttcctctccatcctcttcctcgccgaacgaggtgatggcgctgaaggatgtgcgggaggtgaaggaggagaatacgctgaatgagaagcttttcttgctggcgtgcgacaagggtgactattatatggttaaaaagattttggaggaaaacagttcaggtgacttgaacataaattgcgtagatgtgcttgggagaaatgctgttaccataactattgaaaacgaaaacttggatatactgcagcttcttttggactacggttgtcagaaactaatggaacgaattcagaatcctgagtattcaacaactatggatgttgcacctgtcattttagctgctcatcgtaacaactatgaaattcttacaatgctcttaaaacaggatgtatctctacccaagccccatgcagttggctgtgaatgcacattgtgttctgcaaaaaacaaaaaggatagcctccggcattccaggtttcgtcttgatatatatcgatgtttggccagtccagctctaataatgttaacagaggaggatccaattctgagagcatttgaacttagtgctgatttaaaagaactaagtcttgtggaggtggaattcaggaatgattatgaggaactagcccggcaatgtaaaatgtttgctaaggatttacttgcacaagcccggaattctcgtgaattggaagttattctaaaccatacgtctagtgacgagcctcttgacaaacggggattattagaagaaagaatgaatttaagtcgtctaaaacttgctatcaaatataaccagaaagagtttgtctcccagtctaactgccagcagttcctgaacactgtttggtttggacagatgtcrggttaccgacgcaagcccacctgtaagaagataatgactgttttgacagtaggcatcttttggccagttttgtcactttgttatttgatagctcccaaatctcagtttggcagaatcattcacacaccttttatgaaatttatcattcatggagcatcatatttcacatttctgctgttgcttaatctatactctcttgtctacaatgaggataagaaaaacacaatggggccagcccttgaaagaatagactatcttcttattctgtggattattgggatgatttggtcagacattaaaagactctggtatgaagggttggaagactttttagaagaatctcgtaatcaactcagttttgtcatgaattctctttatttggcaacctttgccctcaaagtggttgctcacaacaagtttcatgattttgctgatcggaaggattgggatgcattccatcctacactggtggcagaagggctttttgcatttgcaaatgttctaagttatcttcgtctcttttttatgtatacaaccagctctatcttgggtccattacagatttcaatgggacagatgttacaagattttggaaaatttcttgggatgtttcttcttgttttgttttctttcacaattggactgacacaactgtatgataaaggatatacttcaaaggagcagaaggactgtgtaggcatcttctgtgaacagcaaagcaatgataccttccattcgttcattggcacctgctttgctttgttctggtatattttctccttagcgcatgtggcaatctttgtcacaagatttagctatggagaagaactgcagtcctttgtgggagctgtcattgttggtacatacaatgtcgtggttgtgattgtgcttaccaaactgctggtggcaatgcttcataaaagctttcagttgatagcaaatcatgaagacaaagaatggaagtttgctcgagcaaaattatggcttagctactttgatgacaaatgtacgttacctccacctttcaacatcattccctcaccaaagactatctgctatatgattagtagcctcagtaagtggatttgctctcatacatcaaaaggcaaggtcaaacggcaaaacagtttaaaggaatggagaaatttgaaacagaagagagatgaaaactatcaaaaagtgatgtgctgcctagtgcatcgttacttgacttccatgagacagaagatgcaaagtacagatcaggcaactgtggaaaatctaaacgaactgcgccaagatctgtcaaaattccgaaatgaaataagggatttacttggctttcggacttctaaatatgctatgttttatccaagaaattaaccattttctaaatcatggagcgaataattttcaataacagatccaaaagactatattgcataacttgcaatgaaattaatgagatatatattgaaataaagaattatgtaaaagccattctttaaaatatttatagcataaatatatgttatgtaaagtgtgtatatagaattagttttttaaaccttctgttagtggctttttgcagaagcaaaacagattaagtagatagattttgttagcatgctgcttggttttcttacttagtgctttaaaatgtttttttttatgtttaagaggggcagttataaatggacacattgcccagaatgttttgtaaaatgaagaccagcaaatgtaggctgatctccttcacaggatacacttgaaatatagaagttatgttttaaatatctctgttttaggagttcacatatagttcagcatttattgtttaggagtataattttattttatctaaaataatagtctattttttcttttgtattttgttataatcttaagcaacaaagaaaaaaccctaatatttgaatctatttatgtctttcaatttaaattcacttcagtttttgttattgtaatatatttacttttacatggttataatcactttatatttttaatgtttttttcacttaatattttatatatacatttccatgtattgatgtagttagtccacatttaaatttttatagaattatatagtttttgaaaaatacagtcagtagatgttttattttttagctattcagttatgtttataagtttgcatagctacttctcgacatttggtttgttttaatttttttgtatcataatagtcctatttttttttcaagttggagtgaatgtttttagttttaagatagataggagacacttttttatcacatgtagtcacaacctgttttgtttttgtaaaacataggaagtctctttaatgcaatgatttgttttatatttggactaaggttcttgagcttatctcccaaggtactttccataatttaacacagcttctataaaagtgacttcatgcttacttgtggatcattcttgctgcttaagatgaaaagcattggttttttaaaattagagaataaaatatgtatttaaatttttggtgtgttcacataaagggatgtagctaaaatgttttcataggctattatatattctcgcagcatttccagttaagaggatattaggtatataattctcttcttaaccgaatgtcagatggtcttacgccacagggtgcaggtaacccttggtctgtaagcaccaccgatccagggatcattgtctaaataggttactattgtttgtttcatcttgcttttgcatttttattttttaatttccaaattttaagtgttccctctttggggcaaattcttataaaaatgtttattgtaaagttatatattttgtctacgatgggattatgcacttcccaattgggattttacatctggatttttagtcattctaaaaaacacctaattattaaaacatttatagagtgcctactgtatgcatgagttgagttgcttctgaggtacattttgaatgacagcatattgtaagaaaaaaaaaggtgaataaaatttgacattagattataaaaaaaaaaaggaattc

SEQ ID NO: 2537 - DNA, 1705 bp, Homo Sapiens
gggcggcggcgcgcgggtgcgatcgcggagctgtgaggcgcaggcagggctctggggcacctagagaccggggccggagacgtggcagccgccctgcccgccagaaagtttcctagaagtttgctgggcgcgggcgcacgactgactggctggaccatgaacgtgttccgaatcctcggcgacctgagccacctcctggccatgatcttgctgctggggaagatctggaggtccaagtgctgcaagggcatctctgggaagagccagatcctgtttgctctcgtcttcaccaccaggtacctggacctgttcaccaacttcatctccatctacaacacagtaatgaaggtggtttttctcctctgtgcctatgttacagtgtacatgatatatgggaaattccgtaaaacttttgacagtgagaatgacacattccgcctggagtttcttctggtcccagtcattggcctttccttccttgaaaactacagtttcactctgctggagatcctctggactttctctatctatctggaatcagtggctatcctgccccagctcttcatgatcagcaagactggagaggctgagaccataactactcactacctgttctttctgggtctgtaccgggcactctacctggctaactggatcaggcggtaccagactgagaatttctatgaccaaattgcagtcgtgtctggagtagtacaaaccatcttctactgtgacttcttctacttgtatgtgaccaaagtccttaagggaaagaagttaagtcttccaatgccaatctgaggaccttcagagacagtctacgccttaacaagcacatgaaggaaactattttgaatgttctctttggcaacttatccataatttgggatcaaatgttaaaaccagaaaagtgtttagtgtggatttcagcaaaacctgatcatcccacccagaagaccttctcatcaatagatcgcccttaaagacccattgtaaggtcataaaaaacctcggccacctgcacaaagatggtgcctcactgcaacaagaaaccttaaggtgtcttaccgacgaaataaaaaacataaatgattgttctccaaggcctgagggcaagactcatgatgagcaagtcaaccccaatctggaacaatgtccctcctcttagaatgtcccaactaaagaccagttaaaatattagggtacgttcttgtgaatttccactttccaggtagatgaccaaatttaggtggtcaagatataaaggtgtcagctagttttaagtgtgaaacttatttcactttcacactgccttcaggccagaagcaaaccaaatttaccaggtttggctggaggagttttgtgactcatcttttactggtttgaattttttcaaaccagtggctgatacctgccttgtacttagtaccttaataccaataacctaatggtacttaggcgagtaccatttgcacaatcactgttttacttatgagcagatacagatatatccaaacccttacctactaggtatcctgctagggttttcaattccaattcttgtattaagttttttcctttcagttttaggtgcgaaagtaatcagtcaatccaatatcccccatctttgtcttgaaacaaaaactgttttaagacgtctacgttgaattattcagagaattaagcaataaaagctcacacctta

SEQ ID NO: 2538 - DNA, 261 bp, Homo Sapiens
  misc_feature (255)..(255): n is a, c, g, or t
cacaagccttctgactgttggagaacctgacgcgcggattctaactagaactggcactctcttcgggtgttagataattaactcaaaggacagcgaaggccttttatgatgtctttcaagctggccttatgacagcttttcttaacgtttctgcggacattttggcggacttgtgtcggcctagctcagtgatcagtttcgttaaagaatttgagtatccgaacattaaaggattggacctaaattcctaagcangggagg

SEQ ID NO: 2539 - DNA, 370 bp, Homo Sapiens
aggaaggagagacaaacggcccgcccgccggctccacaaacagcccctcgctggtcctccagtcttccagcgagaagaaagaaagagcgtccccggaagccgccgaaactctggggtagagtggcacgcgctttttgcttttccgcgtcttcttcggtggcgatccgcgtcctagaaagggcggtgggctccacctcggcctagaaggccagcgggagccgtaggaagccgtcgcgggaagctcagccgaattggagttggagcccccggattgcgctgaccctgagctctcagactccccagtacaatgactcaagcagaaattaagctctgtcttttgttgctgcaagagcatttttgaagagattgt

SEQ ID NO: 2540 - DNA, 2311 bp, Homo Sapiens
gatttaatcctatgacaaactaagttggttctgtcttcacctgttttggtgaggttgtgtaagagttggtgtttgctcaggaagagatttaagcatgcttgcttacccagactcagagaagtctccctgttctgtcctagctatgttcctgtgttgtgtgcattcgtcttttccagagcaaaccgcccagagtagaagatggattggggcacgctgcagacgatcctggggggtgtgaacaaacactccaccagcattggaaagatctggctcaccgtcctcttcatttttcgcattatgatcctcgttgtggctgcaaaggaggtgtggggagatgagcaggccgactttgtctgcaacaccctgcagccaggctgcaagaacgtgtgctacgatcactacttccccatctcccacatccggctatgggccctgcagctgatcttcgtgtccagcccagcgctcctagtggccatgcacgtggcctaccggagacatgagaagaagaggaagttcatcaagggggagataaagagtgaatttaaggacatcgaggagatcaaaacccagaaggtccgcatcgaaggctccctgtggtggacctacacaagcagcatcttcttccgggtcatcttcgaagccgccttcatgtacgtcttctatgtcatgtacgacggcttctccatgcagcggctggtgaagtgcaacgcctggccttgtcccaacactgtggactgctttgtgtcccggcccacggagaagactgtcttcacagtgttcatgattgcagtgtctggaatttgcatcctgctgaatgtcactgaattgtgttatttgctaattagatattgttctgggaagtcaaaaaagccagtttaacgcattgcccagttgttagattaagaaatagacagcatgagagggatgaggcaacccgtgctcagctgtcaaggctcagtcgccagcatttcccaacacaaagattctgaccttaaatgcaaccatttgaaacccctgtaggcctcaggtgaaactccagatgccacaatgagctctgctcccctaaagcctcaaaacaaaggcctaattctatgcctgtcttaattttctttcacttaagttagttccactgagaccccaggctgttaggggttattggtgtaaggtactttcatattttaaacagaggatatcggcatttgtttctttctctgaggacaagagaaaaaagccaggttccacagaggacacagagaaggtttgggtgtcctcctggggttctttttgccaactttccccacgttaaaggtgaacattggttctttcatttgctttggaagttttaatctctaacagtggacaaagttaccagtgccttaaactctgttacactttttggaagtgaaaactttgtagtatgataggttattttgatgtaaagatgttctggataccattatatgttccccctgtttcagaggctcagattgtaatatgtaaatggtatgtcattcgctactatgatttaatttgaaatatggtcttttggttatgaatactttgcagcacagctgagagaggctgtctgttgtattcattgtggtcatagcacctaacaacattgtagcctcaatcgagtgagacagactagaagttcctagttggcttatgatagcaaatggcctcatgtcaaatattagatgtaattttgtgtaagaaatacagactggatgtaccaccaactactacctgtaatgacaggcctgtccaacacatctcccttttccatgctgtggtagccagcatcggaaagaacgctgatttaaagaggtgagcttgggaattttattgacacagtaccatttaatggggagacaaaaatgggggccaggggagggagaagtttctgtcgttaaaaacgagtttggaaagactggactctaaattctgttgattaaagatgagctttgtctaccttcaaaagtttgtttggcttacccccttcagcctccaattttttaagtgaaaatataactaataacatgtgaaaagaatagaagctaaggtttagataaatattgagcagatctataggaagattgaacctgaatattgccattatgcttgacatggtttccaaaaaatggtactccacatacttcagtgagggtaagtattttcctgttgtcaagaatagcattgtaaaagcattttgtaataataaagaatagctttaatgatatgcttgtaactaaaataattttgtaatgtatcaaatacatttaaaacattaaaatataatctctataat

SEQ ID NO: 2541 - DNA, 215 bp, Homo Sapiens
  misc_feature (6)..(6): n is a, c, g, or t
  misc_feature (60)..(60): n is a, c, g, or t
  misc_feature (80)..(80): n is a, c, g, or t
  misc_feature (133)..(133): n is a, c, g, or t
  misc_feature (162)..(162): n is a, c, g, or t
aaagcnagcccggcagctcaatgacaaatcggtggaggacggctggggtccggccccggnaggggcggggcgcgtttaanagctgcgggccgggtgcggacggcggaggcggcgggactggtccctgctcttnagtgggtcatctgtgtgtcacagcctcanaagaccagcgagatggctgccaacaagagtaagggccagagctccttggccct

SEQ ID NO: 2542 - DNA, 400 bp, Homo Sapiens
gaaaaagtaaagagataataacaaaaacaagagttgagtaggaaggacgtattgaaaaatggaggaatctgataacaagtagtatgaagtcagatttgtaagagtctgagaagaaataagtagagaaaacagaaaatggtgtgaggtttacagtgttaaccacaaagtgaaagcaggcaagaacgtggtgggtacctggctgggtaaaggtcactggcaaagctttggtgtccatagtgactcaaaacaaacaaacaaacaaacaaaaaacaaacaagaaaacaggtatgataatctaccttaggctaaaaaaaaaaggccaaatttcagcctgaaagggcccacagtatgcccaataaagagaagatgctgacatctattaatacatctactatggtga

SEQ ID NO: 2543 - DNA, 448 bp, Homo Sapiens
gcggccgccaacttcccaaacccatccctccccaccttggagtctaggttgagttggggaaaaagcaccatgggtttgggaagatggtctggtccatgcagagagtggtctggcccttgagtgcagggtaggaaaatgtggggagccacaagctattgttggcaaaaatggctgttttgactatgcaatctcagcacgtggcacccaagccccaggccgatgccccagacagagccagctgccttgcctggagcagaggccacccttttgcttctgcaatgtcttattgtattgagagaagcaaggagggctgaagaacgacaatgttctttaagccttcagatgttggggagatcgtcagcatcagctcctcctggccggcaaggtgctgctcatcagctgccaagactccagtcctggctccagggcctgttgaggatctccagtc

SEQ ID NO: 2544 - DNA, 570 bp, Homo Sapiens
ccggattctgcccggatggggatctggcatgggggggtggggggttgatttgggaagcagagcacagcagcccaaatttgcttgtaatgtcggcggctacagaggaaaggccaagaatggacagattaataaagggccatctacaagccacgaataaggccatcaccagaagccaaccccgccagtccttgatctaggacttccagacttcaaaacttttctagcctgctggcctgccttcactgtcctgggggagacttggagagaccaggtggactggagtagactgttgagagacgctggtctggtgaagatgtccaggaaaccacgagcctccagcccattgtccaacaaccacccaccaacaccaaagaggcgaggaagtggaaggttcccaagacaacccggaagggaaaagggacccatcaaggaagttccaggaacaaaaggctctccctaaaagaccgccgcttcaaaaaaacctgaggaatggacgtgggccaacactatccagccactctgaccagccgaacgaggaactcaatcacaatgagccatagcgggaccaca

SEQ ID NO: 2545 - DNA, 273 bp, Homo Sapiens
  misc_feature (67)..(67): n is a, c, g, or t
  misc_feature (101)..(101): n is a, c, g, or t
  misc_feature (118)..(118): n is a, c, g, or t
  misc_feature (174)..(174): n is a, c, g, or t
  misc_feature (217)..(217): n is a, c, g, or t
gtcaggccacaatataaccagataccagacacacgagatgttttggagggagggtggtggagccaanattgcagctccttattgaggaaaacagtcctcanagatccagagtcatttntcctgtgttcagcttgaaaaccttgggcaacttctggagatttcaacgtctcacanagtgcggaaacatgactggcgcagcatcctttccggaattggngatgtccttcctgtaagggttgattttccatctcatcaaccaaatcgggaaagccg

SEQ ID NO: 2546 - DNA, 369 bp, Homo Sapiens
tcaccgtcttaatacaagattccctcatctctaacttgtaacactgcagtaatctactccctggttatctgtgcttccacttttaccttcctgcccccatctccaccccaacccaaaccaagcaaaacagctttctacacagaaaccagcttaatcttttaaaaatataaatcagaacactttactttcttgcttagaacctttcaatggctttccattccatgcagaataaaatccagtcttttttcttggactaaagccttatacgatctggccctgccttttctgaccttgtcttttaccacccttcccatctcaccaggtttctggtccctaagaactcacaatctgtaaatgtagtagcataag

SEQ ID NO: 2547 - DNA, 339 bp, Homo Sapiens
gcgtcgaccaagccagtagtaatagttattgttacttgctctgttcagcacaactgtagttcacttgaacttcactgtcattccctacgctcctctcttactgagaagcatgggtgggattcagggctgtgggacaagctacagcctactctggagcactcacccccatgactcagtccagcctgtctcttgggaagtttattgcaatgtgcagacggatgaatttctgcttttcatgccaactctctgaggtatgtattctatcttgagtatgtacaagatgataccttttggctgggcacagtggctcgtgcctgtaatcccagcactttgggagac

SEQ ID NO: 2548 - DNA, 380 bp, Homo Sapiens
gcctactactactaatttcccccccggtcgactttttttttttttttaatgagcaaaactagggtatctaggggctgtacatgtggtagataaactatgaagaaacactataaaagtcaggatagtgtttgcttttgtggaaggaagttgtaattaggacaaaacacctggatggacttctgggatggctggaaagaactacttctcaacttgggcggggttgcacaagagttaagcctataagagttcattaagctatacatttattttatgtggttttcaatatctgtgttttacaataaaaagatttttcttaaaaagttatagaatccccattgcctacaaaataaaacccaagatactaagcatagaataaaggc

SEQ ID NO: 2549 - DNA, 318 bp, Homo Sapiens
atctcaggtcttcagggtcttccatctggaactatataaagttcagaaaacatgtctcgagatatgactccaggaccactatattttctccagaaggtcgcttataccaagttgaatatgccatggaagctattggacatgcaggcacctgtttgggaattttagcaaatgatggtgttttgcttgcagcagagagacgcaacatccacaagcttcttgatgaagtctttttttctgaaaaaatttataaactcaatgaggacatggcttgcagtgtggcaggcataactttctgatgctaatgttctgactaatgac

SEQ ID NO: 2550 - DNA, 559 bp, Homo Sapiens
cacgagggttaccattctgatgttggagcggcttcctctagccccaaaggcctgctcagaataaggacctgcacacaagttgtgtggccctgggcaaaacctggagctgcttgatgttctgagcctgctttcaaatctgcaaaatagtgctctctgccttactccctcgcaggctcgtgtgaaggtcaaaagagaactcctgggaaagagcttagtcagctgaaaggctctaaacaaatgatagttattacatcgtcctctgtctccccatgcaagagaccagaacaaaacaatatacaaaagagagagaaaatcccacacctcttggtaactggaaaggctgaggccatgggtgagagcacctcccatttccctgggaaaggagaataagtaaaacttgaattccttcaattagagactcatctaagaatcctttctatcttcccactctgttttgaagtaggacagggggcccagcatcacagacgacaaggttcttaccttgtagttctggtctcatttgtttctgtatttatcaagcctggtacataaacacagt

SEQ ID NO: 2551 - DNA, 668 bp, Homo Sapiens
  misc_feature (57)..(57): n is a, c, g, or t
gttgttcactggctgtccggggctccgcgcgcgtcgccggcccagctctgtcgctgnaggggggatctgaagccggccgcaggtcaaagagtaaaatgaagtacattctggttactggtggtgttatatcaggaattggaaaaggaatcatgccagcagtgtgggcacaatactcaagtcatgtggtttacatgtaacttcagtgaaaatgacccctacattaacattgatgcaggaacattctctccttatgagcatggtgaggtttttgtgctggatgatggtggggaagtagaccttgacctgggtaactatgagcggttccttgacatccgcctcaccaaggacaataatctgaccactggaaagatataccagtatgtcattaacaaggaaccggaaaggagattacttggggaaaactgtccaagttgtccctcatatcacagatgcaatccaggagtgggtgatgagacaggcgttaatacctgtagatgaagatggctggaacctcaagtgtgtgttattgagcttggtggaaccgtgggggacatagaaagcatgccctttattgagggcttccgtcagttccaacttcaaggtcaaaagagagacttttgtaacatccagtcagtctagttcccaagcaagtccacgggggaccgaag

SEQ ID NO: 2552 - DNA, 543 bp, Homo Sapiens
ttgtgacgtctgtggagcggcggcggcggcggcggatcccgagcctggtccggcccggccttcccagtgcgctcggcccggcccgcgcaggcggcgagtcctccgagccccgggcccggacccctcgcgccggtccctgccccgcgcggcctcggagcgcgcgcggccccgccccgccccggcctcggcccgccgggcccgcagtgtgagagcgcctgctcgctgtgcccccgggttatgacgacccccaataaaggaaacaaggccttgaaggtgaagcgggagccgggtgagaatggcaccagcctgacggatgaggagctggtgaccatgtcggtgcgggagctgaaccagcacctgcggggcctgtccaaggaggagatcgtccagctgaagcagcgccggcgcacgctcaagaaccgcggctacgctgccagctgccgcgtgaagcgggtgacgcagaaggaggagctggagaagcagaaggcggagctgcagcaggaggtggagaagctggcctcagagaacgccagcatgaagctg

SEQ ID NO: 2553 - DNA, 1410 bp, Homo Sapiens
cggaattagggagatagttggtattaggattaggattgttgtgaagtatagtacggatgctacttgtgcaatgatggtaaaagggtagcttactggttgtcctccgattcaggttagaatgaggaggtctgcggcttggagctcctggggcctaacaaaaagaaacctgccatgctgctcttcctcctctctgcactggtcctactcacacagcccctgggctacctggaagcagaaatgaagacctactcccacagaacaacgcccagtgcttgcaccctggtcatgtgtagctcagtggagagtggcctgcctggtcgcgatggacgggatgggagagagggccctcggggcgagaagggggacccaggtttgccaggagctgcagggcaagcagggatgcctggacaagctggcccagttgggcccaaaggggacaatggctctgttggagaacctggaccaaagggagacactgggccaagtggacctccaggacctcccggtgtgcctggtccagctggaagagaaggtcccctggggaagcaggggaacataggacctcagggcaagccaggcccaaaaggagaagctgggcccaaaggagaagtaggtgccccaggcatgcagggctcggcaggggcaagaggcctcgcaggccctaagggagagcgaggtgtccctggtgagcgtggagtccctggaaacgcaggggcagcagggtctgctggagccatgggtccccagggaagtccaggtgccaggggacccccgggattgaagggggacaaaggcattcctggagacaaaggagcaaagggagaaagtgggcttccagatgttgcttctctgaggcagcaggttgaggccttacagggacaagtacagcacctccaggctgctttctctcagtataagaaagttgagctcttcccaaatggccaaagtgtcggggagaagattttcaagacagcaggctttgtaaaaccatttacggaggcacagctgctgtgcacacaggctggtggacagttggcctctccacgctctgccgctgagaatgccgccttgcaacagctggtcgtagctaagaacgaggctgctttcctgagcatgactgattccaagacagagggcaagttcacctaccccacaggagagtccctggtctattccaactgggccccaggggagcccaacgatgatggcgggtcagaggactgtgtggagatcttcaccaatggcaagtggaatgacagggcttgtggagaaaagcgtcttgtggtctgcgagttctgagccaactggggtgggtggggcagtgcttggcccaggagtttggccagaagtcaaggcttagaccctcatgctgccaatatcctaataaaaaggtgaccatcaaaaaaaaaa

SEQ ID NO: 2554 - DNA, 2933 bp, Homo Sapiens
acccagcacccagagagcagacgaatccacgggctctgtgtgggagtgagggaggccttcccggctttcacatccaggtgcacctgagccccgatcccccatgagtctgtctcaggaagtaaatggcaaaagcgctaagtagatagccccagaggaggaggagaattctgaattctgtttatagctctgctcctattttgttttctaacctcagaaaactgatttatccttgggaagggtcagtttcttcattaggacaatgaagaaaaatccagctgtcccttccaaggggaggtatcatgagcagcatcaaggtaagcaagggaacctggtttggaatcctggttgacaccggctttcactttaagaagtcgcaagagactgccgcaagagaggaagccacagaccaggttggaccctgagcctggagtactgccttttctcttctttgcctgctaaactccttgcttgtcaagattcagcatagatgacaccttctctgggaaggcttcctgagtctcctgcagtgagcccctaggctcccctagcccttggctcttatgtcttatctctgagaaatctgagatctgcacttttgttagaagtccgttttaaagacaatcttttaaagtgtacaaatagaaaccttatcttattgtattgcaggcctatctcctcccccggtgtgtatcaatgctcaggctgggcctttgtctgctggcttgtggagggaggcaggacaagccagtgaccacattcctgcactctgggctgcctcctgtggggcccgtgaggaagcggcagccttccctgccgcgtgcagggcctgggttgtgtgggtggctctcccgagtctcctccagccctttttgggtctgattctctgaccctcctctctctccttgctcaccacttggcactccactccttatccttttgctgcattaagtttggaaagagattttggagaaaatatagcccatcaacgaatttctcctcctcccagggcctgtctaggcgtgtgccatgcccaccctcttcctttccagcgctggccacatcctccctgcaccttcagtgcctgctttccctgcctcttcctgggctccgggtctgtgtccacagtgtcctgcgtggccctcacgctgcctctggttgcccacattcctgcaactctgtgaccacagcaggggcgattacacattcctggcctggcagccaacagtgtaaagaagaacagaatgtcctagggccccgcctagcccccagcttcacctgggcccctcccgggtctggacaaggttggagggggtggcgaggaatcagcaggaaagaggagggaccaggaggaggcagacgcatcccacctgagtgcgctgctcccacttagtgagcggggaggagacctgcagagacctcttctctcttctctgcagggcctgagggtgaggctgacctgtgggtgcccttggagggctgcccacttgctgagcctctagctcctggaagcacacttgggactccccccttgctctccttcctggagacagactccctttggtgctggctccttctatttgcccccaccactgccccccacctgcctctactcactcagtgcccctcctccatccctatctctctgtccttcgctgtccctctctattgtctccctctttctgccctcctgtcctcccggttccccacccaggccctctcagcctggctggccccttctccttgtgttgccctcctagctgtgggctcaggatccttctacttgttcagatctttgcccctcacctgccatcctgtcccccagcctccttgcctgtctgcgtctaaagcccctgcccagagtccgccttctcaggtccagtactcccagttcacctgccctcgggagccctccttccttcggaaaactcccggctctgactcctcctcagcccctccccccgccctgctcacctttaattgagatgctaatgagattcctgtcgcttccatccctggccggccggcgggcgggctccccagccaggccgctgcacctgtcaggtgagggggaggagaggtttggctgccagattcaactggaaaggaaccagtcccagtccagccgcaacctgggagtgggaagctggaggcagcccagacctcctggagccctgcagtcctggggcagagacagaatcaggacacagctcgaggtcagggccagaggctggagctgagggcctagagtgagagggggcaaggcaagggggggagaggaagagaggcaggattagagagaggaggcaggccagaaagaggagagcaggagagacccaaagagaaacagaaggcagatagagagggagtgagaggcaggagctgagacacagatcctggaggaagaagaccaaaggaagggggcagagacagaaagggaggtgctaggacaaaactcgaaaggtggccctatcagggaagcagaggagaggccgtcctagggaagcccagctccggcacttttggccccaactcccgcaggtctgctggctccaggaaaggtggaggagggagggaggagtgggagaatgtgggcgcagggtgggacatgggcatggccaggggcagcctcactcgggttccaggggtgatgggagagggcactcagggcccagagctcagccttgaccctgacccttgctctccccaatccactccggggctcatgaaggggaacaagctggaggagcaggaccctagacctctgcagcccataccaggtctcatggaggggaacaagctggaggagcaggactctagccctccacagtccactccagggctcatgaaggggaacaagcgtgaggagcaggggctgggccccgaacctgcggcgccccagcagcccacggcggaggaggaggccctgatcgagt

SEQ ID NO: 2555 - DNA, 1088 bp, Homo Sapiens
actgcagcaatggatacaaaagttaagcaagaacacagtgacagatgacatcctctgcacttcccccgggcatctcgacaaaaaggaattgaaagccctaaatagtgaaattctctgtccaggtttagtaaataacccatccatgccaacacagactagttaccttatggtcaccactcctgcaacaacaacaaatacggctgatactattttacgatctcttacggacgctgtgccactgtctgttctaatattgggacttctgattatgttcatcactattgttttctgtgctgcagggatagtggttcttgttcttcaccgcaggagaagatacaagaagaaacaagtagatgagcaaatgagagacaacagtcctgtgcatcttcagtacagcatgtatggccataaaaccactcatcacactactgaaagaccctctgcctcactctatgaacagcacatggtgagccccatggttcatgtctatagaagtccatcctttggtccaaagcatctggaagaggaagaagagaggaatgagaaagaaggaagtgatgcaaaacatctccaaagaagtcttttggaacaggaaaatcattcaccactcacagggtcaaatatgaaatacaaaaccacgaaccaatcaacagaatttttatccttccaagatgccagctcattgtacagaaacattttagaaaaagaaagggaacttcagcaactgggaatcacagaatacctaaggaaaaacattgctcagctccagcctgatatggaggcacattatcctggagcccacgaagagctgaagttaatggaaacattaatgtactcacgtccaaggaaggtattagtggaacagacaaaaaatgagtattttgaacttaaagctaatttacatgctgaacctgactatttagaagtcctggagcagcaaacatagatggagagtttgagggctttcgcagaaatgctgtgattctgttttaagtccataccttgtaaataagtgccttacgtgagtgtgtcatcaatcagaacctaagcacagcagtaaactatggggaaaaaaaaaaaaaaaaaaa

SEQ ID NO: 2556 - DNA, 392 bp, Homo Sapiens
ttttttttgtatttgatccccaaatttattcaagatacaaaagttccaggtgacaacaacaacaaaaaacatgtctaaaagaataaccaacatatgtcggtatggtgtgagaagctaaaaataaaatagtaaccaacaaaaggaaagcagctccaaagaaagacaatgaagaaaagcaaattaatttccaagaaaaccaaggatgacagtgtagaaatgtcaagacggagtgagctagaaaactgagattgtttgggtgacttctcatgattccagaggaggcccacgaaatagctgctgtcactcacaggacagcctgggcaatttgagagggaacagaaactagacgcaagttcatgaaatgcctgggaagattgaatttgaggagaagg

SEQ ID NO: 2557 - DNA, 308 bp, Homo Sapiens
tcgccagctcgccccggcactgcgcacttgccagccagtccgcccgtccggagcccggctcgctggggcagcatggcggggtcgccgctgctctgggggccgcgggccgggggcgtcggccttttggtgctgctgctgctcggcctgtttcggccgccccccgcgctctgcgcgcggccggtaaaggagccccgcggcctaagcgcagcgtctccgcccttggctgagactggcgctcctcgccgcttccggcggtcagtgccccgaggtgaggcggcggggggcggtgcaagaacctgggcgcgggc

SEQ ID NO: 2558 - DNA, 1803 bp, Homo Sapiens
gataagcttgatatcgacttcgtgttcctgggtttccttggcgctgcggccgccgctccctctgcaactgtatgaggaggaggaggaggaggatgtgaagatggcggagctgcagatgctgctggaagaggaaatcccgggggggcgccgggccctcttcgacagatacacaaatctggaacgggtggccgattactgcgagaacaactacatacagtcagcagataagcagagagccctagaagaaaccaaagcctacaccacccaatccttagcaagtgttgcctatctgataaacaccttggacaacaatgtcctgcagatgctggatatccaggcatcccagctacgaaggatggaatcttcaatcaatcatatttcacaaacagttgatattcataaagagaaagttgcaagaagagaaattggtattttgactaccaataaaaacacttcaaggacacataagattattgctccagccaaccttgaacgaccagttcgttatattagaaaacctattgactatacaattctagatgatattggacatggagtaaaggtgagtacccagaacatgaagatgggtgggctgccgcgtacaacacctccaactcagaagccccctagtccccctatgtcagggaaagggacacttgggcggcactccccctatcgcacactggagccagtgcgtcctccagtggtaccaaatgattacgtacctagcccaacccgtaatatggctccctcgcagcagagccctgtgaggacagcttctgtgaatcaaagaaatcgaacttacagcagcagtgggagtagtggagggagccacccaagtagtcggagcagcagtcgagagaacagtggaagtggtagtgtgggggttcctattgctgttcctactccatctcctcccagtgtctttccaggtcatcctgtacagttctacagcatgaataggcctgcctctcgccatactcccccaacaatagggggctcgttgccctatagacgccctccttccattacttcacaaacaagccttcagaatcagatgaatggaggacctttttatagccagaatccagtatctcttgctcctcctcctccctccatcctacaggtaactcctacgttacctttaatgggatttgtggccagagtccaagaaaatatttcagatacaccacctccaccgccacctgtggaagaaccagtctttgatgagtctcccccacctcctcctcctccagaagattacgaagaggaggaagctgctgtggttgagtatagtgatccttatgctgaagaggacccaccgtgggctccacgttcttacttggaaaaggttgtggcaatttatgactatacaaaagacaaggaagatgagctgtcctttcaggaaggagccattatttatgtcatcaagaagaatgacgatggttggtatgagggagttatgaatggagtgactgggctttttcctgggaattacgttgagtctatcatgcattattctgagtaaagctcagcagggctgtgcttggctcacaggaatagtcaggtcttcccagattatctgaaggccctggggattccactccagtaaagtagaatgaaggatacaaatgataaaaattacactttttttttgggttattccccagtattaaaaacaaagcaagctgagtctgaacaaatggatctttctgccatcatttgtacaatgctgagctgtctggattgaaataaaatgaccatttttatgtatgtcaaaggtaaaaaaaaaaaaaaaaaaaa

SEQ ID NO: 2559 - DNA, 563 bp, Homo Sapiens
  misc_feature (88)..(88): n is a, c, g, or t
gctccgtggacatgagcagacccttgaagggtggtctcattctctaacagtaacagcactgccagaaacaccccctgaatgccacacngatcatctcactttgggtcaggccagcagggcctcacgatcatttcttgaacttgaattttcagtgttattgaatctttaaacatttaaatccccaagcaaaaatctcattacagtgaataaaaaggaatccaatcaaacaagccaccacttccctaatggatggactacctacaactatagtgttttgttatttcaataacaattctatgcacagccaattctccataccaaagtactaaaaaaatgtttaacaagcatttttgaagaaaacaaagagaacttcattatggttaaacttgcttttcatctcagtgttgctttttttaacctgttaataacattgattcttaaaaagtcctaatcaaacttctttatttggatgggccctaaatattcattttcagatttctcttcaaaagtttgaacatcatcattaaaaaaaaaatagcattaaaacaaaaaaaaaaaaaaaa

SEQ ID NO: 2560 - DNA, 436 bp, Homo Sapiens
actgcttcaaccctaccaacttcctggacaagggcaagttccaggacaatgatgctttcatgccctttgcctcaggtgcaggcagaggaggaaggggaccagcctggactggctctggggtacctggtgctcactgtgcacctgtgtacccggcaaagcagatgtgcctgggcacaggcctggcccactcgggtatcttcctattccttacggccaccttacagaggttctgcctgctccctgtggtacgccctggcaccatcaacctcacctgcagtgcactggcctgggcagtgtccccccagacttccagctccagccagtggcctgctgaggtcaggctccactatggtgggctcactggccctcaaacctccataccctcctcggtcaataaaggccctaaattgcaaaaaaaaaaaaaaaaaaaaggttt

SEQ ID NO: 2561 - DNA, 706 bp, Homo Sapiens
gaccacccccaaaccctgaacctccccccaaccccccccccctccaaccatagcgcaggtacaggctgtgtgttaattcggccgagggcacgcgccccgatgaccgcccgacgtgcattcccgattccttttggttccaagtccaatatggcaactctaaaggatcaggtgatttataatcttctaaaggaagaacagaccccccagaataagattacagttgttggggttggtgctgttggcatggcctgtgccatcagtatcttaatgaaggacttggcagatgaacttgctcttgttgatgtcatcgaagacaaattgaagggagagatgatggatctccaacatggcagccttttccttagaacaccaaagattgtctctggcaaagactataatgtaactgcaaactccaagctggtcattatcacggctggggcacgtcagcaagagggagaaagccgtcttaatttggtccagcgtaacgtgaacatatttaaattcatcattcctaatgcttgtaaaatacagcccgaactgcaagtagcttattgtttcaaatccagtggatatcttgacctacgtggcttggaagataacgtggttttcccaaaaaccgctgtattggaagctggttgcaatctggattcagcccgattccgttacctgatgggggaaaggctgggagttcacccattaagctgtc

SEQ ID NO: 2562 - DNA, 363 bp, Homo Sapiens
  misc_feature (35)..(35): n is a, c, g, or t
cagaactttaaaagcaacgcaagcagattcgaagngctgttgccctcttctaaaaaaggcttttggaggctgtgttacatgcatgccctaaagcagtcagtctgttagtatgagcaagacatctgaagtacacagttgcttttaggcttgtatagttattttctacacatgccaacacacatgatgataaaggaaccttttctaggaggcattgcagggtttcaatacacaggacatgttctagttacagaagccttgctctgctgtcaacaattgggaaatgctcattttttcatgttttgtgaatactctggtcttgctgtaagctaatgtcatggctgtgggatattagagaagtgggtt

SEQ ID NO: 2563 - DNA, 2430 bp, Homo Sapiens
ctccaccgccgccgccgccgccgccgctgccgctgccgctgccgcacctccgtagctgactcggtactctctgaagatggcagaagctcaccaagctgtggcctttcagttcacggtcactccggacgggattgacctgcggctgagccatgaagctcttagacaaatctatctctctggacttcattcctggaaaaagaagttcatcagattcaagaacggcatcatcactggcgtgtacccggcaagcccctccagttggcttatcgtggtggtgggcgtgatgacaacgatgtacgccaagatcgacccctcgttaggaataattgcaaaaatcaatcggactctggaaacggccaactgcatgtccagccagacgaagaacgtggtcagcggcgtgctgtttggcaccggcctgtgggtggccctcatcgtcaccatgcgctactccctgaaagtgctgctctcctaccacgggtggatgttcactgagcacggcaagatgagtcgtgccaccaagatctggatgggtatggtcaagatcttttcaggccgaaaacccatgttgtacagcttccagacatcgctgcctcgcctgccggtcccggctgtcaaagacactgtgaacaggtatctacagtcggtgaggcctcttatgaaggaagaagacttcaaacggatgacagcacttgctcaagattttgctgtcggtcttggaccaagattacagtggtatttgaagttaaaatcctggtgggctacaaattacgtgagcgactggtgggaggagtacatctacctccgaggacgagggccgctcatggtgaacagcaactattatgccatggatctgctgtatatccttccaactcacattcaggcagcaagagccggcaacgccatccatgccatcctgctttacaggcgcaaactggaccgggaggaaatcaaaccaattcgtcttttgggatccacgattccactctgctccgctcagtgggagcggatgtttaatacttcccggatcccaggagaggagacagacaccatccagcacatgagagacagcaagcacatcgtcgtgtaccatcgaggacgctacttcaaggtctggctctaccatgatgggcggctgctgaagccccgggagatggagcagcagatgcagaggatcctggacaatacctcggagcctcagcccggggaggccaggctggcagccctcaccgcaggagacagagttccctgggccaggtgtcgtcaggcctattttggacgtgggaaaaataagcagtctcttgatgctgtggagaaagcagcgttcttcgtgacgttagatgaaactgaagaaggatacagaagtgaagacccggatacgtcaatggacagctacgccaaatctctactacacggccgatgttacgacaggtggtttgacaagtcgttcacgtttgttgtcttcaaaaacgggaagatgggcctcaacgctgaacactcctgggcagatgcgcagatcgtggcccacctttgggagtacgtcatgtccattgacagcctccagctgggctatgcggaggatgggcactgcaaaggcgacatcaatccgaacattccgtaccccaccaggctgcagtgggacatcccgggggaatgtcaagaggttatagagacctccctgaacaccgcaaatcttctggcaaacgacgtggatttccattccttcccattcgtagcctttggtaaaggaatcatcaagaaatgtcgcacgagcccagacacctttgtgcagctggccctccagctggcgcactacaaggacatgggcaagttttgcctcacatacgaggcctccatgacccggctcttccgagaggggaggacggagaccgtgcgctcctgcaccactgagtcatgcgacttcgtgcgggccatggtggacccggcccagacggtggaacagaggctgaagttgttcaagttggcgtctgagaagcatcagcatatgtatcgcctcgccatgaccggctctgggatcgatcgtcacctcttctgcctttacgtggtgtctaaatatctcgctgtggagtcccctttccttaaggaagttttatctgagccttggagattatcaacaagccagacccctcagcagcaagtggagctgtttgacttggagaataacccagagtacgtgtccagcggagggggctttggaccggttgctgatgacggctatggtgtgtcgtacatccttgtgggagagaacctcatcaatttccacatttcttccaagttctcttgccctgagacggattctcatcgctttggaaggcacctgaaagaagcaatgactgacatcatcactttgtttggtctcagttctaattccaaaaagtaattccactggagctgctgggaaggaaaacgagg

SEQ ID NO: 2564 - DNA, 220 bp, Homo Sapiens
gtttcagtcccaggtcatactctccaacagttttcagagctccatatatatgtagatgccatcctttctaaaaacttctcacgacctcctggaatattcctattgatctcattttatttagcatcagctcaagaaactaagtcttagtgcacagtatcacaacatagaagaagctttgtttttataactggtaaaaacaagaaaagattctcatcaaaac

SEQ ID NO: 2565 - DNA, 466 bp, Homo Sapiens
aagatgtcactgtgtatttaaacgcctttattcattggcatacaccaaataccttcatcattctttgagtaatgattgacagtctcgtttaatgaaataatgtttgtcaaatacttaatttgctgccgggcacagtaaatgttagttatgattgttataatattatcataaaacaagttttttttttttaaggttttctgaatggaaaggaaatacagatcagggctgtcatgttcgtgcaggccactcaaggtaaaccatagtggattccagagtttacaccccctgagactgctgcccctatgacagcattttacccccaagatagtcaaattctcaattctttagacttttaccgggtctcccaaggtaccgctcatcccctccttgctccccacaagagggaagagacaaaggctgctgtttctcttgcaaggctgcccccaccagcctgagaaggagttcc

SEQ ID NO: 2566 - DNA, 506 bp, Homo Sapiens
ttttacccttggctccaaatattttaattgccataaatttgtttaaaaatacacattaaacgcatgtttgacactctaaactttctatactctcaataccacaaaatacatataatatactatacagatgtggaaaaatctagttagtatataatactttgctcaccattaacagctttatcgtgtgaaatgcacatactgacttagaaatcctagcttttgagccccaaagtacctctgaaattgtaatgtattgcaacaaataaaaatcacagtatataattgaaattctggttgaaaatgtcagatgcctaaatattttggataaaagaaatgtaaaacaaagatttggttcatgtacaaaacaaaggcatccttatcagtcactaacagtacctttctgcaaaatcaacaggcttttaatttatcagtgacattatctcccctccaaaaccctccccaaatatcaaacaattatataccaaataattgtaatttcaaataaa

SEQ ID NO: 2567 - DNA, 364 bp, Homo Sapiens
ttttttttttttttttttgggcagacagaaggctttgttactgccaccgggcaggagacacagggtcagggttccagggccaagttatccactcccttgggtctttccttcctggggctttccctgcggggcccgggggagctgcagcagcagcagtgggcgacgaccagcagcagcaggagcagcacggtgcccatgaaggtgaggaaaacaatgaaggcaacagtgtcccatgtggactggaaaaactggtggctcttcagtctccccaggacttcctgaaccgtggcctccagctcctctgtggacacagccatcttggcgtgcaccgtgccacctgcatcccacgacccttgagcagcta

SEQ ID NO: 2568 - DNA, 1203 bp, Homo Sapiens
catctggtgtattgactgtggccagtcttaaagctagtttttgctatgtggaacatgctgctctaattcagatttaaagagtttcttcctgttaattcgaagctcactgtgcctcttgtttccgagggaagaaggactgattaagtcatctaaatggatgcaatactgaattacaggtcagaagatactgaagattactacacattactgggatgtgatgaactatcttcggttgaacaaatcctggcagaatttaaagtcagagctctggaatgtcacccagacaagcatcctgaaaaccccaaagctgtggagacttttcagaaactgcagaaggcaaaggagattctgaccaatgaagagagtcgagcccgctatgaccactggcgaaggagccagatgtcgatgccattccagcagtgggaagctttgaatgactcagtgaagacgtcaatgcactgggttgtcagaggtaaaaaagacctgatgctggaagaatctgacaagactcataccaccaagatggaaaatgaggaatgtaatgagcaaagagaaagaaagaaagaggagctggcttcaaccgcagagaaaacggagcagaaagaacccaagcccctagagaagtcagtctccccgcaaaattcagattcttcaggttttgcagatgtgaatggttggcaccttcgtttccgctggtccaaggatgctccctcagaactcctgaggaagttcagaaactatgaaatatgaaatatctctgcttcaaaaaatgaggaagagcaagactgtcccctatgctgccaacatgcagtctttgtttatgtcttaaaaatgtcatgtttatgtcatgtctgtgaattgctgagtactaattgattcctccatccttgaatcagttctcataatgctttttaaataagaaaaattcagaagatgaatttcttccaatatttgaataaattaaagctcttagatacagagtagattgtattatatgctttttcctattaatactacttatagaaatccattaaaaagcaatctctgtacagtgtatttaaatatttcattgacatactgtgatctctattagtgatggatgtacaaaaaatgttttcttacccttgacttacaatgaaatgtgaaattacttgtctgaaccccgtggggagaaataaataattttcccaaagttcaaaaaaa

SEQ ID NO: 2569 - DNA, 411 bp, Homo Sapiens
  misc_feature (167)..(167): n is a, c, g, or t
  misc_feature (201)..(201): n is a, c, g, or t
  misc_feature (217)..(217): n is a, c, g, or t
  misc_feature (223)..(223): n is a, c, g, or t
  misc_feature (349)..(349): n is a, c, g, or t
  misc_feature (375)..(375): n is a, c, g, or t
tgttgacatagttggaaaactgctctctcatttttaaaactttatttccacttccccagctttgaagatttctatgttaggaaaagccaaactaaatatactggctatggtgttgtaacaatgctggtttctggaatggtggcatgtcctccccttccctctcctcnaactcctttaaaaatatgactatttttgaaatgnagcccgaggagggagnaatcangggttcagaacaataagcgcccttcacacattcaagttcccagacaccaggtgaacgagcgagctccttgtcgggggcggggcggctgtcctcaccgaattcgcagcggcatcttcctcccgggancggccgggttcccttctgccagcganggagactcccaagcaaaaggcgggtgggggtgggcg

SEQ ID NO: 2570 - DNA, 4994 bp, Homo Sapiens
ctcctgctcttctttccgcttggcctccaacagcctctgctgctcctcctgagcccgcctttccagcatgagattcagagaaggaaagaagagataaaagaagagaaaaaaaggaaagaaatggctaagcaggaacgtttggaaattgctagtttgtcaaaccaagatcatacctctaagaaggacccaggaggacacagaacggctgccattctacatggaggctctcctgactttgtaggaaatggtaaacatcgggcaaactcctcaggaaggtctaggcgagaacgtcagtattctgtatgtaatagtgaagattctcctggctcttgtgaaattctgtatttcaatatggggagtcctgatcagctcatggtgcacaaagggaaatgtattggcagtgatgaacaacttggaaaattagtctacaatgctttggaaacagccactggtggctttgtcttgttgtatgagtgggtccttcagtggcagaaaaaaatgggtccattccttaccagtcaagaaaaagagaagattgataagtgcaaaaagcagattcaaggaacagaaacagaattcaactcactggtaaaattgagccatccaaatgtagtacgctaccttgcaatgaatctcaaagagcaagacgactccatcgtggtggacattttagtggagcacattagtggggtctctcttgctgcacacctgagccactcaggccccatccctgtgcatcagcttcgcaggtacacagctcagctcctgtcaggccttgattatctgcacagcaattctgtggtgcataaggtcctgagtgcatctaatgtcttggtggatgcagaaggcaccgtcaagattacggactatagcatttctaagcgcctcgcagacatttgcaaggaggatgtgtttgagcaaacccgagttcgttttagtgacaatgctctgccttataaaacggggaagaaaggagatgtttggcgtcttggccttctgctgctgtccctcagccaaggacaggaatgtggagagtaccctgtgaccatccctagtgacttaccagctgactttcaagattttctaaagaaatgtgtgtgcttggatgacaaggaaagatggagtccccagcagttgttgaaacacagctttataaatccccagccaaaaatgcctctagtggaacaaagtcctgaagattctggaggacaagattatgttgagactgttattcctagcaaccggctacccagtgctgccttctttagtgagacacagagacagttttcccgatacttcattgagtttgaagaattacaacttcttggtaaaggagcttttggagctgtcatcaaggtgcagaacaagttggacggctgctgctacgcagtgaagcgcatccccatcaacccggccagccggcagttccgcaggatcaagggcgaagtgacactgctgtcacggctgcaccatgagaacattgtgcgctactacaacgcctggatcgagcggcacgagcggccggcgggaccggggacgccgcccccggactccgggcccctggccaaggatgaccgagctgcacgcgggcagccggcgagcgacacagacggcctggacagcgtagaggccgccgcgccgccacccatcctcagcagctcggtggagtggagcacttcgggcgagcgctcggccagtgcccgtttccccgccaccggcccgggctccagcgatgacgaggacgacgacgaggacgagcacggtggcgtcttctcccagtccttcctgcctgcttcagattctgaaagtgatattatctttgacaatgaagatgagaacagtaaaagtcagaatcaggatgaagattgcaatgaaaagaatggctgccatgaaagtgagccatcagtgacgactgaggctgtgcactacctatacatccagatggagtactgtgagaagagcactttacgagacaccattgaccagggactgtatcgagacaccgtcagactctggaggctttttcgagagattctggatggattagcttatatccatgagaaaggaatgattcaccgggatttgaagcctgtcaacatttttttggattctgatgaccatgtgaaaataggtgattttggtttggcgacagaccatctagccttttctgctgacagcaaacaagacgatcagacaggagacttgattaagtcagacccttcaggtcacttaactgggatggttggcactgctctctatgtaagcccagaggtccaaggaagcaccaaatctgcatacaaccagaaagtggatctcttcagcctgggaattatcttctttgagatgtcctatcaccccatggtcacggcttcagaaaggatctttgttctcaaccaactcagagatcccacttcgcctaagtttccagaagactttgacgatggagagcatgcaaagcagaaatcagtcatctcctggctgttgaaccacgatccagcaaaacggcccacagccacagagctgctcaagagtgagctgctgcccccaccccagatggaggagtcagagctgcatgaagtgctgcaccacacgctgaccaacgtggatgggaaggcctaccgcaccatgatggcccagatcttctcgcagcgcatctcccctgccatcgattacacctatgacagcgacatactgaagggcaacttctcaatccgtacagccaagatgcagcagcatgtgtgtgaaaccatcatccgcatctttaaaagacatggagctgttcagttgtgtactccactactgcttccccgaaacagacaaatatatgagcacaacgaagctgccctattcatggaccacagcgggatgctggtgatgcttccttttgacctgcggatcccttttgcaagatatgtggcaagaaataatatattgaatttaaaacgatactgcatagaacgtgtgttcaggccgcgcaagttagatcgatttcatcccaaagaacttctggagtgtgcatttgatattgtcacttctaccaccaacagctttctgcccactgctgaaattatctacactatctatgaaatcatccaagagtttccagcacttcaggaaagaaattacagtatttatttgaaccataccatgttattgaaagcaatactcttacactgtgggatcccagaagataaactcagtcaagtctacattattctgtatgatgctgtgacagagaagctgacgaggagagaagtggaagctaaattttgtaatctgtctttgtcttctaatagtctgtgtcgactctacaagtttattgaacagaagggagatttgcaagatcttatgccaacaataaattcattaataaaacagaaaacaggtattgcacagttggtgaagtatggcttaaaagacctagaggaggttgttggactgttgaagaaactcggcatcaagttacaggtcttgatcaatttgggcttggtttacaaggtgcagcagcacaatggaatcatcttccagtttgtggctttcatcaaacgaaggcaaagggctgtacctgaaatcctcgcagctggaggcagatatgacctgctgattccccagtttagagggccacaagctctggggccagttcccactgccattggggtcagcatagctatagacaagatatctgctgctgtcctcaacatggaggaatctgttacaataagctcttgtgacctcctggttgtaagtgttggtcagatgtctatgtccagggccatcaacctaacccagaaactctggacagcaggcatcacagcagaaatcatgtacgactggtcacagtcccaagaggaattacaagagtactgcagacatcatgaaatcacctatgtggcccttgtctcggataaagaaggaagccatgtcaaggttaagtctttcgagaaggaaaggcagacagagaagcgtgtgctggagactgaacttgtggaccatgtactgcagaaactgaggactaaagtcactgatgaaaggaatggcagagaagcttccgataatcttgcagtgcaaaatctgaaggggtcattttctaatgcttcaggtttgtttgaaatccatggagcaacagtggttcccattgtgagtgtgctagccccggagaagctgtcagccagcactaggaggcgctatgaaactcaggtacaaactcgacttcagacctcccttgccaacttacatcagaaaagcagtgaaattgaaattctggctgtggatctacccaaagaaacaatattacagtttttatcattagagtgggatgctgatgaacaggcatttaacacaactgtgaagcagctgctgtcacgcctgccaaagcaaagatacctcaaattagtctgtgatgaaatttataacatcaaagtagaaaaaaaggtgtctgtgctatttctgtacagctatagagatgactactacagaatcttattttaaccctaaagaactgtcgttaacctcattcaaacagacagaggcttatactggaataatggaatgttgtacattcatcataatttaaaattaaattctaagaagaggctgggtgcagtggctcacacctttaatcccagcactttgggaagccaaggcaggaagactgcttgaaaccaggagtttgagaccagcctgagcaacaaagcaagaccccatctctataaaaactaaaaaaattagttgggcatggtggcacatgcctgtagtcccagctactccagaggctgagatggatcatctgagcctcaggaggttgaggctgcagtgagctgtgactgcgccactgcactccagtctgggacaacagagcaagaccctgtcttaaaaaaaaaaagaaaaaaaaattttttttctaagaagctgtcctacaaagttgagctttgttagtttttcatgtgtaatatattataaatttatcttttgggatataataaatgctttcatat

SEQ ID NO: 2571 - DNA, 560 bp, Homo Sapiens
  misc_feature (29)..(29): n is a, c, g, or t
  misc_feature (363)..(363): n is a, c, g, or t
  misc_feature (520)..(520): n is a, c, g, or t
tttgaagccgttctttgacaccattcggntccggcattcccgggtcgacccacgcgtccggcgacattacgctagcgctcgctctactctctctaacgggaaagcagcggaatacaagagactgaactgtatctgcctctatttccaaaagactcacgttcaactttcgctcacacaaagccgggaaaattttattagtcctttttttaaaaaaagttaatataaaattatagcaaaaaaaaaaaggaacctgaactttagtaacacagctggaacaatccgcagcggcggcggcagcggcgggagaagaggtttaatttagttgattttctgtggttgttggttgttcgctagtctcacggngatggaagctgcacattttttcgaagggaccgagaagctgctggaggtttggttctcccggcagcagcccgacgcaaaccaaggatctggggatcttcgcactatcccaagatctgagtgggacatacttttgaaggatgtgcaatgttcaatcatnagtgtgacaaaaactgacaagcatgaagcttatgtactca

SEQ ID NO: 2572 - DNA, 414 bp, Homo Sapiens
tgcttccgctcccggagcgcgtgcgccctcttactcggctccccttggtttcctggggtcctgccccttcaagctggggcgggagtggaggaccccgctctcaggggttgccggaccatgcgttgggggctgcgccctcgcgggccgggcgcggccgccctggccactgcccgaagtttgtgggggacgccccgccttccctgcagcccgggatggcaaggggcgacgaagaggcttctggtgcggtcggtctccggggccagtaaccaccagccgaactcgaatagtggcagataccgggacacggtgctgctgccgcagacgagcttccccatgaagctgctgggccgccagcagccggacacggagctggagatccagcagaaatgtggattttcagaactttattcatgg

SEQ ID NO: 2573 - DNA, 2726 bp, Homo Sapiens
aggaattcggcacgaggcggggcgggtgctgcttgctgcaggctctggggagtcgccatgcctacaacacagcagtcccctcaggatgagcaggaaaagctcttggatgaagccatacaggctgtgaaggtccagtcattccaaatgaagagatgcctggacaaaaacaagcttatggatgctctaaaacatgcttctaatatgcttggtgaactccggacttctatgttatcaccaaagagttactatgaactttatatggccatttctgatgaactgcactacttggaggtctacctgacagatgagtttgctaaaggaaggaaagtggcagatctctacgaacttgtacagtatgctggaaacattatcccaaggctttaccttttgatcacagttggagttgtatatgtcaagtcatttcctcagtccaggaaggatattttgaaagatttggtagaaatgtgccgtggtgtgcaacatcccttgaggggtctgtttcttcgaaattaccttcttcagtgtaccagaaatatcttacctgatgaaggagagccaccagatgaagaaacaactggtgacatcagtgattccatggattttgtactgctcaactttgcagaaatgaacaagctctgggtgcgaatgcagcatcagggacatagccgagatagagaaaaaagagaacgagaaagacaagaactgagaattttagtgggaacaaatttggtgcgcctcagtcagttggaaggtgtaaatgtggaacgttacaaacagattgttttgactggcatattggagcaagttgtaaactgtagggatgctttggctcaagaatatctcatggagtgtattattcaggttttccctgatgaatttcacctccagactttgaatccttttcttcgggcctgtgctgagttacaccagaatgtaaatgtgaagaacataatcattgctttaattgatagattagctttatttgctcaccgtgaagatggacctggaatcccagcggatattaaactttttgatatattttcacagcaggtggctacagtgatacagtctagacaagacatgccttcagaggatgttgtatctttacaagtctctctgattaatcttgccatgaaatgttaccctgatcgtgtggactatgttgataaagttctagaaacaacagtggagatattcaataagctcaaccttgaacatattgctaccagtagtgcagtttcaaaggaactcaccagacttttgaaaataccagttgacacttacaacaatattttaacagtcttgaaattaaaacattttcacccactctttgagtactttgactacgagtccagaaagagcatgagttgttatgtgcttagtaatgttctggattataacacagaaattgtctctcaagaccaggtggattccataatgaatttggtatccacgttgattcaagatcagccagatcaacctgtagaagaccctgatccagaagattttgctgatgagcagagccttgtgggccgcttcattcatctgctgcgctctgaggaccctgaccagcagtacttgattttgaacacagcacgaaaacattttggagctggtggaaatcagcggattcgcttcacactgccacctttggtatttgcagcttaccagctggcttttcgatataaagagaattctaaagtggatgacaaatgggaaaagaaatgccagaagattttttcatttgcccaccagactatcagtgctttgatcaaagcagagctggcagaattgcccttaagactttttcttcaaggagcactagctgctggggaaattggttttgaaaatcatgagacagtcgcatatgaattcatgtcccaggcattttctctgtatgaagatgaaatcagcgattccaaagcacagctagctgccatcaccttgatcattggcacttttgaaaggatgaagtgcttcagtgaagagaatcatgaacctctgaggactcagtgtgcccttgctgcatccaaacttctaaagaaacctgatcagggccgagctgtgagcacctgtgcacatctcttctggtctggcagaaacacggacaaaaatggggaggagcttcacggaggcaagagggtaatggagtgcctaaaaaaagctctaaaaatagcaaatcagtgcatggacccctctctacaagtgcagctttttatagaaattctgaacagatatatctatttttatgaaaaggaaaatgatgcggtaacaattcaggttttaaaccagcttatccaaaagattcgagaagacctcccgaatcttgaatccagtgaagaaacagagcagattaacaaacattttcataacacactggagcatttgcgcttgcggcgggaatcaccagaatccgaggggccaatttatgaaggtctcatcctttaaaaaggaaatagctcaccatactcctttccatgtacatccagtgagggttttattacgctaggtttcccttccatagattgtgcctttcagaaatgctgaggtaggtttcccatttcttacctgtgatgtgttttacccagcacctccggacactcaccttcaggaccttaataaaattattcacttggtaagtgttcaagtctttctgatcaccccaagtagcatgactgatctgcaatttaaaattcctgtgatctgtaaaaaaaaaaaaaaaaaaa

SEQ ID NO: 2574 - DNA, 598 bp, Homo Sapiens
ttgaatttaggtgacactatagaagagctatgacgtcgcatgcacgcgtacgtaagcttggatcctctagagcggccgcctactactactaaattcgcggccgcgtcgacgtctatctatctatctatctatctatctatctatctatctatctatgtctatctgtcatgtatctatactcgattataatttgtaggattttatttgtactcagtttttaaaatttcatgttttaattgaataattgttccactgggcttggggtagggtaggcattctttttgttgtttattgctgcttccagaccagagtccctccctgcttcccaaaagctcccacatgtgaatatcgtgtcattcagactctgccacctattagctttcttggttctactcatcttctgtcccctgggtttcacttctcctggctcactctcactctccccatataatcactcctgtcctaattcttggtgatttcagtattacaaagatgatcctcccaacaccttgacacccagtcgacgcggccgcgaatttagtagtagttgtcgacccgggaattccggaccggtacctgcaggcgtcccagctttccc

SEQ ID NO: 2575 - DNA, 1340 bp, Homo Sapiens
ctagaattcagcggccgctgaattctagctagaattcagcggccgctgaattctagaacccaggtgcaactgacatgggtgaaccccagggatccatgcggattctagtgacagggggctctgggctggtaggcaaagccatccagaaggtggtagcagatggagctggacttcctggagaggactgggtgtttgtctcctctaaagacgccgatctcacggatacagcacagacccgcgccctgtttgagaaggtccaacccacacacgtcatccatcttgctgcaatggtggggggcctgttccggaatatcaaatacaatttggacttctggaggaaaaacgtgcacatgaacgacaacgtcctgcactcggcctttgaggtgggggcccgcaaggtggtgtcctgcctgtccacctgtatcttccctgacaagacgacctacccgatagatgagaccatgatccacaatgggcctccccacaacagcaattttgggtactcgtatgccaagaggatgatcgacgtgcagaacagggcctacttccagcagtacggctgcaccttcaccgctgtcatccccaccaacgttttcgggccccacgacaacttcaacatcgaggatggccacgtgctgcctggcctcatccacaaggtgcacctggccaagagcagcggctcggccctgacggtgtggggtacagggaatccgcggaggcagttcatatactcgctggacctggcccagctctttatctgggtcctgcgggagtacaatgaagtggagcccatcatcctctccgtgggcgaggaagatgaggtctccatcaaggaggcagccgaggcggtggtggaggccatggacttccatggggaagtcacctttgatacaaccaagtcggatgggcagtttaagaagacagccagtaacagcaagctgaggacctacctgcccgacttccggttcacacccttcaagcaggcggtgaaggagacctgtgcttggttcactgacaactacgagcaggcccggaagtgaagctggaagacaggatcaggtgccagcggaccatcggctggcagagcccagcggccaccacccgtcaaccctgccaggagctgagggcaccacccagcaacctgggcctgcattccatccgctctgcagccccaagcatctttccagtggggcccccattcacgttggtcctcagggaaaccagggtccggggcaggcccggcgctttgctccccacaccagccccctgcgcgtgtccactctgatcctgcatcccactccctgggagccaataaagtgcattttcacagaaaaaaaaaa

SEQ ID NO: 2576 - DNA, 266 bp, Homo Sapiens
tttttttttttttttttgctttttgctttttttttggcagagcagttgccagaactactattatttggttttttttttttggttttttttgctttttttttttttttttgcaaactgcagttggacaagcatcttaactgcttttatctgagagaggtgtgaccactgttgtctcagtcacagaaattctgctgagtgtctttccactggaaataccataagataagctctcataagacaatttcactattccaaccctcgtgccg

SEQ ID NO: 2577 - DNA, 151 bp, Homo Sapiens
gtttactcgctgctgtgcccatctatcagcaggctccgggctgaagattgttctcttctctcctccaaggtctagtgacggagcccgcgcgcggcgccaccatgcggcagaaggcggtatcgcttttcttgtgctacctgctgctcttcac

SEQ ID NO: 2578 - DNA, 4637 bp, Homo Sapiens
aggtgaacaggtcctcacgcccagctccgccccctcacgcgctctcgccgggaccccgcttccgctggcagccatgggccccggccccagccgcgcgccccgcgccccacgcctgatgctctgtgcgctcgccttgatggtggcggccggcggctgcgtcgtctccgccttcaacctggatacccgattcctggtagtgaaggaggccgggaacccgggcagcctcttcggctactcggtcgccctccatcggcagacagagcggcagcagcgctacctgctcctggctggtgccccccgggagctcgctgtgcccgatggctacaccaaccggactggtgctgtgtacctgtgcccactcactgcccacaaggatgactgtgagcggatgaacatcacagtgaaaaatgaccctggccatcacattattgaggacatgtggcttggagtgactgtggccagccagggccctgcaggcagagttctggtctgtgcccaccgctacacccaggtgctgtggtcagggtcagaagaccagcggcgcatggtgggcaagtgctacgtgcgaggcaatgacctagagctggactccagtgatgactggcagacctaccacaacgagatgtgcaatagcaacacagactacctggagacgggcatgtgccagctgggcaccagcggtggcttcacccagaacactgtgtacttcggcgcccccggtgcctacaactggaaaggaaacagctacatgattcagcgcaaggagtgggacttatctgagtatagttacaaggacccagaggaccaaggaaacctctatattgggtacacgatgcaggtaggcagcttcatcctgcaccccaaaaacatcaccattgtgacaggtgccccacggcaccgacatatgggcgcggtgttcttgctgagccaggaggcaggcggagacctgcggaggaggcaggtgctggagggctcgcaggtgggcgcctattttggcagcgcaattgccctggcagacctgaacaatgatgggtggcaggacctcctggtgggcgccccctactacttcgagaggaaagaggaagtagggggtgccatctatgtcttcatgaaccaggcgggaacctccttccctgctcacccctcactccttcttcatggccccagtggctctgcctttggtttatctgtggccagcattggtgacatcaaccaggatggatttcaggatattgctgtgggagctccgtttgaaggcttgggcaaagtgtacatctatcacagtagctctaaggggctccttagacagccccagcaggtaatccatggagagaagctgggactgcctgggttggccaccttcggctattccctcagtgggcagatggatgtggatgagaacttctacccagaccttctagtgggaagcctgtcagaccacattgtgctgctgcgggcccggccagtcatcaacatcgtccacaagaccttggtgcccaggccagctgtgctggaccctgcactttgcacggccacctcttgtgtgcaagtggagctgtgctttgcttacaaccagagtgccgggaaccccaactacaggcgaaacatcaccctggcctacactctggaggctgacagggaccgccggccgccccggctccgctttgccggcagtgagtccgctgtcttccacggcttcttctccatgcccgagatgcgctgccagaagctggagctgctcctgatggacaacctccgtgacaaactccgccccatcatcatctccatgaactactctttacctttgcggatgcccgatcgcccccggctggggctgcggtccctggacgcctacccgatcctcaaccaggcacaggctctggagaaccacactgaggtccagttccagaaggagtgcgggcctgacaacaagtgtgagagcaacttgcagatgcgggcagccttcgtgtcagagcagcagcagaagctgagcaggctccagtacagcagagacgtccggaaattgctcctgagcatcaacgtgacgaacacccggacctcggagcgctccggggaggacgcccacgaggcgctgctcaccctggtggtgcctcccgccctgctgctgtcctcagtgcgcccccccggggcctgccaagctaatgagaccatcttttgcgagctggggaaccccttcaaacggaaccagaggatggagctgctcatcgcctttgaggtcatcggggtgaccctgcacacaagggaccttcaggtgcagctgcagctctccacgtcgagtcaccaggacaacctgtggcccatgatcctcactctgctggtggactatacactccagacctcgcttagcatggtaaatcaccggctacaaagcttctttggggggacagtgatgggtgagtctggcatgaaaactgtggaggatgtaggaagccccctcaagtatgaattccaggtgggcccaatgggggaggggctggtgggcctggggaccctggtcctaggtctggagtggccctacgaagtcagcaatggcaagtggctgctgtatcccacggagatcaccgtccatggcaatgggtcctggccctgccgaccacctggagaccttatcaaccctctcaacctcactctttctgaccctggggacaggccatcatccccacagcgcaggcgccgacagctggatccagggggaggccagggccccccacctgtcactctggctgctgccaaaaaagccaagtctgagactgtgctgacctgtgccacagggcgtgcccactgtgtgtggctagagtgccccatccctgatgcccccgttgtcaccaacgtgactgtgaaggcacgagtgtggaacagcaccttcatcgaggattacagagactttgaccgagtccgggtaaatggctgggctaccctattcctccgaaccagcatccccaccatcaacatggagaacaagaccacgtggttctctgtggacattgactcggagctggtggaggagctgccggccgaaatcgagctgtggctggtgctggtggccgtgggtgcagggctgctgctgctggggctgatcatcctcctgctgtggaagtgcggcttcttcaagcgagcccgcactcgcgccctgtatgaagctaagaggcagaaggcggagatgaagagccagccgtcagagacagagaggctgaccgacgactactgagggggcagccccccgcccccggcccacctggtgtgacttctttaagcggacccgctattatcagatcatgcccaagtaccacgcagtgcggatccgggaggaggagcgctacccacctccagggagcaccctgcccaccaagaagcactgggtgaccagctggcagactcgggaccaatactactgacgtcctccctgatcccaccccctcctcccccagtgtcccctttcttcctatttatcataagttatgcctctgacagtccacaggggccaccacctttggctggtagcagcaggctcaggcacatacacctcgtcaagagcatgcacatgctgtctggccctggggatcttcccacaggagggccagcgctgtggaccttacaacgccgagtgcactgcattcctgtgccctagatgcacgtggggcccactgctcgtggactgtgctggtgcatcacggatggtgcatgggctcgccgtgtctcagcctctgccagcgccagcgccaaaacaagccaaagagcctcccaccagagccgggaggaaaaggcccctgcaatgtggtgacacctcccctttcacacctggatccatcttgagagccacagtcactggattgactttgctgtcaaaactactgacagggagcagcccccgggccgctggctggtgggcccccaattgacacccatgccagagaggtggggatcctgcctaaggttgtctacgggggcacttggaggacctggcgtgctcagacccaacagcaaaggaactagaaagaaggacccagaaggcttgctttcctgcatctctgtgaagcctctctccttggccacagactgaactcgcagggagtgcagcaggaaggaacaaagacaggcaaacggcaacgtagcctgggctcactgtgctggggcatggcgggatcctccacagagaggaggggaccaattctggacagacagatgttgggaggatacagaggagatgccacttctcactcaccactaccagccagcctccagaaggccccagagagaccctgcaagaccacggagggagccgacacttgaatgtagtaataggcagggggccctgccaccccatccagccagaccccagctgaaccatgcgtcaggggcctagaggtggagttcttagctatccttggctttctgtgccagcctggctctgcccctcccccatgggctgtgtcctaaggcccatttgagaagctgaggctagttccaaaaacctctcctgacccctgcctgttggcagcccactccccagccccagccccttccatggtactgtagcaggggaattccctccccctccttgtgccttctttgtatataggcttctcaccgcgaccaataaacagctcccagtttgt

SEQ ID NO: 2579 - DNA, 4361 bp, Homo Sapiens
tgttaaggctctgggaccaacgctgggcgaaccagctccgctccggaggggtctgcgcggctggcctcgcccgccccctagcggacccgtgcgatagtgcagcctcagccccagcgcacagcgccgcatccagacgctgtccgcgcgcgcagcctgggaggcgctcctcgctcgcctcctgtacccatccagcgaccagccaggctgcggcgaggggattccaaccgaggctccagtgagagacctcagcttagcatcacattaggtgcagccggcaggccatcccaactcgggccgggagcgcacgcgtcactggggccgtcagtcgccgtgcaacttccccggggggagtcaactttaggttcgcctgcggactcggtgcagtggaagccgctgaacatcccgaggaactggcacgctgggggctctgggcttgtggccggtagaggattcccgctcatttgcagtggctcagaggagggtggacccagcagatccgtccgtggagtctccaggagtggagccccgggcgcccctacaccctccgacacgccggatccggcccagccgcgccaagccgtaaagggctcgaaggccggggcgcaccgctgccgccagggtcatggagggcgcgctcgcagccaactggagcgccgaggcagccaacgccagcgccgcgccgccgggggccgagggcaaccgcaccgccggacccccgcggcgcaacgaggccctggcgcgcgtggaggtggcggtgctgtgtctcatcctgctcctggcgctgagcgggaacgcgtgtgtgctgctggcgctgcgcaccacacgccagaagcactcgcgcctcttcttcttcatgaagcacctaagcatcgccgacctggtggtggcagtgtttcaggtgctgccgcagttgctgtgggacatcaccttccgcttctacgggcccgacctgctgtgccgcctggtcaagtacttgcaggtggtgggcatgttcgcctccacctacctgctgctgctcatgtccctggaccgctgcctggccatctgccagccgctgcgctcgctgcgccgccgcaccgaccgcctggcagtgctcgccacgtggctcggctgcctggtggccagcgcgccgcaggtgcacatcttctctctgcgcgaggtggctgacggcgtcttcgactgctgggccgtcttcatccagccctggggacccaaggcctacatcacatggatcacgctagctgtctacatcgtgccggtcatcgtgctcgctgcctgctacggccttatcagcttcaagatctggcagaacttgcggctcaagaccgctgcagcggcggcggccgaggcgccagagggcgcggcggctggcgatggggggcgcgtggccctggcgcgtgtcagcagcgtcaagctcatctccaaggccaagatccgcacggtcaagatgactttcatcatcgtgctggccttcatcgtgtgctggacgcctttcttcttcgtgcagatgtggagcgtctgggatgccaacgcgcccaaggaagcctcggccttcatcatcgtcatgctcctggccagcctcaacagctgctgcaacccctggatctacatgctgttcacgggccacctcttccacgaactcgtgcagcgcttcctgtgctgctccgccagctacctgaagggcagacgcctgggagagacgagtgccagcaaaaagagcaactcgtcctcctttgtcctgagccatcgcagctccagccagaggagctgctcccagccatccacggcgtgacccaccagccagggccagggctgcagcctgaggctcaggctgtgctggcataagtgctctgctcctaggtgatggcgtatgtttgtgtataaggtacctatcagtttgtatccctcccctccttggggtggcttcagtggggtggagagtggcctccatgatggaagatgataggggactcagccatcagacaacaccctggcctcctacacgtacttctaccaccctgaacccactgctgccctgggcagtgagtggcttgttttttctcctggacttgtaatttcactccagtatatttttacttcttcattctgggatattgtgaaaagcggtaaatataggattggtgaccaattgggtcaggaagtccagtgttctggacttggggtaagcagtggggttgggacctcagatgggaagggtggtgctaagatcctcctgacctcaaagtgtatttgcctttaagcgaacaaatgctggggtccttggggaccagcttgtcagagggtagccctaagagaaggggattaccttgtaagaccatctggcgcagtggacctattagaacttgggttaaaaatgtttaagaagctaatgtttaagaagcatttgggaaagaaaaagaaataaatgtatccagataggaaaagaagaagtaaaactatttgcagatgacacagttttgtatatagaaaatcctaaggaactcacacacacacacacacacacacacgcacacagctattagaactaataagcaagttccgcaaggtttcaagatacaagatcaatatacaaaaatgaattgtatttctttatactagcaacaaacaatatgaaaacgaagttaaataattccatttataataccatcagaaagaataaaataggaatcaacttaacaaaacaagtgcaagactgaaaactacaaaattggaaagaaattaaagaaggcttaaataaatggaaagacatcctgtgttcatggatcagacttagtattgttaagatggcaatactatcctaactgacatgcagattcagtgcaatccttatgaaaatcatagctggcttctttacagaaattgataagctagtcccaaaattcataaagaaatgcaagggacccagaatatccaaataagccttgaaaaagaacaaagttggtggattcacacttcctgatttcataatttacgataaaggtaatcagctcagtgtgttactggtttaaggatagacatacggagcagaataaagagtacagatatgaacacttatacttacggtcaattgatttttgacaaggttcccaagacaattcaatagagaaaggagagtcttttcaacaaatggcaccgagacaatgatatgcaagtgcaaaagaatgaggttggacctttactcacactatgtgcaaaaatcaactcaaaacgcatccaagatctaaatataagagctgaaactataaaatcttagaaagaaacataggcatagatctttgtaaccttgaattaggcagtggtttcttagatatgataccaaagacacaagcaaccaatggaaaaataggtaaattggacttaatcaagatttgaagcttttgtgattgaaaagaccctatcaagaaggtgaaaagataacctgcagaatgggagaaaatatttgcgagtcatatatatgataaggggcttgtatctggaatatataaataactcttataacacaacaataaggagaaaaataaatcaatttaaaaaatgggctaacggtttgaatagacatttctccaaagaagatatgcaaatggctactaagcacatgaaaaaatactcaacattattattcattagggaaatgcaagtcaaaatcacaatgagattccagtttacaatcactaggatggctacaataaaaagatggacaagaacgagtgtcggtgaggatgtagagaaactggtagaaatttaaattgttggtgggaatgtaaatggtgcacctgctttgaaaaacagtttggcagtacctcaaaaagttaaacgtagagtgaccatatgacccaggaatgccactcctaggtatttacccaagagaaatgaaaacgtacatacacacaaaaacttgtacaccaatgttcatagcaacattatttgtaatagccaaaaagtggaaacaacccaaatgtctaccaactgatgaatgggaaataaaatgtggtctgtccacgcaatggaacattattagactctaaaaagaaatgaagtactcacacatgccacaacatggatgagccttgaaaacttgctaagtgaaagaagccaggtgcaaaagcccacatattgtctgactgcattgaaatgcaatgtctaaaatggacgaatctatatagagtgaatatagattagcgtttgccagggcctggaggctgtgagagatgaggcatgactactaagggtttggggtttctttttcgggtgatgaaaatgttctgaaattagtggtgattgtgcacgattttgagaatgtactaaaaaccaatgaactttaaaaaataaaaataaacaaa

SEQ ID NO: 2580 - DNA, 332 bp, Homo Sapiens
tatacggctgcgagaagacgacagaaggggtagaaggccaggggggcatggagagtgcagctccattatagtgaagagccaaacatatgtgaactgtttgctgtgtggaggtgttagttctgctgcctaccatcttcatctctagcacctcccctgccaagagtcaaccactaagcaatcccacccaagcctggatgcttctagaggggcccactcccagctgggagagtgtaggggatatgctcacaccacattagcagcaaccaataaaaatgctggaaacaagcaaaaaaggaaaaaaaaaaaaaaaaaaaaaaaagtcgtatcgatgt

SEQ ID NO: 2581 - DNA, 455 bp, Homo Sapiens
tttgtacttatggtttttaatatttatacagagaaaaatagaaacagatgttgttgctgagtcaaacctgggtctgctttcctgggggtgaagtaaagccaaacatccacactgaggttttgcagtgggagaaaagagggtgtttatttgcagggcaccaagcaaggagaattgggcagctcatgattaataaatacacggcctccctgagggattacaagcaagggtttttaaaggcaggggtaaatctcaggaaagcagaagttacagtcgaaagtgtaaatcgacacttggaggttatacattggtttggcctaaaaaaggtggaatatcttgaagcaggagctcacaggtcataggtggaatcaaaaattctctgatttgtgactggttaggaaagtgaagcttcgtctgaaatcctggggtaagccgaaaggaatgttaaggtctggccc

SEQ ID NO: 2582 - DNA, 1950 bp, Homo Sapiens
gctctggcggctcccgcggctccggctggcggcttcgggccctgcacctgtgactctcggccgcgctcgccctcggcccgcccggcgccgcagccccatggccccgtccaggctgcagctcggcctccgcgccgcctactccggcatcagctccgtggccggcttctccatcttcctcgtctggacggtggtctaccgacagccggggaccgcggccatgggagggctcgcaggggtgctggcactgtgggtcctggtgacgcacgtgatgtacatgcaagattattggaggacctggctcaaggggctgcgcggcttcttcttcgtgggggtcctcttctcggccgtctccatcgctgccttctgcaccttcctcgtgctggccatcacccggcatcagagcctcacagaccccaccagctactacctctccagcgtctggagcttcatttccttcaagtgggccttcctgctcagcctctatgcccaccgctaccgggctgactttgctgacatcagcatcctcagcgatttctgacccagggggtgaggtctctgcaccctgggggggccttaggacctggactcagcctctgagatgttgggagaggctactcccaccccctggtgaccccagaactgtggcagaaaatacacagcaggacgagtgtggtctcccaggaagctgtcctgcccgtcccctttcgaggaaacctgagtgtggtagagaggggatcctgccatgttgctcctcatcagcctggccagagggcagctttagaccttttcaaatgaatctgttttcttttctttcttttttttttcttttttttttttttttgagatggagtcttactctgtcacccaggctggagtgcagtagtgcgatctcagctcactgcaacctccgcctcccaggttcaagcaattctcctgccttggcctctcaagtagctgggattacaggcatctgccaccatgcccggcaaatttttgtgtttttagtagagacagggttttgccatgttggccaggctggtctcgaactcctgatctcaggtgattcacccgcctcagccttccaaagtgctgggattataggtgtgagccaccgtgcccggcctggatctgttttcttagcacgcagtgaggaatctttgtacttaaggccagggcaacaaagtcaagaggtcaaggtgtagggccatgaggcctggacctatgctgcaggcaagggtttccatccccgctgccctaggcactctcttcccaaggccaggttgggcacctggggaggtcagttcagaaatatctagcagagacctcttaaacccccatcccagcaccccatcctgttgttcccagagctggtctcccatgagtgtgctagagccagatagccgtggccccccacccatctcactcacacacacaggcatccatacaccccagaagacttcccaaatgaggccagactcagggtcacggggaatgtgcttctgcccctgtaagggctttggggaagggggcaacatagtagaggctggaaagagcccccaaacctgtgcccatgcccctccagccctgcgtttccattctgccttctcagagtgcccttgctgcacccagaccaccggccaggagagaccttctctcccactccagcccctctcactgcccttcaactagagctttcacctttttacatttcccttctgaaggacacaaatctgcttttctgcccatacactggcccaagggctcacctaacttgggagggaaggggctgttggtacaaggatgattttctgttaggctgccattttgcacggtctccccctccccatctgatgtgtcctgcccctcagctctttgccttatctgtgtcactgtcactttagcaaaaatacagcggccatttgtatcaaaaaaaaaaaaaaaaaaaaaaaa

SEQ ID NO: 2583 - DNA, 2442 bp, Homo Sapiens
gtgaaaggagggaacgcaggtgagaaagcgagacaggcaggtagggaaatcgtgaggtgagcgtgatcctagctccttgtggcagagcctagagagaaggcgaggacgctgaagaaccaggcggacagctggcagagagagaagttggctagcatggaatcaccagaggagcctggagcatccatggatgagaactactttgtgaactacactttcaaagatcggtcacattcaggccgtgtggctcaaggcatcatgaaactgtgtctagaggaggagctctttgctgatgtcaccatttcggtggaaggccgggagtttcagctccatcggctggtcctctcagctcagagctgcttcttccgatccatgttcacttccaacctgaaggaggcccacaaccgggtgattgtgctgcaggatgtcagcgagtctgttttccagctcctggttgattatatctaccatgggactgtgaaacttcgagctgaggagttgcaggaaatttatgaggtgtcagacatgtatcagctgacatctctctttgaggaatgctctcggtttttggcccgcacagtgcaagtgggaaactgccttcaggtgatgtggctggcagatcggcacagtgatcctgagctctatacggctgccaagcactgtgccaagacccacctggcccagctgcagaatacagaggaatttctccacttgccccaccgcttactcacagatatcatctcggatggagttccgtgttctcagaacccaacagaggcaatagaagcctggatcaactttaataaagaggaaagagaggcttttgcagagtcactcaggacaagcttgaaggaaattggggagaatgtgcacatttacctgattgggaaagagtcatctcgtacccactcgttggctgtgtccttgcactgtgcagaagatgactccatcagtgtaagtggccaaaacagtttgtgccaccagatcactgcggcctgcaagcatggtggagacttgtatgtggtgggagggtccatcccacggcgcatgtggaagtgcaacaatgccaccgttgactgggagtggtgtgctcctttgcctcgggaccggctccagcacaccctggtgtctgtgcccgggaaagatgccatatattcactgggtggcaagacactgcaagataccctctccaacgcagtcatttattatcgcgtaggtgataatgtgtggacagagacaactcagctagaggtggctgtgtcaggggctgctggtgccaacctcaacgggatcatctacttactagggggggaggagaatgatctggacttctttaccaaaccttcccgactcatccagtgctttgacacagagacagacaaatgccatgtgaagccctatgtgctgccctttgcaggccgcatgcacgcagctgtgcataaagatctggtgttcatcgtggctgaaggggactccctggtgtgctacaatcccttgctagacagcttcacccggctttgccttcctgaggcctggagctctgccccatccctctggaagattgccagctgtaacgggagcatctatgtcttccgggaccgatataaaaagggggatgccaacacctacaagcttgaccctgccacttcagccataactgtcacaagaggtattaaggtgctgcttaccaatttgcagtttgtgttggcctaaggctgtggggaggggaggagaactgctcactccttttccctccccatacaaactcaaagtcccctgggccccaattcagagttatgttttttttggcacatactagaaaggcagtgcctcagcccttccctgaatccatggaggtgttctgtttggggctttttagactgctgctgctcagctggttgcttgaactgacagtaggccagcctgttctctgccattccctagtcatcctgtgcctcaccacagcttgcttagagcaagccttttctcagaccttaggcacagcctctcctctttacctgatcaatgttaaatgtaagcacccctgatcccaggacataaggaaagatgcccaattgtacttttgttctatagcctgtgaaatggctagttgatcatttttccacaaagaattaggtgttaagagttttccttcaggctttacttaggagaatggactaagctgaaggtgtacttcaccagcaagagtcaactctagaattcaggatgttccttctattgttttcttagccatctgtcaggaaatgtaactttggttttatttttggcttattccaaggggtaagccagaaaatagaaatgattatttctgattaatagcagaaactttttcaatctcaaatatataaggtgtctgctcttttaaaagctctaagctaagtcaagagctaggaactgttgatacaaataaaagtttttgaaggg

SEQ ID NO: 2584 - DNA, 220 bp, Homo Sapiens
  misc_feature (135)..(135): n is a, c, g, or t
acgacacaacgaccccgacgccagagccaacgccgaacgggtggcggctactcgcgcacccttagccactggcacttgacccgcggctcggagtgagacgccggcactagagctccagcgcaggagcgacgcgcngtccgaagccaagcggacccgccctctcgcgatatctagggaggaggcggggagagggcggggcgagaacaaagccgacctcctc

SEQ ID NO: 2585 - DNA, 536 bp, Homo Sapiens
  misc_feature (483)..(483): n is a, c, g, or t
tttttaatttctaaacatttttatttcaaatctcttttcacccctccccaaaaagacatgggtaggtacagcaatcataaaaaggagatacaaacacaagagtcaaatgtctctcgcactgacacttacaaaaaactgggaattgtacatggggtttccaaacaggacctgcagcagctactaacgtccctttacgagagtcaaacatgcctattaatacagtatatacagacaccccattctggaactaatctacagggacatccctaaccccaccccctctatccccagaaaaataccaaaacacacccaaagtgcatttgttttgtttatatcaaaacctctttccctttccccatcccaccctcagacccctcccaccccatttaagattggcctgcaagtctattttaaccatttagtatttttttatagtttatgaaaataaattatacagcaactattttaataaattaagcacanaaggaagggtaaaagaggaaaactaaatgggaagacaaaagccaggccacgct

SEQ ID NO: 2586 - DNA, 1930 bp, Homo Sapiens
cggaaggagaggaccgaggtctgccaaggaccatgggtgccgcgctggggacaggcacgcggctggctccctggccgggccgggcctgcggcgccctcccgcgctggacacccaccgcgcccgcccaaggctgccactccaagcctggcccggcgcgccctgtgcccctgaagaagcgcggatacgatgtcaccaggaaccctcatctcaacaaggggatggcctttacccttgaagaaaggctgcagcttggaatccacggcctaatcccgccctgctttctgagccaggacgtccagctcctccgaatcatgagatattacgagcggcagcagagtgacctggacaagtacatcattctcatgacactccaagaccggaacgagaagctcttctaccgagtgctgacttcggatgtggagaagttcatgccaatcgtgtacacgcctaccgtggggctggcctgtcagcactatggcctgactttccgcaggccccgtggactgttcatcaccattcatgacaaaggtcatcttgcaacaatgctgaattcttggccagaagacaatattaaggccgtggtggtgactgatggggagcgcatcctgggcctgggagacctgggctgctacggcatgggcatccctgtgggcaagctggccctgtacacggcatgcggaggggtgaacccgcagcagtgcctccctgtgctgctggacgtcggcaccaacaatgaggagctgctcagagaccctctgtacatcggcctgaaacaccagcgcgtgcacgggaaggcatacgatgacttgctggatgagttcatgcaggctgtgacagacaagtttggaataaattgcctcatccaatttgaagacttcgccaatgccaatgccttccgcctgctcaacaaataccgtaacaagtactgcatgttcaatgatgacatccaaggcacagcctccgttgctgtggcagggatcttggctgctctgcgaatcaccaacaacaagctttccaatcacgtgtttgttttccaaggtgcaggcgaggcagctatgggcattgcccacctccttgtcatggccctagagaaagaaggtgtaccgaaggcagaggccacaagaaagatctggatggtggactctaaagggctcattgtcaaggggaggagccacctgaaccatgaaaaggagatgtttgcccaagaccatcctgaagtcaactccctggaggaggtggtgaggctggtgaagcccacagccatcataggtgttgctgccatcgcaggagccttcacggagcagattctgagggacatggcctccttccacgagcgccctatcatctttgccctgagcaaccccaccagcaaggccgagtgcacggctgagaagtgctaccgggtcaccgagggccgagggatttttgccagtggaagtccttttaagagtgtgactctggaagatggcaagaccttcattcctgggcagggaaacaatgcttacgtgttccccggggtggcactgggagtcatcgccggcgggatccggcacatcccagatgagatcttcctcctgacagcagagcaaattgcccaggaagtctctgagcagcatctgtcccaggggagactctatccaccactcagcaccatccgagacgtgtctttgagaattgccatcaaagttctcgactacgcgtacaaacacaacctggcttcctactacccagagcctaaggacaaggaggcttttgtaagatccctggtctacactccagactatgactcctttacactggacagctacacttggcccaaggaagccatgaatgttcagacggtctgaggcagtctcagaggctagtatggggctagatgaagcccagagtaacacccacaatataaatgggttccaaaatggcccaagtg

SEQ ID NO: 2587 - DNA, 391 bp, Homo Sapiens
  misc_feature (169)..(169): n is a, c, g, or t
  misc_feature (369)..(369): n is a, c, g, or t
  misc_feature (378)..(378): n is a, c, g, or t
gacatttaagtgacatgttgacctatggctgcacaaggctggagattggggtgcagagtgtttatgaagatgtggctagagacaccaacaggggccacactgtgaaggcagtgtgtgagtcatttcacctggccaaagattccggttttaaagtggtggcccatatgangcctgacctgccaaacgtgggactagaaagagacattgaacagttcacagagttttttgagaaccctgcttttcgtcccgatgggctgaaactctatcctaccctggtgattcgtgggaccgggctttatgagctttggaaatcaggaagatataagagttacttctcctagtgacctgggttgaattgggtggctcggntcctagccntcgttgcctccat

SEQ ID NO: 2588 - DNA, 453 bp, Homo Sapiens
ttttttttttttttttttttggtaaaaatttctgaattttattatacttaaatgaactcaagtacaagaaacaaagttaaaatatgtaagtataataaaatatgtggcataattaaatgatattgggataaaaaaaaaaaaacctggaaatgttttacagaggtttttcatttgatatcttaccatagcagtagcaaagagcttattaggctaatgttcaaaaacacatttccttaccataatattgatgccagcaaattggggctacagctacatgaatgaatgttttgctcagttttttctggtttacaaagaaacaccaagcaactgacctgcaaaggggaccgaagtagacccaggccagacagttgttgcttaattacatcataactgaaatagcaacatggctcttgcaccctaaaacatctgctcactagcactgaaattaaatag

SEQ ID NO: 2589 - DNA, 199 bp, Homo Sapiens
tttgcccggagacatacagctagtgacgaatggactgatggtttgaacttaacgtctatttgacttaaggtcctgcaccctgccacttgtaattttcagaatcactgataatctgaaataatgcagcttaaaacatgttttcttaattaaaagtataattggatggtggtcaggttgtttaaatgccaaaaaaaaaaaa

SEQ ID NO: 2590 - DNA, 384 bp, Homo Sapiens
tttttttttttttttttttttttttttttttttttaggaaaacaggggttttaatatttaagtaacaaaacattcagggtaatactcaatgcatatacaataagaaagagcaacaacaacaaaattacaaagcccaatctaactatatggggggtttcaaacaattaaatggtggatagagaatgcgcttattaaaaacccagctgagccacaccgcactacctgaaacctgaccagggactttctggggggagaagggagagctcattgggccctggggccttcaactcaaatggatgctcttcaactcaaatccagagagcacttaacaaactccatgctctagattggtcaaccctcctccttgcttttcttttttcttta

SEQ ID NO: 2591 - DNA, 1872 bp, Homo Sapiens
ggcacaagcctctctctctctccctctctctctccctctctctctctccctgtgtcgcttaaacaacagtcctaacttttgtgtgttgcaaatataaaaggcaagccatgtgacagagggacagaagaacaaaagcatttggaagtaacaggacctctttctagctctcagaaaagtctgagaagaaaggagccctgcgttcccctaagctgtgcagcagatactgtgatgatggattgcaagtgcaaagagtaagacaaaactccagcacataaaggacaatgacaaccagaaagcttcagcccgatcctgccctttccttgaacgggactggatcctaggaggtgaagccatttccaattttttgtcctctgcctccctctgctgttcttctagagaagtttttccttacaacaatgagaaaacatgtactagctgcatccttttctatgctctccctgctggtgataatgggggatacagacagtaaaacggacagctcattcataatggactcggaccctcgacgctgcatgaggcaccactatgtggattctatcagtcacccattgtacaagtgtagctcaaagatggtgctcctggccaggtgcgaggggcactgcagccaggcgtcacgctccgagcctttggtgtcgttcagcactgtcctcaagcaacccttccgttcctcctgtcactgctgccggccccagacttccaagctgaaggcactgcggctgcgatgctcagggggcatgcgactcactgccacctaccggtacatcctctcctgtcactgcgaggaatgcaattcctgaggcccgctgctgtgtgtggcttctggatgggacaactgtagaggcagttcgaccagccagggaaagactggcaagaaaagagttaaggcaaaaaaggatgcaacaattctcccgggactctgcatattctagtaataaagactctacatgcttgttgacagagagagatactctgggaacttctttgcagttcccatctcctttctctggtacaatttcttttggttcattttcagattcaggcattttcccccttggctctcaatgctgtttgggtttccaacaattcagcattagtgggaaaaagtgggccctcatacacaagcgtgtcaggctgtcagtgtttggtgcacgctggggaagaatttactttggaaagtagaaaagcccagcttttcctgggacatcttctgttattgttgatgtttttttttaccttgtcattttggtctaaggttgccattgctgctaaaggttaccgatttcaaagtccagataccaagcatgtggatatgtttagctacgtttactcacagccagcgaaactgacattaaaataactaacaaacagattcttttatgtgatgctggaactcttgacagctataattattattcagaaatgactttttgaaagtaaaagcagcataaagaatttgtcacaggaaggctgtctcagataaattatggtaaaattttgtaagggagcagacttttaaagacttgcacaaatacggatcctgcactgactctggaaaaggcatatatgtactagtggcatggagaatgcaccatactcatgcatgcaaattagacaaccaagtatgaatctatttgtgggtgtgctatagctttagccgtgtcacgggcatcattctctaatatccacttgtccatgtgaaacatgttgccaaaatggtcctggcttgtcttctgaacgtttgggtcaaatgtgttttggtcctggaggctcaaattttgagttattcccacgttttgaaataaaaagagtatattcaaaaaaaaaaaaaaaaaaaaaaaaaaaaaaaaaaaa

SEQ ID NO: 2592 - DNA, 4666 bp, Homo Sapiens
cggtgtccgggctggtgatggggttaattccctttcgtaagactcttacttgcacccacccagccccgccgtcgccccgccgcgccgcgctccaaccgcctcctcctcctcagtaacgcgggccacggaaaggtatgatatatttgatccaagacagtccattccagtccgggaatctacagtggtgacaaggacatgggactcctcctgccagattacagatggttcactacagttgacatcctggctgacaactgtgaaaaagaaccttggattattttattttatttttgtgggacaccacaatcccaaatccaaaggacgcatcaggcttcaagctccctgtagaattcgaaaataaccttttctaatgaggatgtctgatactgttactgtaaaagatgaaactgcaacaatgaaggatttggaggcagaagtgaaagatacaaccagagttgaaaatcttatcaaatcagaaaactatgggaagattttggtagagaagaatgaacattgtattgagaacaatatagatttgcagcggccattgcagtcatttggacagacaggaaaaaggtctaagtcaagctcaaagttaaagctagttcggagccttgcagtgtgtgaagaatctccaccaccccctgcaccagagatatcacaggagaaccaggagaaaattcagatccagttaacacaatcatttgagaaagaagagaagccctcaaaagatgaagcagaaaaagaaaaggccagtgataagttgcccagaaaaatgttatcaagagattccagtcaagaatacactgattcaactggcatagatctacatgaatttttagtaaatacattaaaaaacaatcccagggacagaatgatgctgctgaaattggaacaagaaattttagatttcattggtaataatgagtctccacgtaaaaaattccccccaatgacatcttaccataggatgctattacacagagtagccgcttactttggattagaccacaatgttgatcagagtgggaagtctgtcatagtaaacaaaactagcaatacaagaatacctgatcagaaatttaatgaacatattaaggatgataaaggtgaagactttcagaaacgttatatcctcaagagagataactctagctttgacaaagatgataaccagatgagaatacgtttgaaagatgacagaagaagcaaatctatagaagaaagagaagaagagtaccagagagccagagaccgaatattttcccaagattccctgtgttcccaagagaattacattattgacaaaagactccaagacgaggatgccagtagtacccagcagaggcgccagatatttagagttaataaagatgcttcagggagatctacaaatagccatcaaagcagcactgagaatgagttgaagtactcggaaccacgaccctggagcagcacagattcagacagctctcttcgaaacctgaaacctgctgtaaccaaagccagcagcttcagtggaatctcagtcctgacaagaggtgatagttctggaagcagcaaaagcataggcaggctttcaaaaacaggttctgagtcttctggtagtgtagggtcatctacaggctctctttctcacatccagcagcctcttccaggtacagctctcagccagtcttctcatggcgcacctgtcgtctatccaactgtcagcactcatagttctctttcctttgatggtggcctaaatgggcaagtcgcatctcctagcactagcttctttttgcttcccttggaagcggcaggcataccacctggcagtattctgatcaacccacaaacaggtcagcccttcataaacccagatgggagtccagttgtgtataatcctcctatgactcaacaaccagttagatcccaagtgcctggacctccacagccacctctgccagccccacctcaacaaccagcagctaatcacattttctcacaggataacctagggtctcagtttagccacatgagtcttgctcgccagccatctgctgatggttctgaccctcatgccgccatgttccagtccactgtggttcttcagtctccacagcagtctggttatatcatgacagcagcccctccaccacatcctcctccaccgccaccaccaccacctcctcctcctcccctaccacctgggcagccagtccctactgctggatatcctgcctctggtcatcctgtcagccagcctgtgctccagcagcagggatatattcagcagccatcaccacagatgccagcctgttattgcgctccaggccactatcactccagccaacctcagtatcgcccagtcccttctgttcattacaattcacatctaaaccaaccactgccacaacctgcgcagcagacaggttatcaagttatacccaaccagcagcaaaactaccaaggaatagttggagttcagcaaccccagagtcagagcctagtcagtggccaacccaacagcattggaaatcagattcaaggagtggtcatcccctatacttcagtgccaacatatcaggtttcactgcctcaaggttctcaaggaattccccatcagacttatcaacagcctgttatgttccctaatcagtctaatcaaggatctatgcccacaacaggaatgcctgtttactatagtgtcattccacctggtcaacaaaacaatttaagctcttcagtaggttacctgcaacatccaggatcagaacaagtacaatttcctcgaaccacttcaccatgcagttcccagcagcttcaaggccaccaatgtacagctggaccaccaccgccacctggtggggggatggtgatgatgcagctcagtgtaccaaacaatccacaatcttgtgcccactcacccccgcagtggaaacaaaacaaatattactgtgatcaccagagaggacagaagtgtgtagaatttagcagtgtagacaatattgtccagcacagccctcaactcagtagccccattatttcaccagctcagtcgccagcaccagctcagctgtccaccctgaaaactgtacgtccctctggaccaccactttccatcatgccccaattttctagaccttttgtccccgggcaaggagattccaggtatccattacttggccagccactgcagtacaatcctcctgctgttctgcacggacacattccaaaccaacagggtcagcctggcagcaggcatggaaaccgaggaaggagacaagctaaaaaagctgcatccacagaccttggagcaggagaaacagttgttgggaaggtcttggaaattactgaactaccagatggaataactcgcatggaagctgaaaagctttttggggaactctttaaaattggcgccaagatccggtggctccgggacccccagtcccaaccacgtcgtcaccccctctgctgtggcagtggggacaacactgccaaccctgaacgctctaaacccagtgacttggcctccacctacaccgtcttagccacattcccctccatttcagctgcacagaatgcactgaagaaacaaattaactcagttaacaagtttaagctgagaacaagcaagaagcactatgactttcacattttggaaagggcaagttctcagtaacagccacctttggacccttcgcctttatggttcccctgccctctcccatctttgattggcttggtatttggagcttctgttaacattatagagactcctaggatgtgtgttcatggcattatagcctttgaagaaaggccagtgatccagcaaagggggaaaaatatgcatttcaccccacatgactaggaatccacatcagaatgatacagagttagcaggtttttctaaggaaatgccattcaaatgcctcctaacttttatagttattttgttttatatttctaaattcttgtatcagatccaaagctctattgtacagcaaattattcttcaaaatgattataaccagttgcaccctgtatttctttttgcagccagcacaatgtgacccaacttaaaatttgggggaaaaagaatgcaggagtgaaataaccaagtcaaaaccatgtactatctccttgggggttagggatgctaagaagagcccacaaatagaggattactcttcccctgaatctctaaactcagaaacaattaccaaaaaatacataactcttccttgtagggccctttccttattcatttaggtagtgtgaacattaagtataaaataaattatgttcttaatgcctcttaaaccacttacattcaaaggggaacagaaatcattctaagcaggaaaatacttccactttttttttttcaagtatctctctaataactaaatgccacttatttgcattctccttgtggattttttgtcacctaaggaaatgcatttgatgagtgctggaaacttcttaagtgctttacagtttgttttcattgtttgcagcggatcactggacatcaaagattcattgcacttatgaacaaggaaccttcttttcaatttctgtgtaatttgcaaggctgtacaatgtgtgctgatgcaagcctttttcagttcaagagaataaatgtttacaaatataaaaaaaaaaaaaaaaaaaa

SEQ ID NO: 2593 - DNA, 4198 bp, Homo Sapiens
ctgctatcaaaaaggccataaggattttgtccccaaatttcacatgagctaccttgcttcaaactactgagatgaagggggcaagattatttgtccttctttctagtttatggagtgggggcattgggcttaacaacagtaagcattcttggactatacctgaggatgggaactctcagaagactatgccttctgcttcagttcctccaaataaaatacaaagtttgcaaatactgccaaccactcgggtcatgtcggcggagatagctacaactccagaggcaagaacttctgaagacagtcttcttaaatcaacactgcctccctcagaaacaagtgcacctgctgagggtgtgagaaatcaaactctcacatccacagagaaagcagaaggagtggtcaagttacagaatcttaccctcccaaccaacgctagcatcaagttcaatcctggagcagaatcagtggtcctttccaattctacactgaaatttcttcagagctttgccagaaagtcaaatgaacaagcaacttctctaaacacagttggaggcactggaggcattggaggcgttggaggcactggaggcgtgggaaatcgagccccacgggaaacatacctcagccggggtgacagcagttccagccaaagaactgactaccaaaaatcaaatttcgaaacaactagaggaaagaattggtgtgcttatgtacataccaggttatctcccacagtgacattggacaaccaggtcacttatgtcccaggtgggaaaggaccttgtggctggaccggtggatcctgtcctcagagatctcagaagatatccaatcctgtctataggatgcaacataaaattgtcacctcattggattggaggtgctgtcctggatacagtgggccgaaatgtcaactaagagcccaggaacagcaaagtttgatacacaccaaccaggctgaaagtcatacagctgttggcagaggagtagctgagcagcagcagcagcaaggctgtggtgacccagaagtgatgcaaaaaatgactgatcaggtgaactaccaggcaatgaaactgactcttctgcagaagaagattgacaatatttctttgactgtgaatgatgtaaggaacacttactcctccctagaaggaaaagtcagcgaagataaaagcagagaatttcaatctcttctaaaaggtctaaaatccaaaagcattaatgtactgataagagacatagtaagagaacaatttaaaatttttcaaaatgacatgcaagagactgtagcacagctcttcaagactgtatcaagtctatcagaggacctcgaaagcaccaggcaaataattcaaaaagttaatgaatctgtggtttcaatagcagcccagcaaaagtttgttttggtgcaagagaatcggcccactttgactgatatagtggaactaaggaatcacattgtgaatgtaaggcaagaaatgactcttacatgtgagaagcctattaaagaactagaagtaaagcagactcatttagaaggtgctctagaacaggaacactcaagaagcattctgtattatgaatccctcaataaaactctttctaaattgaaggaagtacatgagcagcttttatcaactgaacaggtatcagaccagaagaatgctccagctgctgagtcagttagcaataatgtcactgagtacatgtctactttacatgaaaatataaagaagcagagtttgatgatgctgcaaatgtttgaagatttgcacattcaagaaagcaagattaacaatctcaccgtctctttggagatggagaaagagtctctcagaggtgaatgtgaagacatgttatccaaatgcagaaatgattttaaatttcaacttaaggacacagaagagaatttacatgtgttaaatcaaacattggctgaagttctctttccaatggacaataagatggacaaaatgagtgagcaactaaatgatttgacttatgatatggagatccttcaacccttgcttgagcagggagcatcactcagacagacaatgacatatgaacaaccaaaggaagcaatagtgataaggaaaaagatagaaaatctgactagtgctgtcaatagtctaaattttattatcaaagaacttacaaaaagacacaacttacttagaaatgaagtacagggtcgtgatgatgccttagaaagacgtatcaatgaatatgccttagaaatggaagatggcctcaataagacaatgactattataaataatgctattgatttcattcaagataactatgccctaaaagagactttaagtactattaaggataatagtgagatccatcataaatgtacctccgatatggaaactattttgacatttattcctcagttccaccgtctgaatgattctattcagactttggtcaatgacaatcagagatataactttgttttgcaagtcgccaagacccttgcaggtattcccagagatgagaaactaaatcagtccaacttccaaaagatgtatcaaatgttcaatgaaaccacttcccaagtgagaaaataccagcaaaatatgagtcatttggaagaaaaactactcttaactaccaagatttccaaaaattttgagactcggttgcaagacattgagtctaaagttacccagacgctcataccttattatatttcagttaaaaaaggcagtgtagttacaaatgagagagatcaggctcttcaactgcaagtattaaattccagatttaaggcgttggaagcaaaatctatccatctttcaattaacttcttttcgcttaacaaaactctccacgaagttttaacaatgtgtcacaatgcttctacaagtgtgtcagaactgaatgctaccatccctaagtggataaaacattccctgccagatattcaacttcttcagaaaggtctaacagaatttgtggaaccaataattcaaataaaaactcaagctgccctatctaattcaacttgttgtatagatcgatcgttgcctggtagtctggcaaatgttgtcaagtctcagaagcaagtaaaatcattgccaaagaaaattaacgcacttaagaaaccaacggtaaatcttaccacagtcctgataggccggactcaaagaaacacggacaacataatatatcctgaggagtattcaagctgtagtcggcatccgtgccaaaatgggggcacgtgcataaatggaagaactagctttacctgtgcctgcagacatccttttactggtgacaactgcactatcaagcttgtggaagaaaatgctttagctccagatttttccaaaggatcttacagatatgcacccatggtggcattttttgcatctcatacgtatggaatgactatacctggtcctatcctgtttaataacttggatgtcaattatggagcttcatataccccaagaactggaaaatttagaattccgtatcttggagtatatgttttcaagtacaccatcgagtcatttagtgctcatatttctggatttttagtggttgatggaatagacaagcttgcatttgagtctgaaaatattaacagtgaaatacactgtgatagggttttaactggggatgccttattagaattaaattatgggcaggaagtctggttacgacttgcaaaaggaacaattccagccaagtttccccctgttactacatttagtggctatttattatatcgtacataagttagtatgaaaaacagactatcacctttattgagaaacagccagtgttttcatttatctttgcttgcacatctgctctgttttggtttttctacaggaaatgaaaatcaacttgtttttttaatatgagtaaacttgtatgtctattttataaaattatttgaatattgtttaatgtctgaatatgaaagagttcttgatcctaaagaaatttagtggcacagaaaacaaagtgaatttgttagcataattattcctattcttatttcttcattttaagtcattgcaatggaaagtaatattataaaacggtaattacaacatattatcagtcacagttttctttccaattaaacacttaacttttgttattccctgtatataaatatataacacacattttctagattcacaaatttaaataaattactcaaaaaatg

SEQ ID NO: 2594 - DNA, 424 bp, Homo Sapiens
tttaacttagatgggggtcttgctatggtgcccaggctgctcttgaactcctggacgctcaagtgatcctcccaaagcatagggattacaggcaccccacaacaaagaattacctggccccaaatgtctgttgtgttgaggtcaagaaatggacagaaacacaaactggcttatatttagacaacttacattaaatataacttctgccaaagtataggtagtctaagaattgaaaatatcaagacctttacaagtggttggcacctggcaggtatacagaaccactgggtcacataatccccagaggcaacattcacacagcgatagcagtagcactactaaaaggaaatggtgtgaccatcaatttggtgcttaaaaaccattctttttactgcaataaaacccaacaataaatgttagttca

SEQ ID NO: 2595 - DNA, 318 bp, Homo Sapiens
tcgcatgcacgcgtacgtaagcttggatcctctagagcggccgcctactactactactaaattcgcggccgcgtcgacaggagattgggtcctgggaattgcctcatgattcaatctgagacagcggatgtctcttctctcccttcttaatcagtttttttaatgtagctgctagtggggcaagtataaccaccaatcctcacgtgaagccttttaggtgattcctgggagtggatgcctcatctcctggctctgcccactaatgtggcctgtgcacacactgaagttgagcaagttaagctggagagaaataaataa

SEQ ID NO: 2596 - DNA, 492 bp, Homo Sapiens
ccacgcagttgactatgatggacgggtacttgcggctgagccagcggaagaacgccgggactcccatagcggcacacggctggaggcggcggccgaccggctgacgagcgtaaccaaagagacgggagcagcggcagagggcaccagcacttcctcccacgtgcgcgctggagaacggaagtgacgtcacggcgccgccgccggggaagctgggaaggaggcttcgctggatgagggagcggcggaaaagggccttgccgggctgtttgtgggaggcggagtccggcggcggaccgggtggcgaaggctgcagctcgccctcggtggtcccagccccggagcgcgaggccgagcgcgtctgagttgcgggggctcacgggcgactgctctgccggggctccgccgggatctcccagccccagccctccggctccctgtgcacagaatcgctgcgctctgcatgcccgggaggaggtctcccttgcccgtttg

SEQ ID NO: 2597 - DNA, 403 bp, Homo Sapiens
  misc_feature (243)..(243): n is a, c, g, or t
gctcgccccctccgccgccgccgcccgcccctgcgactacgctgcggcctcccgcccgctcccgctcgctcccgcggccctcgctcgcctcgcgccggcagttttgggcctacacctcccctccccccgccagccgccaaagacttgaccacgtaacgagcccaactcccccgaacgccgcccgccgctcgccatggatgccggtgtgactgaaagtggactaaatgtgactctcaccattcngcttcttatgcacggaaaggaagtaggaagcatcattgggaagaaaggggagtcggataagaggatccgcgaggagagtggcgcgcggatcaacatctcagaggggaattgtccggagagaatcatcactctaaccggccgaccaaagccatctttgaag

SEQ ID NO: 2598 - DNA, 403 bp, Homo Sapiens
ttttttttttttttaaatcataggaaacatttttagtgaaggcgtttgttttaaatgtattctaacctagcaatgtagaaagcaggcaaacatttaaaaaaatttaaccagtttctaaaacatagtttggagctcagattctggggaaatgattaacacaccctacatccaaggtctcctttcctttctagaaagaaagcatctttaaacatacatattcatcagaaatacaaatatttgtcatcagtgatactaatttccaggcaaacattttaattgcagtcaatgtattagattctaccaggttttaatttggatcggtaatacgggtttgattagggttctaggcctaattataggtcactagtcttcctttaggattatgcaccatcttgttatttta

SEQ ID NO: 2599 - DNA, 468 bp, Homo Sapiens
  misc_feature (162)..(162): n is a, c, g, or t
  misc_feature (339)..(339): n is a, c, g, or t
  misc_feature (348)..(348): n is a, c, g, or t
  misc_feature (358)..(358): n is a, c, g, or t
  misc_feature (369)..(369): n is a, c, g, or t
  misc_feature (388)..(388): n is a, c, g, or t
  misc_feature (393)..(393): n is a, c, g, or t
  misc_feature (418)..(418): n is a, c, g, or t
  misc_feature (424)..(424): n is a, c, g, or t
  misc_feature (462)..(462): n is a, c, g, or t
gaaagatgccacattcctgcagcctctcttggtgcagtggaatacagtcttgggcgaggtggcgtggatgagctggtgaaagaggatgctgcccacatccaaaggctccagaggatcctgggcctgggcagctgagctcccctgcatttgggaacctcaggncgtaacttgggtgtagagctcatgaaaggtgcttgtgtttctccagctttttttcaccagtgcttaccagactggctcaggttttgggaattctaagggtgagctgggtaggaaacagggagagggtaggaaagaagcccctggggatgccttcccagaattcatttgattgggatnccctgcatnacttgctttngggaacacagnaagaggcttttgacacagntgagnttttgggagcatttttaaagggagntccagnttaaggcaaacaactcttttgcatttttaaggcccagnaagagt

SEQ ID NO: 2600 - DNA, 256 bp, Homo Sapiens
ttttttttttttgtttagctcatcagctattgttagtgttagtgtattttatgtgtggctgaagacaattgtctgcttccagtgtggcccagggaaaccaaaagattggacacgcgtgctctagccaacgttcattccagggctcctgtgtcaatctgctgttcaactcagcctttcagcacactcgggtcctgcttacctgggcagtttgtggcaggagctgtggaggctagggcatacccccttcgcagcctct

SEQ ID NO: 2601 - DNA, 547 bp, Homo Sapiens
acaggtcccctaaaactaattccaacaagcactctgaagccttctcattcacaggttatggctactttccagataatccaacagctaaatcaccagtttccaaagggcatttgcatcacctaatggaaagcatcggattcttatacaccagatgttcttgacagctcatcccgtcattcccccctgcacaaaagttgctataccagcggacaagcaagacaaactactgagcttcttttgatggtcaagtagatataatatcactgccagcaaaacagcacaaaagtgtcttcttcacagtatcactaccagttgggactatgctaagtaaatcagcttgcctagatgaggaccccttctatacttgggtagcccaggatttgaaggagatactctgacctgtgccagtggtaagtgactaatacttttacacactgaactggtcctgggaactgagatggcttctttgtaagtgaagaatatacaacataatcttgaagaacggcacagtggtatgggccccaagcatactttatgtgtgtacgga

SEQ ID NO: 2602 - DNA, 640 bp, Homo Sapiens
tggcgaattcggcacgagggagacaggaaggtggcaaaggaaggagcccatttgcatgacaataattgagccaagaatagaaagccacagggatgcaagggtgaggctggcggctgagctgggctaaacctcacaaatcagactacccagctctgctccgcaggggaagggagactgagccctgggccaggcttggcagagagggaagcgggaggacacgaccccagggcattgtgggaacactggccaggctggactttgccttcctcctcgtcctttagccgggagcctgtctttgcttgcctttgcctttgaggctctgtggctgtggggctgagtggcatcatggcggctcagaaagatctctgggacgccattgtgattggggcggggatccagggctgcttcactgcataccacctggccaaacacaggaagaggatcctcctgctggagcagttctttctaccacactcccgaggaagctcccatggacaaagccggataatccgaaaggcgtacctggaagacttttacacccggatgatgcatgagtgctatcagatatgggcccagctggagcacgaggctggaacccaattgcacaggcagactggattactgctgctgggaatgaaaa

SEQ ID NO: 2603 - DNA, 2990 bp, Homo Sapiens
cgctggggcgctttccgaggaaattcgggactcgagtttcccggggaagaggcgcggcctgagcccggcgagggtggggagggcaggcgcaggtggaccccggcgccccccgagccccgctgtgaccttggccgcgggggaggggctgggccgctgcggggcagtcgcggccgccagagggggcagcggagaagaacttgcccaacttggcggcgcgggctggggcggttctgcgcctccgcgcccgcctccccggcctccgccttctcccctcccgcgagcctcctcccctcccgcgagcctcctcccctgggccctcctcccgtcctccccgccgccgccggtcccggtgcgcgcccatccctgcccgcagccccgcgcgccggccgagtcgctgagccgcggctgccggacgggacgggaccggctaggctgggcgcgccccccgggccccgccgtgggcatgggcgcactggcccgggcgctgctgctgcctctgctggcccagtggctcctgcgcgccgccccggagctggcccccgcgcccttcacgctgcccctccgggtggccgcggccacgaaccgcgtagttgcgcccaccccgggacccgggacccctgccgagcgccacgccgacggcttggcgctcgccctggagcctgccctggcgtcccccgcgggcgccgccaacttcttggccatggtagacaacctgcagggggactctggccgcggctactacctggagatgctgatcgggacccccccgcagaagctacagattctcgttgacactggaagcagtaactttgccgtggcaggaaccccgcactcctacatagacacgtactttgacacagagaggtctagcacataccgctccaagggctttgacgtcacagtgaagtacacacaaggaagctggacgggcttcgttggggaagacctcgtcaccatccccaaaggcttcaatacttcttttcttgtcaacattgccactatttttgaatcagagaatttctttttgcctgggattaaatggaatggaatacttggcctagcttatgccacacttgccaagccatcaagttctctggagaccttcttcgactccctggtgacacaagcaaacatccccaacgttttctccatgcagatgtgtggagccggcttgcccgttgctggatctgggaccaacggaggtagtcttgtcttgggtggaattgaaccaagtttgtataaaggagacatctggtatacccctattaaggaagagtggtactaccagatagaaattctgaaattggaaattggaggccaaagccttaatctggactgcagagagtataacgcagacaaggccatcgtggacagtggcaccacgctgctgcgcctgccccagaaggtgtttgatgcggtggtggaagctgtggcccgcgcatctctgattccagaattctctgatggtttctggactgggtcccagctggcgtgctggacgaattcggaaacaccttggtcttacttccctaaaatctccatctacctgagagacgagaactccagcaggtcattccgtatcacaatcctgcctcagctttacattcagcccatgatgggggccggcctgaattatgaatgttaccgattcggcatttccccatccacaaatgcgctggtgatcggtgccacggtgatggagggcttctacgtcatcttcgacagagcccagaagagggtgggcttcgcagcgagcccctgtgcagaaattgcgggtgctgcagtgtctgaaatttccgggcctttctcaacagaggatgtagccagcaactgtgtccccgctcagtctttgagcgagcccattttgtggattgtgtcctatgcgctcatgagcgtctgtggagccatcctccttgtcttaatcgtcctgctgctgctgccgttccggtgtcagcgtcgcccccgtgaccctgaggtcgtcaatgatgagtcctctctggtcagacatcgctggaaatgaatagccaggcctgacctcaagcaaccatgaactcagctattaagaaaatcacatttccagggcagcagccgggatcgatggtggcgctttctcctgtgcccacccgtcttcaatctctgttctgctcccagatgccttctagattcactgtcttttgattcttgattttcaagctttcaaatcctccctacttccaagaaaaataattaaaaaaaaaacttcattctaaaccaaaacagagtggattgggctgcaggctctatggggttcgttatgccaaagtgtctacatgtgccaccaacataaaacaaaaccaagccttggctcgttctcttctctcttcaatctctggaaaaataagtacatatagttgataacccctcttagcttacaggaagctttttgtattaattgcctttgaggttattttccgccagacctcaacctgggtcaaagtggtacaggaaggcttgcagtatgatggcaggagaatcagcctggggcctggggatgtaaccaagctgtacccttgagacctggaaccagagccacaggccccttttgtgggtttctctgtgctctgaatgggagccagaattcactaggaggtcatcaaccgatggtcctcacaagcctcttctgaagatggaaggccttttgcccgttgaggtagaggggaaggaaatctcctcttttgtacccaatacttatgttgtattgttggtgcgaaagtaaaaacactacctcttttgagactttgcccagggtcctgtgcctggatgggggtgcaggcagccttgaccacggctgttcccctcacccaaaagaattatcatcccaacagccaagacccaacaggtgctgaactgtgcatcaaccaggaagagttctatccccaagctggccactatcacatatgcttactcttgcttaaaattaataaatcatgttttgatgagaaaaaactatt

SEQ ID NO: 2604 - DNA, 345 bp, Homo Sapiens
atgtcggccctcagcctcctcattctgggcctgctcacggcagtgccacctgccagctgtcagcaaggcctggggaaccttcagccctggatgcagggccttatcgcggtggccgtgttcctggtcctcgttgcaatcgcctttgcagtcaaccacttctggtgccaggaggagccggagcctgcacacatgatcctgaccgtcggaaacaaggcagatggagtcctggtgggaacagatggaaggtactcttcgatggcggccagtttcaggtccagtgagcatgagaatgcctatgagaatgtgcccgaggaggaaggcaaggtccgcagcaccccgatgtaa

SEQ ID NO: 2605 - DNA, 575 bp, Homo Sapiens
  misc_feature (468)..(468): n is a, c, g, or t
tacgggccctaccgtgtgcgcataaagaggaggcgcttgccttcagcttgtgggaaatcccgaagatggccaaagacaactcaactgttcgttgcttccagggcctgctgatttttggaaatgtgattattggttgttgcggcattgccctgactgcggagtgcatcttctttgtatctgaccaacacagcctctacccactgcttgaagccaccgacaacgatgacatctatggggctgcctggatcggcatatttgtgggcatctgcctcttctgcctgtctgttctaggcattgtaggcatcatgaagtccagcaggaaaattcttctggcgtatttcattctgatgtttatagtatatgcctttgaagtggcatcttgtatcacagcagcaacacaacgagactttttcacacccaacctcttcctgaagcagatgctagagaggtaccaaaacaacagccctncaaacaatgatgaccagtggaaaaacaatggagtcaccaataacctggacaggctcatgctccaggacaattgctgtggcgtaaatggtccatcagactggcaaaat

SEQ ID NO: 2606 - DNA, 716 bp, Homo Sapiens
  misc_feature (578)..(578): n is a, c, g, or t
  misc_feature (658)..(658): n is a, c, g, or t
  misc_feature (666)..(666): n is a, c, g, or t
  misc_feature (678)..(678): n is a, c, g, or t
taagtttgctagtcctttgcaaacagactgacgctgagtgtcctgtctgagtcaataagtgcacttttaccttttaacctatgccctctacttgaacccgagcaaggtccagtccactggacagttgatgatagggtctgccgccccataccctctcctcttcccccttaggaatttgtgcagtactggaggggttgcggcaatgggaggcctgggtgggccgtgctgccttgatatggccaagggacccagtcaccacagtggagacccttgtctgcacctcagtaccgcatgtccaggagcacaagactggcccctgcccccctgaatcacagggggcacagctggctttcgcagggcttggcatcctcgggtttcagagccttgttgcaggtggcagaggcctggccggaggggtccctgcactctacagttcgcctctgccagccggccccgcaggtgctagagcactcagaccagtcccccagcacccactgtgcgtggagcagcggctggatgatgttggtggttgctctctctttgctgctctgcatgctaaaagtcacgtcattaggaancaaagaaggtgtatttgactttttggggggaagaacctcgcccaggactgtcaggagctgcactgtcagaaggctctgcnaaggcccngaagctctgcangcgctccagggtggcgatggagccgtgtacttcaggat

SEQ ID NO: 2607 - DNA, 555 bp, Homo Sapiens
ttttgtttagatgggggtctcgctatgttggccaggctggtctcgaattcctggcctcaacgatcgtcctgtctcggcctcccaaagtgccgggatgacaggcatgagccaccgcgcctggccccttcttttgaatgggcctccttgcgtttccgtttcaatgccccgtgctacttttttgggagccccaaggctgtactgtttgattgactccttttttttcccctttctttttaacctaaattaaagctgccactgcagagccccgccatggaagacacgccgttggtgatatcgaagcagaagacggaggtggtgtgcggggtccccacccaggtggtgtgtacggccttcagcagtcacatcctggtggtggtgacccagtttgggaagatgggcaccctggtctccctggagcccagcagcgtggccagtgacgtcagcaagcctgtgctcaccacaaaagtccttctggggcaggatgagcctctcatccatgtctttgcaaagaacctggtagcgtttgtgtctcaagaagctggaaacagagcagtc

SEQ ID NO: 2608 - DNA, 483 bp, Homo Sapiens
gcggccgccagctaggggcgcgggaaggcggggctcggatgcaatcgggacctcctcctggactgggccgggggcggactccgggacccagggcgccgggagccggcgggctacctgcgagtcgagttagcgttgtcgccgaaccgaagcctcgctcgccatgggggaggtggagatctcggccctggcctacgtgaagatgtgcctgcatgctgcccggtacccacacgccgcagtcaacgggctgtttttggcgccagcgccgcggtctggagaatgcctgtgcctcaccgactgtgtgcccctcttccacagtcacctggccctgtccgtcatgttggaggtcgccctcaaccaggtggatgtgtggggagcacaggccggtctggtggtggctggttactaccatgccaatgcagctgtgaacgatcagagccctgcgcccctggccttgacaattgctgggcgaattgcacaattctt

SEQ ID NO: 2609 - DNA, 424 bp, Homo Sapiens
  misc_feature (36)..(36): n is a, c, g, or t
  misc_feature (176)..(176): n is a, c, g, or t
acccgtgggcctgtggactgcagcctcggcgatcanagagtgcttgtgatttcacgtatttttgctgaactcgtaaaagagacacttggatggtggattaaccagaacactaacattctgtgaaaagtttcaaattggagaatattgaattttcaccctagtccagcagctccgcngtcacgttaaatacagatgaatgaagaccccattcggaaagacacctggccagcggtccagagctgatgcaggccatgctggagtatctgccaacatgatgaagaagaggacatcccacaaaaaacatcggagcagtgtgggtccgagcaaacctgtttcccagccccggcggaacatcgtaggctgcaggattcagcatgggtggaaagaggggaatggccctgttacccagtggaaaggaaccgtt

SEQ ID NO: 2610 - DNA, 451 bp, Homo Sapiens
tttttttttttttttttttcattttgctatttaccgagcatctttatgtgccagacaccatgcaaactgctaagaatacaaaatacagagcctctgtcctgggggaaggtagtcttcatttgcaatcaggaaaacgaacgtaaaggcacaggtataaaaggacctagtgtgttttaaaatagcaagaaactaagagtgtctgaagcttaaagtgagtggtgattaggaagaaatggaagcttcttcagcctgacaaaagccatctaggaaaaacccacagctaacatcatacttaatggtgaaagactaaaagcttttctcctaagatcagaaacaaaacaaagatgtctgcttttgtacttctattcaaccttttactggaggttctagccagggtaatggggcaggaaaaaaagaaagtaaagggcatctagattgaaaagacagaagt

SEQ ID NO: 2611 - DNA, 309 bp, Homo Sapiens
  misc_feature (283)..(283): n is a, c, g, or t
gatgctttttctggagtcctgtatagaaagtgctctctgccgcattgatagcatcgagagctggaggagtagggtcgcctgaccagccgttttatcccgccgcaggtaggagctggtttccatcctggcaccacggcacacacctccagcctcgagcccggcgctgctgcccgggggtctccttcaggctctttgacgccgttccagggggcacctatccaggcatcctctgggcctctagccagaggactggctcccggcttcagcactccgggctgcagtncgaagtgcccttatcgctctgagccc

SEQ ID NO: 2612 - DNA, 2943 bp, Homo Sapiens
gagctcacagacccataatcctgcatttctctaacaagttgtttatggagttgcttctccatttgcctacatcccaaaattcacccctcccggtttcttctgccccctcctgagtcccggcctgaaggagggggagggacgcgggtgcggcgcgggtgggggagggcggacccgacgcacagggccagcgccgaggcgccccctctccgccagcggttgacgcccccggattatttatccgcaaagtcccgcgcgcgcccattgggccgaggcccgagtgtcagcgcgagtcccggctcgccattggctccgcacacgtgcggccctgactcacgtgcttccggtttgaaggcaaaaagtgtgcctgggtgattttttttttaagcgagagagtttgtgcaaagatccgagctgtcagagatttgaaaaaaaaaaaaaaaacaaaaaaaaaaaaaccagcccggcgctggcggagacgcgctctccctgcaaaaaaagcaaaggcgattaaaggcgctgccagcctcacgctctgggcacagctgagcgtgacactcggggaagtcaaacccctcactactgcctaggaagatggctagactttaaatactatttttttccctttaagaaaaaaattattggagctttttttcttgctttctttttccttttctttttctttttttccttcatttttttggccgtggcttactccccatttaaatcaaatcattgaatctggttgcagaaagaaaaaagaaatagccaagtgtctccatatctggatgtctacaaattagagagggagagacagcgagatctatctgctagataagaacgagcgatccaggccagacgcctgagcttttttcctgcacccgccccgtgccttcgctgaggcttcgcctgcctccttcctccgcgcacccccacgggccgctggcaaagtggggtggggagcgaggcggtgggggcgggggccggcgcggcggccggggcggcggggcggccgagcatggaagaacagcagccggaacctaaaagtcagcgcgactcggccctcggcggcgcggcggcggcgactccgggcggcctcagcctgagcctcagtccgggcgccagcggcagcagcggcagcggcagcgatggagacagcgtgccggtgtccccgcagcctgcgcccccctcgccgcccgcggcgccttgcctgccgcccctggcccaccacccgcacctccccccacaccccccgcccccgccgcctcagcatctcgcggcgcctgctcaccagccgcagccagcggcccagctgcaccgcaccaccaactttttcatcgacaacatcctgaggccggacttcggctgcaaaaaggagcagccgccaccgcagcttctggtggctgcggcggccagaggaggcgcaggaggaggaggccgggtcgagcgtgacagaggccagactgccgcaggtagagaccctgtccacccgttgggcacccgggcgccaggcgctgcctcgctcctgtgcgccccggacgcgaactgtggcccacccgacggctcccagccagccgccgccggcgcgggcgcgtctaaagctgggaacccggctgcggcggcggcggcggccgcggcggcagtggcggcggcggcggcggccgcagcagccaagccctcggacaccggtggcggcggcagtggaggcggcgcggggagccccggagcgcagggcaccaaatacccggagcacggcaacccggctatcctacttatgggctcagccaacggcgggcccgtggtcaaaactgactcgcagcagcctctcgtatggcccgcctgggtgtactgcacacgttattcggatcgtccatcctccggtccgcgcaccaggaagctgaagaagaagaagaacgagaaggaggacaagcggccgcggaccgcgttcacggccgagcagctgcagagactcaaggcggagttccaggcaaaccgctacatcacggagcagcggcggcagaccctggcccaggaactcagcctcaacgagtcccagatcaagatctggttccagaacaagcgcgccaagatcaagaaagccacaggcatcaagaacggcctggcgctgcacctcatggcccagggactgtacaaccactccaccaccacggtccaggacaaagacgagagcgagtagccgccacaggccggggccgcgcccgcgccccctcccggcaccgccgccgtcgtctcccggcccctcgctgggggagaaagcatctgctccaaggagggagggagcgcagggaaaagagcgagagagacagaaagagagcctcagaatggacaatgacgttgaaacgcagcatttttgaaaagggagaaagactcggacaggtgctatcgaaaaataagatccattctctattcccagtataagggacgaaactgcgaactccttaaagctctatctagccaaaccgcttacgaccttgtatatatttaatttcaggtaaggaaaacacatacgtgtagcgatctctatttgctggacatttttattaatctcctttattattattgttataattattataattattataattattttatggccctcccccaccgcctcgctgcccccgcccagtttcgttttcgttgcctttttcatttgaatgtcattgcttctccggtgcctcccgacccgcatcgccggccctggtttctctgggacttttctttgtgtgcgagagtgtgtttcctttcgtgtctgcccacctcttctcccccacctcccgggtcccttctgtcggtctgtctgttctgcccccctttcgttttccggagacttgttgagaaatacgaccccacagactgcgagactgaaccgccgctacaagccaaagattttattatgttcagaaacctgtagtctgaaataaa

SEQ ID NO: 2613 - DNA, 377 bp, Homo Sapiens
tttttttttttttttttaccctcttaactgatgtgaaatgcaaacttttttttgctgccctcctttcgttaagccacctcagcagcgcaactgtcaccttccctgtgtgtttttttttttttaatatgaatgtgaaattagcgaggatgccctttcccctggcggacagaatcctctgttattaaaaagtaaagcactttaataatgaaaactttttcctctttttcttgtgttttaactggttaaaattaatgagaagggcagaatggttgtcaaagcaatattgaaagccggggaatcaggaccgaataaccacaaaaatccctctagagtgttaaataaacagagctccagccctctccgaaaccctccgttgg

SEQ ID NO: 2614 - DNA, 542 bp, Homo Sapiens
tttttttttaaaaaaaagtaatactggttttgtgggaatgaaagcagtgatttccagcagctgcagtgaagacattccagaagactggaggcccacaactgaaattcttactggctgggatgagaggatggtggtgtgggcattcaacatgaaaacaaacaaacagaaaacaaaaacaaaaaaagaaagacaaaaggacaaattaacatcctaagctaaaaacctcagaagtcaaaaagatttggaggaaagagcacaaaaaaaaagaccaaaagtccaggagatatcctcttaaatctgatcccttagctgtgaactccccacaaagcatgaacggctgactctaccccgtctacttagtgctcgggagttgtagtgataatttctctcttttaaaaagctgggtacaatgttttggatcgtacagtaccagaaaaatttggtccataaaaggtgcataatttctttccattcactacatggctgcaaagtcaatctgtacgtagagctgtctcactccagcctggggtaaaatattatgt

SEQ ID NO: 2615 - DNA, 350 bp, Homo Sapiens
  misc_feature (297)..(297): n is a, c, g, or t
ttttttttttttaaagaatagaatggggcctctaggaggctttttattaggaagagaagattgtggtttaggcctcattccaggtcagctgggcaattctctcaggcttgccatcttgtgtcctgttttcttctacttcctcagtgatgtggaccagggggtgggtgacctgggccatggccagggggaggcccgcagggccctggaccatggtgggggggtggcccgcagggccctgggccatggccagggggtggcccgcagggccctggaccatggtgggggggtggcccgcanggccctgggccatggccagggggtggcccgcagtgacctggaggatggccatg

SEQ ID NO: 2616 - DNA, 1912 bp, Homo Sapiens
tactggagactgacatactgatattttattcctttctaaattaatcaatgagtttattttgaatttctatttttattacaaattttctgttcgctggtttgaacttgagatactcaattaacctctctcttttttaaggaatgtaaaatgaagggcgtggtgtgaatgtaaaatgaagggcgtggtgtgcaccagaatctatgagaaggtctgaaaaatcatttcttcattgaagtggctttttatcatttaatgatggaaatcaattgcttccattgacaaaactgaatacactgcaaatatttgtttttgcttttgtcttaatatatcagatatgcaaaggcctaaactgagaattaatctaaaagtcagtgttatttaaacattttcaatgtgcatgcatgtcattattacatcaaagcatatatattggccagacacaaacagttgatgatgtcattcaattaactacaaaattctaatctatgttgaactttgtatacttgaaatgataataaaaaggatataatttcttagtaaaatgaaatcaaagtattgatcagggtagcaaactcaaatgctgacaggggccagaggagatatggggaaggagcatcagaaatgaggcaagctaggagaatgggctattataatgtaaagaattgtagtctcagttaaaaggggtagcctctactccagccaacattttaaaattaatggataatttatagacagttaaatttatagacagttaagtaaaaatggataatttatagacagataatttatagacaggtaaatgtgagttaaatataactcacatcccactcaagacacaaaacattttcttaatcctagtacatttttttctgtcccttcccaatcagtgtccttttctgttccacccctaccaaaagcaagtagtggtttggtttctatcatatagattaattttacctgctcatatgaagggaattgtacatcatgcattcttttctgtttgccttttttaaattcagcatcatgtttttgtgatacatccacattgttgcatgcagctgtagtttgtttctttttattaccaagtactatttcattgtatgaatatatcacagtttatccattctactattaagacaattgagctatttctaattttcggctgctatgaataaagctgctacaaatatttttgtacaagactttttgtaaacataggagtccctttattttaaataaataactagtcatatcattaggtccagtaattgttgacaggcaggaacgggggaccattgcattgtgcccaagtaataataaaactatttcagatgtattatatgattgagcaaatgagaaaacatgttgatgttgatgggagtcaggatgttcactatggaaaaacaaatatacaaatatgaaatgagggaaggcaagaaagaaccatgtggaaatggaatagaattggtataaattcataatttctaaaccatgtatatgtacgtttatatgtattataattgcatacacatgcctccatgcatatatgtgtgtgataatacacatgcatttatgtgcgtgtgtgtatacacatgcatatatttactaatcctatctgccaaaatggcttagacacaaaaacacctcagcagaaatgaatatacctagcactcagatcttcgtgtctaatatagtttgccactaaaaggaaccaaggctacttggaaaaatggatgattccaaagcaagggcaaggtaggaacaagatgagcttgaaatatcttgttatgccagaaagtaatgttaaaaaaaaaaaatagaggtatattgccaaaacatagagccagcttgaaggggctcccactggccaaacttgagccaatctgagagcaaaataattgagaaaaataaa

SEQ ID NO: 2617 - DNA, 973 bp, Homo Sapiens
gacgcgtgggcggtgaaggaggagtgccgcctgctcaatgcccctccagtgcctcctcggggtggcaatggcagcggccggctctccagcagccccccggttccccctcgcttccccaagctgcagccggtacattcccccagctccagcctctcctactactcctctggcctccaggatggggcgggttcccgcagtggcagtggctccccatcgccggacacctactccctctattgctacccatgcacctggggagactgcaaggaaccagtcctggagcccttcgatccctttgagctggggcagggcagttctccagagcctgagctgctgcgttctcaggagcccagagcagtggggacacctgggcctggaccccgcctttcaccacttggcccctccaaggcctttgagcctgaaggtttggtgctgcaccaggtccccaccccactgtcaccagctgctctgcagggacccgaggcgggaggagcactttttctaacccaagggcgcctggaagggcctcctgccagtccccgggatggagccacaggctttggagtccgagatgcctcctcctggcagccccctgctgacctgtctgcactctccctggaggaggtctctcgcagtctgcgtttcatcgggctctcagaggatgtggtgagcttctttgcccgagaacgcatcgatggtagcatctttgtgcagctcagtgaggacatcctggcagatgacttccacctcaccaagctgcaggtcaagaagatcatgcagttcatcaaaggctggaggcccaagatctgaactgcccagctggagctgcacagctggaatgctggtatgggggccccaggtacagcactccggaggagcaggtgctgcctgcaagaaggatctatgtcgagactgaggctgctcagcagccactgggtggatccaggggagatgcatgtggaaatgtggtcct

SEQ ID NO: 2618 - DNA, 440 bp, Homo Sapiens
ttttttcaaagaggacaacatttatttagttgtatgtaaataaaaattacttggatacatgaggggaaaacgataaagcacatgatataaatatacaattaaccctttataatatcttcaaacaacggcaaataacataaacaggaaatatttgcagtaattctttacagtattctcttttactctgttgtcaacatgaatactgcaagcaggtctttattttttttgacaatgggaacttccactcattcggtagaagtcaccactttcaaaacatagtaagtcaacacacaactgtacaaactgaacgtgagcaagtctaacttagatgtaattagagttgagtcattggataaaaagttcatattgatgatacacaaccagcagtgcaagcattcaaatacattggctatagcaccatttaaaatatttaacactgc

SEQ ID NO: 2619 - DNA, 1145 bp, Homo Sapiens
atgcagggccgcgtggcagggagctgcgctcctctgggcctgctcctggtctgtcttcatctcccaggcctctttgcccggagcatcggtgttgtggaggagaaagtttcccaaaacttggggaccaacttgcctcagctcggacaaccttcctccactggcccctctaactctgaacatccgcagcccgctctggaccctaggtctaatgacttggcaagggttcctctgaagctcagcgtgcctgcatcagatggcttcccacctgcaggaggttctgcagtgcagaggtggcctccatcgtgggggctgcctgccatggattcctggccccctgaggatccttggcagatgatggctgctgcggctgaggaccgcctgggggaagcgctgcctgaagaactctcttacctctccagtgctgcggccctcgctccgggcagtggccctttgcctggggagtcttctcccgatgccacaggcctctcacccgaggcttcactcctccaccaggactcggagtccagacgactgccccgttctaattcactgggagccgggggaaaaatcctttcccaacgccctccctggtctctcatccacagggttctgcctgatcacccctggggtaccctgaatcccagtgtgtcctggggaggtggaggccctgggactggttggggaacgaggcccatgccacaccctgagggaatctggggtatcaataatcaacccccaggtaccagctggggaaatattaatcggtatccaggaggcagctggggaaatattaatcggtatccaggaggcagctgggggaatattaatcggtatccaggaggcagctgggggaatattcatctatacccaggtatcaataacccatttcctcctggagttctccgccctcctggctcttcttggaacatcccagctggcttccctaatcctccaagccctaggttgcagtggggctagagcacgatagagggaaacccaacattgggagttagagtcctgctcccgccccttgctgtgtgggctcaatccaggccctgttaacatgtttccagcactatccccacttttcagtgcctcccctgctcatctccaataaaataaaagcacttatggaaaaaaaaaaa

SEQ ID NO: 2620 - DNA, 3803 bp, Homo Sapiens
tgctaatagctttgatgatcgtttcttggtgactgctggagcagatggcaatatctttgttttcaacattttttctgaatttatgctaaggaaagacatgaaggccaaagttccatctcccaggtttggaattgaaacagagccaattccagaagacattgaagatcccaaagcctacagtatcgagaatgctaggagaaaaagagaacatgacaagttaatgaaagaagtgggagaaataaaggcacggaagagagagcaaatcaaagctttgaggagtgaattttgtaatctattagaaatgaatgaaaaattaccaaagcatatgcagtttaaacgaacagattttgatgtagattcccaaatccgtgctgagatgcacagaaaaacagctttcaaaattcaacaagtggaaaaggaattagcttgggaaaaagagaaacatgaactcggcctaatgaagctaaagaatcgatttcgagatccactggaaagtgatactattgtggttcatgccatactgagtgaccacaagatatcctcttacaggctggtgcagccctctaagtactccaaattcaaacgagctagtcaatcagagagaaaaccaagcaaattggacaggtttgaaaaagagggacctggaagaaaggacagccagagagatgcaggtgggagtgttaccatacaagaagaatcaataatagaaaaagggaagaaatttcggcctaaaaccctaagtgaaatcatcgtggaaaatcaaattgagaaaacgagaaaacttatattaaaagctgaaagggcacaactaaagattcaacagcgaaaaaaagaatgggaggaactatacaagagtaaacctggtgatgactatgaagatcccaaagatcttcaagccatcaaagaagcccaggtgtatatgggagatttcaatctgaagacagccccagactacaagatacctgagcacatgagaataaatgctgccaagaaggaagaggaactaggacacctagattctttggtccatggaaataaaaggcacatgaacaagtgcattctctctcttagagaccttaaagtggctgttgttgaggaaatacagtgcctggtacaagaactgaagaacattcagtcgactcttcacatatccaagcacatacccattcccaaaattcctcagatacacccagaagaagttccagaaaagagatttcagtatgatgaagaaactctcctaaattttaagcaacagcaaatgaaaagtaaagatgaaaagtcccccggagtggaacagacagggtctggaggcccagttggaggattcctcaaactctcttctagaaaggatggggatttgacaacccgtgattcaatatctagatcatcaaaggcatcaacattcagcctagatataccaaagtgtttggaatttgaaaaagcagagccaacggatgtggagctggaaattatgaagagagacgagattaaacacgtgtacatgcaacagtatttggtcaacaggatcaaagaactggttgtcactttcgatgcagaactccgtctccttagacatcagaaactaaaactagatactcagatgaaattatctgacctgcaccatgtcaccttatttcaagaaatacttctcctgaagaattttgaaaaacaggagaacatacttcaagaacgtgttaattccttagacaaagaggaacagtacatgcaatggaaaataaatgaaactcttaaagagatggaagagaaaaagaatgaaatcaccaaactccaggagcaagaaaaggcactctatgctggttttcaagcagccattggagaaaacaataaatttgcaaacttcctcatgaaggtcctaaagaagaagattaaacgggtaaagaaaaaagaagttgaaggagatgctgatgaagatgaggagagtgaggaatcaagtgaagaagaatctagcttggagagtgatgaagatgagtctgaatcagaagatgaggtttttgatgattctatttgcccaacaaattgtgatgtggctctttttgagctggcccttcaccttcgagagaaaaggctggacattgaggaggctttagttgaagaaaagaaaattgttgataacctcaaaaaggaatatgatacattgtcaaaaaaagtgaaaattgtggcaactaatctgaatgcagcagaggaggccctggaggcttatcagcgagagaagcagcagcggctgaatgaactgctagttgtgattccgctcaagccccaccagatagagtatgtggtatttggagaaatacctagcgatctttctggtactttggtcttctctaaccatgccttgagacggctgcaagaacgaatccgtgagctccaggaggaaaattccaagcagcaaaaacttaacaaagaatggagagagagacgtaaacagctcatccgagaaaagagagaaatgacaaaaaccatacacaaaatggaggaaacagtccggcagctcatgatcagcaagtttggccgtgtggtaaatctagaagcccttcaaatgctttctgttaatacaacacttgaagaactgaagatcagaaaacttcgaaaggagctagcaaatgcgaaagagatgaagatgtgggaggaaaagattgctcaaatgcgatgggaactgatgatgaagacaaaagaacacaccagaaagctttatcagatgaatgatttgtgtattgaaaagaagaaacttgattctcggttgaatacactacagaatcagcagggcaatgccttccagggccctcgggaagcagatgttgtggcaagagaggaggtcactgaattgatccaactccaggcggaaaggatttcggccttaaaggaggagattgctcttttgcgtaggaaaggcggtcttatcctcccacccattcagtctccacgagagaaagagatacagcccgcagacctttgagtttgctattttctcaaacccatacaagatttctgacataactcactggaagttctgtctcctcatcacctccaacaatcttattactttaaactgaactcgcctgaaagtgtaaaaccagatccagtcacgttaagtcactttaagaatctctctacaatttggttatcttagaactgactgcagcacccaacctctgttatgaaactgaatcattttagatgtttcgaacctactagattgaatatgaagtctcggaaggctgtgtttcatgattgcagcaaatcacctgtaatatattttgttttaggaaaatttgatttgggggtatcctgaatttttagcccttggcaagaaaaactatcattcagcaattcatgagaaaactttgttttcttgatccttagaaaataaacttagatgttattaagtgttctctgagaggatgcaggagaaaaggacattttgtcagctatatcttagaatagaaatgcaaatttcagttttggcattgttgacttcataaagcagtgttttgagggctcaggattcaggaaatacaaacagacatggcagagcagtttgctttgggttggcagaaagcaggaaaataaccagccttcttggattgcccacagtttttgtagactcctcagttctgagtggagcagaggggcatgcttaataaaacagtcaataaagaaaaaaaaaaaaaaaaaaaaaaaaaaaaaaaaaaaaaaaaaaaaaaaaaaaaaaaaaaaaaaaaaaaaaaaaaaaaaaaaaaaaaaaaaaaaaaaaaaaaaaaaaaaaaaaaaaaaaaaaaaaaaaa

SEQ ID NO: 2621 - DNA, 3171 bp, Homo Sapiens
gcggaacaccggcccgccgtcgcggcagctgcttcacccctctctctgcagccatggggctccctcgtggacctctcgcgtctctcctccttctccaggtttgctggctgcagtgcgcggcctccgagccgtgccgggcggtcttcagggaggctgaagtgaccttggaggcgggaggcgcggagcaggagcccggccaggcgctggggaaagtattcatgggctgccctgggcaagagccagctctgtttagcactgataatgatgacttcactgtgcggaatggcgagacagtccaggaaagaaggtcactgaaggaaaggaatccattgaagatcttcccatccaaacgtatcttacgaagacacaagagagattgggtggttgctccaatatctgtccctgaaaatggcaagggtcccttcccccagagactgaatcagctcaagtctaataaagatagagacaccaagattttctacagcatcacggggccgggggcagacagcccccctgagggtgtcttcgctgtagagaaggagacaggctggttgttgttgaataagccactggaccgggaggagattgccaagtatgagctctttggccacgctgtgtcagagaatggtgcctcagtggaggaccccatgaacatctccatcatcgtgaccgaccagaatgaccacaagcccaagtttacccaggacaccttccgagggagtgtcttagagggagtcctaccaggtacttctgtgatgcaggtgacagccacagatgaggatgatgccatctacacctacaatggggtggttgcttactccatccatagccaagaaccaaaggacccacacgacctcatgttcacaattcaccggagcacaggcaccatcagcgtcatctccagtggcctggaccgggaaaaagtccctgagtacacactgaccatccaggccacagacatggatggggacggctccaccaccacggcagtggcagtagtggagatccttgatgccaatgacaatgctcccatgtttgacccccagaagtacgaggcccatgtgcctgagaatgcagtgggccatgaggtgcagaggctgacggtcactgatctggacgcccccaactcaccagcgtggcgtgccacctaccttatcatgggcggtgacgacggggaccattttaccatcaccacccaccctgagagcaaccagggcatcctgacaaccaggaagggtttggattttgaggccaaaaaccagcacaccctgtacgttgaagtgaccaacgaggccccttttgtgctgaagctcccaacctccacagccaccatagtggtccacgtggaggatgtgaatgaggcacctgtgtttgtcccaccctccaaagtcgttgaggtccaggagggcatccccactggggagcctgtgtgtgtctacactgcagaagaccctgacaaggagaatcaaaagatcagctaccgcatcctgagagacccagcagggtggctagccatggacccagacagtgggcaggtcacagctgtgggcaccctcgaccgtgaggatgagcagtttgtgaggaacaacatctatgaagtcatggtcttggccatggacaatggaagccctcccaccactggcacgggaacccttctgctaacactgattgatgtcaacgaccatggcccagtccctgagccccgtcagatcaccatctgcaaccaaagccctgtgcgccacgtgctgaacatcacggacaaggacctgtctccccacacctcccctttccaggcccagctcacagatgactcagacatctactggacggcagaggtcaacgaggaaggtgacacagtggtcttgtccctgaagaagttcctgaagcaggatacatatgacgtgcacctttctctgtctgaccatggcaacaaagagcagctgacggtgatcagggccactgtgtgcgactgccatggccatgtcgaaacctgccctggaccctggaaaggaggtttcatcctccctgtgctgggggctgtcctggctctgctgttcctcctgctggtgctgcttttgttggtgagaaagaagcggaagatcaaggagcccctcctactcccagaagatgacacccgtgacaacgtcttctactatggcgaagaggggggtggcgaagaggaccaggactatgacatcacccagctccaccgaggtctggaggccaggccggaggtggttctccgcaatgacgtggcaccaaccatcatcccgacacccatgtaccgtcctaggccagccaacccagatgaaatcggcaactttataattgagaacctgaaggcggctaacacagaccccacagccccgccctacgacaccctcttggtgttcgactatgagggcagcggctccgacgccgcgtccctgagctccctcacctcctccgcctccgaccaagaccaagattacgattatctgaacgagtggggcagccgcttcaagaagctggcagacatgtacggtggcggggaggacgactaggcggcctgcctgcagggctggggaccaaacgtcaggccacagagcatctccaaggggtctcagttcccccttcagctgaggacttcggagcttgtcaggaagtggccgtagcaacttggcggagacaggctatgagtctgacgttagagtggttgcttccttagcctttcaggatggaggaatgtgggcagtttgacttcagcactgaaaacctctccacctgggccagggttgcctcagaggccaagtttccagaagcctcttacctgccgtaaaatgctcaaccctgtgtcctgggcctgggcctgctgtgactgacctacagtggactttctctctggaatggaaccttcttaggcctcctggtgcaacttaatttttttttttaatgctatcttcaaaacgttagagaaagttcttcaaaagtgcagcccagagctgctgggcccactggccgtcctgcatttctggtttccagaccccaatgcctcccattcggatggatctctgcgtttttatactgagtgtgcctaggttgccccttattttttattttccctgttgcgttgctatagatgaagggtgaggacaatcgtgtatatgtactagaacttttttattaaagaaa

SEQ ID NO: 2622 - DNA, 940 bp, Homo Sapiens
  misc_feature (653)..(653): n is a, c, g, or t
tgatgagatgaatgtgaaggtgctggactttgagcactttctgcccatgctgcagacagtggccaagaacaaggaccaggcacctatgaggattatgtcgaaggacttcgggtgtttgacaaggaaggaaatggcaccgtcatgggtgctgaaatccggcatgttcttgtcacactgggtgagaagatgacagaggaagaagtagagatgctggtggcagggcatgaggacagcaatggttgtatcaactatgaagagctcgtccgcatggtgctgaatggctgaggaccttcccagtctccccagagtccgtgcctttccctgtgtgattttggtattcttagctttaaggtttccctaggcttcctgtgtctcagcaactttcccatcttgtctctcttggatgatgttgccgtcagcattcaccaaataaacgttgctctcgtgggcaaaaaaaaaaaaaaaaaaaaaaaaaaaaccccgggggccttcttattccggggggcgggaacaaagggggtttggatgggccatgggtcataggtgttgttcccggcccagttttcttggtcccaggggggaactcgcgggcccccaaaggggagcggaataatcgaaaacccgggttacccggttagttcccgtcgaaaaanagataacgcgcgaaaaggagggggaatttgggagacgagcgagacccctgtaggaaacccaatacgggaaaaacaaccgggtatagacaaaaaaaaccaccggaaaagggaggaagaaggaagacaaagaacaaccattacgcagagacacagcaagcaagcaaaaaagaggtatgagcaacaggagagcccaaaaaacgaggcaaaacacagcgacaggaacaggaccaggcaagaataagacaaacagaacgagaagcagcaaccagacaaaataagaaacacag

SEQ ID NO: 2623 - DNA, 448 bp, Homo Sapiens
atagcttaaattttcaactccaaaattttatgattttattattctagttagccaaatatttttcagagtccacggatgtctctgtggacattccagaaaactaagagtctattaaactccaaatcttgatctaaccattttacactgtcaaattatttattccttacagtttttgataataaaatggtcgaggattttgagaacatgtgggcagcagattcctgcctctaattgggattcgtgatgccagggcaggaaaatatcacttcccagtccctgccagtgaaaactcaaaaaaagctgttcagctcatttcatcatgctgtcactaccctctttctaaaaactgcaaaactcttttcttggaaatcattatcccttcattctctctgaagaaagttgatggaaaagtcctgagaaaacatttatgcatttatagtttaccaac

SEQ ID NO: 2624 - DNA, 3742 bp, Homo Sapiens
gaattccttctctcctcctcctcgcccttctcctcgccctcctcctcctcctcgccctcccctcccgatcctcatccccttgccctcccccagcccagggacttttccggaaagtttttattttccgtctgggctctcggagaaagaagctcctggctcagcggctgcaaaactttcctgctgccgcgccgccagcccccgccctccgctgcccggccctgcgccccgccgagcgatgagcgcccctccggtcctgcggccgcccagtccgctgctgcccgtggcggcggcagctgccgcagcggccgccgcactggtcccagggtccgggcccgggcccgcgccgttcttggctcctgtcgcggccccggtcgggggcatctcgttccatctgcagatcggcctgagccgtgagccggtgctgctgctgcaggactcgtccggggactacagcctggcgcacgtccgcgagatggcttgctccattgtcgaccagaagttccctgaatgtggtttctacggaatgtatgataagatcctgctttttcgccatgaccctacctctgaaaacatccttcagctggtgaaagcggccagtgatatccaggaaggcgatcttattgaagtggtcttgtcacgttccgccacctttgaagactttcagattcgtccccacgctctctttgttcattcatacagagctccagctttctgtgatcactgtggagaaatgctgtgggggctggtacgtcaaggtcttaaatgtgaagggtgtggtctgaattaccataagagatgtgcatttaaaatacccaacaattgcagcggtgtgaggcggagaaggctctcaaacgtttccctcactggggtcagcaccatccgcacatcatctgctgaactctctacaagtgcccctgatgagccccttctgcaaaaatcaccatcagagtcgtttattggtcgagagaagaggtcaaattctcaatcatacattggacgaccaattcaccttgacaagattttgatgtctaaagttaaagtgccgcacacatttgtcatccactcctacacccggcccacagtgtgccagtactgcaagaagcttctgaaggggcttttcaggcagggcttgcagtgcaaagattgcagattcaactgccataaacgttgtgcaccgaaagtaccaaacaactgccttggcgaagtgaccattaatggagatttgcttagccctggggcagagtctgatgtggtcatggaagaagggagtgatgacaatgatagtgaaaggaacagtgggctcatggatgatatggaagaagcaatggtccaagatgcagagatggcaatggcagagtgccagaacgacagtggcgagatgcaagatccagacccagaccacgaggacgccaacagaaccatcagtccatcaacaagcaacaatatcccactcatgagggtagtgcagtctgtcaaacacacgaagaggaaaagcagcacagtcatgaaagaaggatggatggtccactacaccagcaaggacacgctgcggaaacggcactattggagattggatagcaaatgtattaccctctttcagaatgacacaggaagcaggtactacaaggaaattcctttatctgaaattttgtctctggaaccagtaaaaacttcagctttaattcctaatggggccaatcctcattgtttcgaaatcactacggcaaatgtagtgtattatgtgggagaaaatgtggtcaatccttccagcccatcaccaaataacagtgttctcaccagtggcgttggtgcagatgtggccaggatgtgggagatagccatccagcatgcccttatgcccgtcattcccaagggctcctccgtgggtacaggaaccaacttgcacagagatatctctgtgagtatttcagtatcaaattgccagattcaagaaaatgtggacatcagcacagtatatcagatttttcctgatgaagtactgggttctggacagtttggaattgtttatggaggaaaacatcgtaaaacaggaagagatgtagctattaaaatcattgacaaattacgatttccaacaaaacaagaaagccagcttcgtaatgaggttgcaattctacagaaccttcatcaccctggtgttgtaaatttggagtgtatgtttgagacgcctgaaagagtgtttgttgttatggaaaaactccatggagacatgctggaaatgatcttgtcaagtgaaaagggcaggttgccagagcacataacgaagtttttaattactcagatactcgtggctttgcggcaccttcattttaaaaatatcgttcactgtgacctcaaaccagaaaatgtgttgctagcctcagctgatccttttcctcaggtgaaactttgtgattttggttttgcccggatcattggagagaagtctttccggaggtcagtggtgggtacccccgcttacctggctcctgaggtcctaaggaacaagggctacaatcgctctctagacatgtggtctgttggggtcatcatctatgtaagcctaagcggcacattcccatttaatgaagatgaagacatacacgaccaaattcagaatgcagctttcatgtatccaccaaatccctggaaggaaatatctcatgaagccattgatcttatcaacaatttgctgcaagtaaaaatgagaaagcgctacagtgtggataagaccttgagccacccttggctacaggactatcagacctggttagatttgcgagagctggaatgcaaaatcggggagcgctacatcacccatgaaagtgatgacctgaggtgggagaagtatgcaggcgagcagcggctgcagtaccccacacacctgatcaatccaagtgctagccacagtgacactcctgagactgaagaaacagaaatgaaagccctcggtgagcgtgtcagcatcctctgagttccatctcctataatctgtcaaaacactgtggaactaataaatacatacggtcaggtttaacatttgccttgcagaactgccattattttctgtcagatgagaacaaagctgttaaactgttagcactgttgatgtatctgagttgccaagacaaatcaacagaagcatttgtattttgtgtgaccaactgtgttgtattaacaaaagttccctgaaacacgaaacttgttattgtgaatgattcatgttatatttaatgcattaaacctgtctccactgtgcctttgcaaatcagtgtttttcttactggagcttcattttggtaagagacagaatgtatctgtgaagtagttctgtttggtgtgtcccattggtgttgtcattgtaaacaaactcttgaagagtcgattatttccagtgttctatgaacaactccaaaacccatgtgggaaaaaaatgaatgaggagggtagggaataaaatcctaagacacaaatgcatgaacaagttttaatgtatagttttgaatcctttgcctgcctggtgtgcctcagtatatttaaactcaagacaatgcacctagctgtgcaagacctagtgctcttaagcctaaatgccttagaaatgtaaactgccatatataacagatacatttccctctttcttataatactctgttgtactatggaaaatcagctgctcagcaacctttcacctttgtgtatttttcaataataaaaaatattcttgtcaaaaaaaaaaaaa

SEQ ID NO: 2625 - DNA, 3063 bp, Homo Sapiens
ccgggcagacaccctgccctgcccactcctccctcagggtggggagatggaagtgaaaccaggcccccaacccacacaacgaaagcgggaaagtctgaatggggttggggggtagtttacgatcttctctctttggcgtctgcggttaaatctatcacttccttctggccctaaacccctggcagaatctgatgtagtcaccacttagactcagccttggaagagaatgggtgggcttcaccgcattcggcattcaccacccccccttccccgcaaaaaaacaaaaaacgaacaaacaaacaaaaaactgcaggcaaaatgttagtgtttatgcagaggtgagttctcctggggggggaggggggggctctagctcccagcaggtgagactcattgcgccggggtctgatggaattgcacctggccatgctctcccaggcctgggagtagctgtggacataagctttaggcagcagaaattattagaggcgcttggacatatttggacgcctttatttagtaattgttgagaatcacttgttctgccagttccagaaccagcaacacccaccttgccgcccccgcccccaccccatcccttactgtgagtttcctccctctgctcagtgtggactcattggggagctcctcccagacttcccctgctctcctgtggccagtccctgagcctggtcatgactcctgggcagccgctgggaggctatgtcagaaacatccgaggactacagagaccttggtgataagtgtgtctttctttctctcctcttcttcctctcctgcatggcctccctctctgccagcactggaaagtcctgtttgatcaggtatgtgagcagttaaccccccatttccttccagccctccctgaaatcggtctcagtctccctgcttgcgtgggcttccctagctccgcgctcctgagatggtgacgtggggtgggggtgtggctttgtgcatctctagggctgaacgacactgctctccaggtatcaggaggaagagatgggctcccctgagaggatctccctcctgcctcctccctactctgctgcaccagagccgggtttacaccatgtagaaattggacgttatatattgaatgcctgggaaatcctccatatgccaggggattgcagtagggggctggagaggtgggggaagggcttgggctgacaatccctctccgtttctacctccactatggagggtccatggccaccgctgaagtcaaatctctgccatccttgggggctgactcacagtatggactcttttgaagtctaattcaatgtctttaattctgtcatagggatgagggagtgctgggaggttacagaggggaaattgtgtgtgattcttcgcaatgcctggagtccaggtgtagggcatggagttgggggtgccaagtattggcttttgaacctggagatggacatttgaccttcagcaaggaaatggttctcctcttagcattcgtggtgggtgctgttatgtgcttccttctccctctttgccccatgttggaggatagttgagtgctatagtcctggggtgagaatgattgtgccatgaagtttgtgcaactttaagaaattggtgtgagtgggccagagggaatgtgttgggtaggagaaggagataaagctgaaaaattagcttgaaccaggacttcgttgtaggcaggggaagccttagaaagttttttagcagggttgttatgtgatccaagccaggcttgggaaagctccagtgtcttaggggataaggagtgaatgggctacggggatgagggaagctaggcaggagctgcagcactgaacagaggcaagaaggtgacagtgaggatggacgggaagagggacatggtgatggaagaattggaagatcttaatagaccgtaggtgaggggaaccacatatctaactttgagattctgaacctaggagggaaagaagttggagtggggccaggtgtggtgactcacgcttgtaatcccagcactttgggaggctaaggcgggaggatcgcttgaacccagtagttcaagaccagcctcgccaacaaagtgagacctcatctctacaaaaaattaaaaaatcggccaggcatggtagcacactcctgtggttccagctacatgagagactgaggcaggaggattgcctgggcccaggaagttgaggctgcagtgagccacgatcgtgctactgcactccaacctgagtgacggagtgggaccctgtctcaaaacaaaaacaaaaaacaagttggagtgaggagagacgtttggcaaaaatgacaactttggtttgagacaagttcagttagaggagccagccggttgcagatgccggagtgggcgtgatgacacggaattgcagcgcgaaaggcctggggtgaggatttggggtgatcatccacattaaccacgaggtctggctgtggtttgaagttcaaagcatgcactggctcctgtcctgacgggtagagcatctctccctctggctcctaagagtacagcagctgctggcctgatgccccaaggcaggagggagcccgctgcgccactgccaccactaccaccaagctgccagcccttcacacctcctgccagatttagaatcagaacctagaacaaagtgtatcattctttttttttctctgtctgtgtctatctttttcatttgattaatttcctttgccagtccctgtgtgtatgtgtacattttaaaacaaaccatttgggtgaaaggaagagagcttttagtaggaagattttggaactcaagggagcagaaagaatgtgtagcacctaatagtagctagtggtctattaaatcgaatttttccaactgaaggtaggtcctgggtcctgggtgtcacaaagagcatacccctgcttctgggaggcctgcccagaattaattctaggaaagaaattaggccaggcacagtggctaacgccggtaatcccagcattttgggaggctgagacaggaggatggcctcccaaaaagtgagaccctttctcaaaaaaaaaaa

SEQ ID NO: 2626 - DNA, 1632 bp, Homo Sapiens
gctgggcaccatggtcacaggcctggcatccctgctgctcctcgctggggcccagtatctgccaggctggactgtgctgttcctctctgtcctggggctcctggcctcccgggctgtgtccgcactcagcagcctcttcgcggccgaggtcttccccacggtgatcaggtgagcttcagggttgcccggccacacagcagggtccagggcctctcatggggaggaggggccaggtggacaggaggccctgtccccataccccacccaggttcctgcctgtgattcctccatccagtaaggactcggggtaaagcactgccctgctcctggatggtgggggccactgctcacagaaggctctgggcagacggctcaggaactgggaaggggagggaaggccacgcaggcctgaagccaggagtgcggggtgggggcagagatgaggaggcctccagaaatggcagaattctcggggaaagcatcacttttcgatcttcttcttcttctttttttttttttttgagatggagtctcgctctgtcaccaggctggagtgcagtggtgtgatctcagctcactgcagcctccaactctctggttcaagcgattctcctgcctcagcctcctgagtagctgggattacaggcacccaccaccacgcacaactaatttttgtatttttagtaaagacagggtttcaccatgatagccaggatggtctcgatctcctgacctcatgatccgcctgccttggcctcccaaagtgctgggattacaggcatgagccactgtgcccggccactttccagtcttgaacagagcaaaaagtgctccaggagaggaaggaggtttttccaaaacaatttttcaaattatcctcagccagcaaaccttaggctgtgcggaggccgggccttccccctgctcactctggagtcacatgtgtgtcccccaatctgttgccccaccagctgcccccaacgcactctctcccacagaggggccggcctgggcctggtgctgggggccgggttcctgggccaggaggctggctgcccccaacacactctgttcccacaggggggccgggctgggcctggtgctgggggccgggttcctgggccaggcagccggcctcctggacaaccctgcacggccggcagggcttcttcctgcaacaagtcgtcttcgcctcccttgctgtccttgccctgctgtgtgtcctgctgctgcctgagagccgaagccgggggctgccccagtcactgcaggacgccgaccgcctgcgccgctccccactcctgcggggccgcccccgccaggaccacctgcctctgctgccgccctccaactcctactgggccggccacacccccgagcagcactagtcctgcctggtggccctgggagccaggatgggaccaaagtcaaggcctggggcatggctgagtaccccagacgtctggtccagggcagacacattcctctcagaagcccgtgtctcagtgcaggtggagccgtggggacagcgtgaaggtgtctccagccaggccccaggcactgggaggccctgggtctccccccagccacacccagtaggtgtggaggataaaggcttctgtggaaaaaaaa

SEQ ID NO: 2627 - DNA, 261 bp, Homo Sapiens
accccatttccaggctgtttggcacacagagacatcaaaaaacagacagccaatacatctagaacaagcctctctccgagggcggcccatggatggactgtcctcccagacctcccaggtggctcatcagtggtgggattgcggcgcacgaccccatcaccgcacccctcagcagtgcctgggctcacctctccacccacctccccacacagccagaggaggccctcagccgcaaaccaaacctaacacaatttcaagaga

SEQ ID NO: 2628 - DNA, 637 bp, Homo Sapiens
  misc_feature (33)..(33): n is a, c, g, or t
  misc_feature (126)..(126): n is a, c, g, or t
  misc_feature (128)..(129): n is a, c, g, or t
  misc_feature (132)..(132): n is a, c, g, or t
  misc_feature (619)..(619): n is a, c, g, or t
gtaaagcttcctctagatgatccccccacggcntccataaatatttagcaaattcatttaacaaatattattgggcacctgttatgtgagacactgtcctaggcactgtgggataacaacagcaancnnttnacacaacagcctggccttcctgtgttttacaacagctcctaaagatagctgatatcaagacatttgagggacacagttcatgtagaatcaaaatattagtatttcagaataaggattttttttctgaaaagcatacagagaggaaacagcttaaaaataggtcaagacctaaaaacagaatataatcacggaataaactggataacccagacagtccccacagaatttctttcaggtcacagatttcttaaaactcacccccaaaatgtgcctgcttggttgtttgaatcttgcataattaatgtcacaggcgcaagccgctgaacttagttgagatgcagaaaacaaacaaatgcaatgacatatctgagaagcatttatgtaactccggttaagtggtgaggaggggtgtgtgaagacagtgtgcatgcatgagtgtgtattcatatatatgtgtatacatatgaatttcactgttattttccanggtttatggacaccgtgg

SEQ ID NO: 2629 - DNA, 738 bp, Homo Sapiens
aactacggctaggtgcgggtcgggtgttaatcggccgaggtctgctcgggctcctggtgcagcagatcatcttcttcctgggaaccacggccctggccttcctggtgctcatgcctgtgctccatggcaggaacctcctgctcttccgttccctggagtcctcgtggcccttctggctgactttggccctggctgtgatcctgcagaacatggcagcccattgggtcttcctggagactcatgatggacacccacagctgaccaaccggcgagtgctctatgcagccacctttcttttcttccccctcaatgtgctggtgggtgccatggtggccacctggcgagtgctcctctctgccctctacaacgccatccaccttggccagatggacctcagcctgctgccaccgagagccgccactctcgaccccggctactacacgtaccgaaacttcttgaagattgaagtcagccagtcgcatccagccatgacagccttctgctccctgctcctgcaagcgcagagcctcctacccaggaccatggcagccccccaggacagcctcaagaccaggggaggaagacgaagggatgcagctgctacagacaaaggactccatggccaaggagctaggccggggccagccgcggcagggctcgctggggtctggctacacgctgtgcacaacccaacctgcaggtcttccgcaagacgggcctgttgggtgccatggtgcc

SEQ ID NO: 2630 - DNA, 360 bp, Homo Sapiens
  misc_feature (4)..(4): n is a, c, g, or t
  misc_feature (22)..(22): n is a, c, g, or t
  misc_feature (222)..(222): n is a, c, g, or t
  misc_feature (248)..(248): n is a, c, g, or t
  misc_feature (253)..(253): n is a, c, g, or t
  misc_feature (302)..(302): n is a, c, g, or t
  misc_feature (314)..(314): n is a, c, g, or t
  misc_feature (320)..(320): n is a, c, g, or t
  misc_feature (333)..(333): n is a, c, g, or t
  misc_feature (350)..(350): n is a, c, g, or t
tgtnaaacatatatgttagtgntatattggtacagtattttcattaaggtgtgtttcattgcctcagttaaataattaagggtgttggtctgtctgggtatgttgaagttattttcttacataatccattgtctgtttgggtgagactctcaaatggatttagacagataatggtgagaaaactggattttttatttagaacgtggctgacattttcaaagnaatggaggaaaattgaataatatttnctgancttgacgtattaagggattgttttaaattatgttggatgtgataatggnattgtgattttntttttngtccttagagccntttcttaagtttttcangtgaatttat

SEQ ID NO: 2631 - DNA, 253 bp, Homo Sapiens
  misc_feature (118)..(118): n is a, c, g, or t
  misc_feature (129)..(129): n is a, c, g, or t
  misc_feature (142)..(142): n is a, c, g, or t
  misc_feature (209)..(209): n is a, c, g, or t
  misc_feature (231)..(231): n is a, c, g, or t
gcctctcctccctcgcccccggccttccccatgtaatcggtcttaatcctggccgtgtgtgcgcgcgtggggctccattccgcggtgctgggtctccgtgccggggtgggtgctcgtntgtgcaaggcncatccccatcccncttccaccaagaataaaagaagaaccgggaggcgtgctcagaaaataaataaataaccaccacacangggtagccgtgagcgagtcgangggtgctcgcgacagggcggag

SEQ ID NO: 2632 - DNA, 378 bp, Homo Sapiens
ttttttttataggaagacttgaaaagggttgtaggtcagaggaaaaaaaaatcagaagggagaaaggatttaataatctttattggcaggaggttcatatttctaacttaaatctatagcccaaatcatttcctcttgctttgtttttaaagatcaagaacttcaatttcccatcctttacatggtgaagaccttcatatatttggggtatgttattaaatcacacctcagccttcagttctggccgaaaataccaatcaatcagtctttttttgtgaattttactttccaaacttttaataatctccatgactttttctttgtgctcctctccatgtattacagagtcttacttagaaaaatccacaagatgatcca

SEQ ID NO: 2633 - DNA, 420 bp, Homo Sapiens
  misc_feature (405)..(405): n is a, c, g, or t
catgttgtccttttattgtgtcaaattataatgatatcattaaaatcctgctagattcagaaaaaactgtagggaagcaataaacaatttgactttccaaatgatgaggaaagttattgaatttaccaaacataaatataaaaatagtattttgttgtataattaagacttatagctagagaagtagaaatgtacacaaaaaaaacatttggtatcaataatttggttgtgcattcatttattcagtcaacaaatatttagctgagcactggctagctgccaggtattgcactaaggacccaaagatgggaagagatgatgtccctgccctcatggagcttgcagtcgtgttgagcagactgtcaaaccagatttaggtaaggcaatgtgacccagtgcccatgntaccaaaccagggat

SEQ ID NO: 2634 - DNA, 1922 bp, Homo Sapiens
agacacgtggtccgggtggaagtgtccctgctgcgagcaggagctcacgctgggagggcagacacatggtcccgtggaagtgtccctgctgcaagcaggagcgctagtgctgggagggcggacacgtggctccgggcagaagtgtccgccagcaggagcgctcgtgcttggaaggtagacacgtggcccgggcggaagtatccttgcagcgagcaggagctggcgctgggagggcagacacgtggtccgggcggaagtgtctgtgcagccagcgggagctcgcgctgggagcggagacaggccctgccctgggagaagccctgccacacgtcgtgcccacgctgagggcctgtctgcagccctcccaagacccgcagatgcgcctgaagctgttctccatcctgtccaccgtgctgctcagagccacggacaccatcaactcccaggggcagtttcccagctacctcgagacggtgacaaaggacatcctggcccccaatctgcagtggcatgcggggaggacagccgcggccatccgcacggctgccgtgtcctgcctctgggcgctcaccagcagcgaggtcctgtcggcagagcagatacgggacgtgcaggaaacactgatgccccaggtcctgaccaccctggaggaggattcgaagatgacgcgactgatctcatgccgtattatcaacacgttcttaaaaacctcgggcggcatgacggatccagagaaactcatcaagatttatcctgaactcttaaaacgcctagatgacgtgtccaacgatgtgaggatggcagccgcctccaccttggtcacctggctgcagtgtgtcaagggtgccaacgcaaaatcctactatcagagcagtgtccagtacctgtaccgagagttgctggttcaccttgacgatccagagagggccatccaggatgcaattttagaggtcctcaaagagggcagcgggctgttcccagatctcctggtgagggagacggaggccgtcatccacaagcaccgctcggccacctactgcgagcagctcctgcagcatgtgcaggccgtgccagccacacagtgaccacgctggtttcagccacggcacacccttgtccccacctgagccagagtttgtggcctttaaatctcataaacaaggcacctctgtgccagcagtgagactgtgacagcaagaatgtactcctcaggacacctgcccgctctttccctggaataacagcctctgagtggattctgcatgttatgtgatttgttctgttcatcaagagggctcccaaacatctgcagctgatttgaaattaaaagtaagtcgcagccgctcctcccgcagccacttcagcagcatcttagattttaagcctcacgtgcgcagctggttcatgaactattggctgcatcctgcttaggtgcccaccaagaaggtttttacctacttaacaaaaaagaaagaagccaaagtgattagaaagaaatgaaatctctttttgggttctgtctactgaaatttaatatctcagtgaacagactaaaaggaatttagaatcctaacaacttaccagatttctcctgttttaaatatactgggactttaaaggttatatgtccggtcaccgtatgttttaagtcggtgttaatgctaacagtgttgaaaacaatatttcatgagatctaattgtggttgcccctataggtagcaggaaagtaaagttgcatttccctctcgcacattctacacccaagtgcctaaaagatctcattgtaagtgggtagtgttaccggaagccattgtgttcacacgggggaaatgccgtatatatttttcaacaaatattaacgtttatactttcatgtttgaaaatttaattaaaaatatttgttttaaaaaaaaaaaaaaaaa

SEQ ID NO: 2635 - DNA, 379 bp, Homo Sapiens
  misc_feature (297)..(297): n is a, c, g, or t
  misc_feature (305)..(305): n is a, c, g, or t
agcggccgcctgcccgctgccctgcgtctgccagaacctgtccgagtcgctcagcaccctctgtgcccaccgaggcctgctgtttgtgccgcccaacgtggaccggcgcacagtggagctgcggctggctgacaacttcatccaggccctggggccccctgacttccgcaacatgacgggactggtggacctgacactgtctcgcaatgccatcacccgcattggggcccgcgcctttggggacctcgagagcctgcgttccctccaccttgacggcaaccaagctggtggagctgngcacccgngagccctccggggccccgtcaatctgcagcacctcatactcagcgggaaacagcttggccgcattgcgcccggg

SEQ ID NO: 2636 - DNA, 370 bp, Homo Sapiens
  misc_feature (28)..(28): n is a, c, g, or t
cacgaggggcacgaggccgcatatgacntttttttttttttttttttttttttttttaacagtggagtaattttattcacatagggttgcgattaaaaggttaactcattcaaacacatttttgctatgctaacattcctttgcctcttattcttacaaataaacccccatcacagagcagaaatgttagaaattatatcacaaatggagcacaataagtatttttaaaaccttttaaaatatggcttataattttacacagcaagttacctattaatatgttacatattaacagatctatttggacaatcagatttccttgagattaaggatggagttggcatttttcctttaagaaggcattttaagg

SEQ ID NO: 2637 - DNA, 2457 bp, Homo Sapiens
cgctgttgcctccgccacctcctccgccgccgcgcgcccctcggagttccgcgccccaccatgcccaacatcgtgctgttcagcggcagctcgcatcaggacctatcccagcgcgtggccgaccgcctgggcctggagctgggcaaggtggtcacgaagaagttcagcaaccaggagaccagcgtggagattggtgaaagcgtgagaggggaagatgtctacatcatccagagcggctgcggggaaattaacgacaacctgatggaactcctcatcatgatcaatgcctgcaagattgcgtcatcatccagagtaactgccgtgatcccgtgtttcccatacgcccgacaagataaaaaggacaagagtcgtgccccaatttctgcaaaacttgtggccaatatgctgtcggtggctggggcggatcacatcatcaccatggacctgcatgcttctcagatacagggattctttgatattcctgtggataatttgtatgcggagcccgcagtcctgcagtggattcgggaaaacattgccgagtggaagaactgtatcattgtttcacctgacgcagggggagccaaaagggttacatcaattgcagacaggttgaatgtggaatttgctttgatccacaaagagaggaagaaggcgaatgaagtggaccggatggtcctggtgggcgacgtgaaggaccgtgtggccatcctcgtggatgacatggctgacacttgcggcaccatctgccatgctgcggacaagctgctgtcagctggagccaccaaagtgtatgctatccttacccatgggatcttctctggaccagctatttccagaataaataatgccgcctttgaggctgttgtcgtcacaaacacaattccgcaagaggacaaaatgaaacactgcaccaagattcaggtcattgacatttccatgatcttggccgaagcaatccgaaggacacacaatggggaatccgtgtcctacctgttcagccatgtcccgctataaatccagaatgggaagtgtccagcaagcctactctgacttctgacttgtttttgttttctggatttttagctgtaggtattcagcaatgataggttaatcactggcaaaagcatcagatctttgtatatgctaagatttattgtttccccttctaaagctcaagatcatttctttccagtttttggggaaatggtggtggttatttggtctttaagtgaactgtcttaaatgagaaacgtttttgtcattttgacttttaacaggtacaggtgatctcttcctttgttctttcagtactttgaggcgacaactttcaagtatataatttcattgtggaagtcatagtttatatatttcgaggttgccaaaggtgacttcacattaaagccttctgtgtaaatatatactgataatgcctatggacatttgggtaaaaccctgtatagaattaattatccttttactttggagtgaaccttggaaaatttataattataataccatggattttgaattttccttttttttttttttttttggataactcagtttcagataaaccatcttggttactgtgcttaatttggaccaaattttatttagcttaatatggacactgacacattttggggggtatacattagacatatcagagcagtgtatttctggatcattttttaaatgacctcttctaaaacataactgtcacttacctgaaatgctgcatcctaaaattccaaaattatattgagcaatcgccaaggcctaaagccaactgacttaaaggtaatcatttcagctaagattaaatttaaagcctaagaatgtatagagctagttttaaaataatgatctcagatttttaaaaaggatataggaacctgcattgtcattctctgaattaagaactgatggtttctatcattatttagccccacctttgtattttaaaatccttcagaatacatttatgaaccaatgcgactggacttagccacacacaatggaaattcagaccttgactatttggtgtttccagttcacaaaggtgatgaagactgtcttgggagcagcttaatcccaaaatttgtacatttcttgctgctcctggcgtggaaacttaagtgagaccaccaaatacattggtcctgtccaattctactgaatgggggtggacctggcatttatctggccaaaaacaggagccagagaaatatgaatataccaaagttgtttgtttagcctccaacttaaattacattagtcaacttatagatactcatatgatcacttttctttttagatactacatcaactagattcaggagtatatcatttgcagtgcttgtattggtttaaaatgtaagattttaagatcctctaacactgtactaaaacatttcaataaaatcattctgactgcgttcaaaaaaaaaaaaa

SEQ ID NO: 2638 - DNA, 392 bp, Homo Sapiens
  misc_feature (9)..(9): n is a, c, g, or t
  misc_feature (263)..(263): n is a, c, g, or t
  misc_feature (361)..(361): n is a, c, g, or t
  misc_feature (378)..(378): n is a, c, g, or t
gggcccggnagtacacctagaccaattgaaatgcattctcatgaccctttgaggtatgtaggagatatgttggcttggctccatcaagctactgcttctgaaaaggaacaccttgaagctctcttaaagcatgtaactacacaaggtgttgaagaaaatattcaagaagttgttgggcatatcactgaaggtgtgtgcaggcctctaaaggttcgaattgagcaagtaatagttgctgaacctgggggcagttttattatatnaaaatttcttaatctcctcaaattttatcaccatacaatcagtgggtattgttgggaaatagtgcactgcattatttgactacccttggaggaatgcnttgctaggcaaaaaatnttcttccatagctg

SEQ ID NO: 2639 - DNA, 704 bp, Homo Sapiens
tacgacccactgaggtctactggtgacctggacatccagaccaatgctgtcatcaagcaccgggggccttcagaggtgctgcccccgcatcccgaagtggaactgctccgctctcagctcatcctgaagcttcggcagcactatcgggagctgtgccagcagcgagagggcattgagcctccacgggagtctttcaaccgctggatgctggagcgcaaggtggtagacaaaggatctgaccccctgttgcccagcaactgtgaaccagtcgtgtcaccttccatgtttcgtgaaatcatgaacgacattcctatcaggttatcccgaatcaagttccgggaggaagccaagcgcctgctctttaaatatgcggaggccgccaggcggctcatcgagtccaggagtgcatcccctgacagtaggaaggtggtcaaatggaatgtggaagacacctttagctggcttcggaaggaccactcagcctccaaggaggactacatggatcgcctggagcatctgcggaggcagtgtggcccccacgtctcggaccgcagcaaggactccgtggaaggcatctgcagtaagatctaacacatctccctggagtacgtcaacggatcgagagaagcacttgcatcctcaggaaacatatctcagaggggggggccctgaggtgggcccgctaatgtctgtaccagtccggg

SEQ ID NO: 2640 - DNA, 1789 bp, Homo Sapiens
gccgcccgggcaggtgccgcatggtaactcaggcgccgggcgcactgtcctagctgctggttttccacgctggttttagctcccggcgtctgcaaaatgaagattgaggaggtgaagagcactacgaagacgcagcgcatcgcctcccacagccacgtgaaagggctggggctggacgagagcggcttggccaagcaggcggcctcagggcttgtgggccaggagaacgcgcgagaggcatgtggcgtcatagtagaattaatcaaaagcaagaaaatggctggaagagctgtcttgttggcaggacctcctggaactggcaagacagctctggctctggctattgctcaggagctgggtagtaaggtccccttctgcccaatggtggggagtgaagtttactcaactgagatcaagaagacagaggtgctgatggagaacttccgcagggccattgggctgcgaataaaggagaccaaggaagtttatgaaggtgaagtcacagagctaactccgtgtgagacagagaatcccatgggaggatatggcaaaaccattagccatgtgatcataggactcaaaacagccaaaggaaccaaacagttgaaactggaccccagcatttttgaaagtttgcagaaagagcgagtagaagctggagatgtgatttacattgaagccaacagtggggccgtgaagaggcagggcaggtgtgatacctatgccacagaattcgaccttgaagctgaagagtatgtccccttgccaaaaggggatgtgcacaaaaagaaagaaatcatccaagatgtgaccttgcatgacttggatgtggctaatgcgcggccccaggggggacaagatatcctgtccatgatgggccagctaatgaagccaaagaagacagaaatcacagacaaacttcgaggggagattaataaggtggtgaacaagtacatcgaccagggcattgctgagctggtcccgggtgtgctgtttgttgatgaggtccacatgctggacattgagtgcttcacctacctgcaccgcgccctggagtcttctatcgctcccatcgtcatctttgcatccaaccgaggcaactgtgtcatcagaggcactgaggacatcacatcccctcacggcatccctcttgaccttctggaccgagtgatgataatccggaccatgctgtatactccacaggaaatgaaacagatcattaaaatccgtgcccagacggaaggaatcaacatcagtgaggaggcactgaaccacctgggggagattggcaccaagaccacactgaggtactcagtgcagctgctgaccccggccaacttgcttgctaaaatcaacgggaaggacagcattgagaaagagcatgtcgaagagatcagtgaacttttctatgatgccaagtcctccgccaaaatcctggctgaccagcaggataagtacatgaagtgagatggctgaggttttcagcagtaagagactccccaggtgtgcctggcctgggtccagcctgtgggcgcttgcccctgggcttggggctgccgtccccactcaggcgtggtctgcagcgctgtcagttcagtgtggaaagcatttctttttaagttatcgtaactgttcctgtggttgctttgaaagaacccttccttacctggtgtgttttctataaatcttcataggttattttgattctctctctctctctctctaagttttttaaaaataaacttttcagaacagttaaaaaaaaaaaaaaaaaaaaaaaaaaaaaaaa

SEQ ID NO: 2641 - DNA, 470 bp, Homo Sapiens
  misc_feature (465)..(465): n is a, c, g, or t
gcggccgcgggctcccgctaaccgcagcctccactcctctccccgcgcgccgcgcccccgccccgccccgcccggtctcgccggccgagcgtccgttggtccttgagcgcgtccgacagtctgtctgttcgcgatcctgccggagccccgccgccgccggcttggattctgaaaccttccttgtatccctcctgagacatctttgctgcaagatcgaggctgtcctctggtgagaaggtggtgaggcttcccgtcatattccagctctgaacagcaacatggggtgcaaagtcctgctcaacattgggcagcagatgctgcggcggaaggtggtggactgtagccgggaggagacgcggctgtctcgctgcctgaacacttttgatctggtggccctcggggtgggcagcacactgggtgctggtgtctacgtcctggctggagctgtggcccgtgagaatgcangccct

SEQ ID NO: 2642 - DNA, 1593 bp, Homo Sapiens
agtagcctgggcctcagcctaggcagcaactccactgtcacagcctcgactcgaagctcagttgctacgacttcaggaaaagctcctcccaacctccctcctggggtcccgccgttgttgcctaatccgtatattatggctccagggctgttacatgcctacccgccacaagtatatggttatgatgacttgcagatgcttcagacaagatttccattggattactacagcatcccatttcccacacccactactccgctgactgggagggatggtagcctggccagcaacccttattctggtgacctcacaaagttcggccgtggggatgcctcctccccagccccggccacaaccttggcccaaccccaacagaaccagacgcagactcaccataccacgcagcagacattcctgaacccggcgctgcctcctggctacagttacaccagcctgccatactatacaggggtcccgggcctccccagcaccttccagtatgggcctgctgtgttccctgtggctcctacctcttccaagcagcatggtgtgaatgtcagtgtgaatgcatcggccacccctttccaacagccgagtggatatgggtctcatggatacaacactggtgtttcagtcacctccagtaacacgggcgtgccagatatctcgggttctgtgtactccaaaacccagcagtcctttgagaaacaaggttttcattccggtactcctgctgcttccttcaacttgccttcagccctaggaagtgggggccccatcaatccggccacagctgctgcctacccacctgccccctttatgcacattctgaccccccatcagcagccgcattctcagatccttcaccatcacctgcagcaggatggccagctaccatatttgcagatgattctctgttgccagcgccagcaggaggagcagacgggcagcgggcaacgtagccagaccagctccatcccgcagaagccccagaccaacaagtctgcctacaacagctacagctgggggccaactgaggccctgaccctcttctcccggtcccatcttctgagagggcttctcagcctggaaactatggaaacagcatcaaagagaaaggaatgtggggggtttccgctgccccccacccccagcggcccaccccatgcctcagcttcatgtctgtcccattcctataccatccccaccctgttgtatgtattataggatttgtattttctccttttttttcccccttccattccttctcccctcttgcattcaagattatgaaactttgctatgggccctgcacttcctttgcttcctcctgttcaccctggtggtgtacggatgaggcggggaggtgggacccccaaacatatatcagcccaacagccctaagtctccttctttattattaggaaaacaacaacaacaacaaacaaaaaaatggcgtcatgaatatgaacagcattgtcagatgaattagttgaagtggttttttttttgttttttttttttttttgtactgtgtcctcaaatttaatggattaatgtgtcttgtatatataaaaagaaaacctctaaaaa

SEQ ID NO: 2643 - DNA, 207 bp, Homo Sapiens
ttttttttttttttttttttttttttttttttttttttttttttttatgagggaaggaaacatattatttggaatcaaaggacaataatacgtcaagccccaaatgcttcaaaaaaatcatgaaaataggccttaaacgagtcattcctaaattaacctccccacatgtgaaaataagtcttggaagtaaaaagggggggtttggtt

SEQ ID NO: 2644 - DNA, 2084 bp, Homo Sapiens
gaattctccctaattcattctatgaggccaaccagcatcacactgataccaaaaccagagatagacacaacaaaaaaaagacaactacagggtatgcagaggtgccccaaccacactctgtccacagactctcagttattttaggagatccctggccaagatttatttctgttgacaaccaaggcctccgtctggatttccaaggaagaaatttcctttgaagcactggaagcttgccaccaccagcaccatgccctaccgatatccagcattgaccctggagcagaagaaggagctgtctgacatcgctcaccgcatcgtggcactgggcaagggcatcctggctgcagatgagtccactgggagcattgccaagcggctgcagtcccttaacgccgagaacaccaaagagaactggcgcttctactgtcagctgctgctgacagctgacgactgcgtgaacccctgcatcggggacgtcatcctcttccaccagacactctaccagaagaaggatgatgggcgtcctttcccccaagttgtcatgtccaagggtggtgttgggggcagcaaggtagacaagggcgtggtctcttgcagggacaaatggcgagaccaccacccaagggttgtatgggctgtctgagtgctgtgcccagtacaagaaggatggagctgacttcaccaagtggcattgtgttctgaagattggggaacacaccccctcagcccttgccgtcatggaaaataccaacgtcctggcctgtcatgccagcatctgctagcagagtggcattgtgcccattgcggagcctgagatcccccctaatggggaccatgacttgaagcactgccagtgtgtgaccaagaaggtgctgactgctgtctacaaggctctgagtgatcaacacatctatcttggagggcatcttgctgaaccccagcatggtcaccccaggccatccctgcatccagaagttttctcacgaggagattgccatggtgactgtcacaacgctgcaccgcacagtgccccccgctgtccctgggatcacattcctgtctggaggccagaatgaggaggaggcatccatcaacctcaacgccattaacaagtgctccctgtgaccttctcctatggccgagccctgcaggcctctgccctgaaggcctggggcaggaagaaggagaacctgaaggctgcccaggaggagtcaagtgagccgtggccaacagcctggcctgtcaaggaaagtacaccccaagcagtgagactggggctgctgctagagagtccctcttcatctctaaccatacctactaagtggaggtgttccccggctgttcccaacactccaggccccgcccctactctcttgaagagcgggccttctcctcaggtctccaggttggcttgcccgtgctcttgcctccctcgtgacagtggtgtgtggtgtcgtctgtgaatgctaactccatcaccctttccagcacactgccaataaacagctattcaaggttggaggagggggggcggggagagaactacagccagtatccccaatgaacatagatacaaaatttctcaacaaaataccagcaaactaaatgcaacagcacatcaaaaagacaatataccgtgatcaagtgggatttatagcagggacgcaaggatgcttcgacacacacaaatccgtaaacatgacacatcacaccaacaaaatgaaggacaaaaaccatatgattatctcaataggcacagaaaaagcatttgataaaattcaacatcgctttatgataaacactctcaacaaactagacatagaaggaacataactcaaaataacaaagaccatatacagccaacccacagctaacatcatactgaatggagtaaagttgaacgcctttgctccaagaactgaaacaagacaaggattctcactttcaccattcctattcaacatagtactagaagtcctagccagagcaatcagtcaagagaaagaaataaaaagcatccaaattggaaaagaagaagtgaaactgtctctttttgctgaggacatgatattatatctaga

SEQ ID NO: 2645 - DNA, 500 bp, Homo Sapiens
gcggccgcgaggggactccgacccagagcagtgacttcgaggggctgacttggagaagaggatggcatccgtgatgggcgatggcgctttaaaagaagatggatgcacagtgttcagccaaggtcaatgcaaggaagaggagaaaagaggcgcccggacccaacggggcaacagaagaagatggggttccttccaaagtgcagcgctgtgcagtgggcttacggcaaccagctcctttttctgatgaaattgaagttgactttagtaagccctatgtcagggtaactatggaagaagccagcagaggaactccttgtgagcgacctgtgagagtttatgccgatggaatatttgacttatttcactctggtcacgcccgagctctgatgcaagcgaagaaccttttccctaatacgtacctcattgtgggagtttgcagtgatgagctcacacacaacttcaaaggcttcacggtgatgaacgagaatgagcgctatgag

SEQ ID NO: 2646 - DNA, 466 bp, Homo Sapiens
  misc_feature (260)..(260): n is a, c, g, or t
tttttttttttttttttcaggtttggatccaacaaacgtttactgagtccctacaaagttccaagccttttactttatactttgacacatttttatatcattttatctttaacaataaccctttaaggtaggaattatctgcattttacagatgataaaacaatcgcaaagaggttcattgatttgctcaagtatatcatacagcttttttttttcctttttttttttttttttttaacacacacacactatactcttanctgaggcctgtctgcgttggttgcttatcttacagcatttcttgtcttctctacttttggagcgacggctccccttttacaagcccccttatttcctctcctttcactagcccaggtgggcttttcttgttttaatactgcatttaatagcacaaaacatcacgaatacaaagaaactggcaaaggtgtttgtcaacctcgtgccg

SEQ ID NO: 2647 - DNA, 326 bp, Homo Sapiens
gggcagatggtaggaaatggagacggagaaatggcactaatggcccagccacctgagatgggatacctgggagggacatcttttcaagtagaggctgtgttggggcatggtgagagagggtcttagcaggtaaccttcctttcctctccagactgaggaatcagagttctgattgtggagtgcctctctctaggacggggctgcagcataggagtctcagctgcttacatccaggtccaggattatgtctgctaacagacgctggtgggtaccacttgacgacgaagacttgtgtgtctgagaagctcctgaggaagactcgggga

SEQ ID NO: 2648 - DNA, 522 bp, Homo Sapiens
  misc_feature (497)..(497): n is a, c, g, or t
cgcatcagcatccttgctgctgccgatgctggaatggctagtgatgctgttgaggcttgagatgctatctgaggagttttgtctcttgatccgaagttctttgggtgtggtttctgaggcattaagggctccctgaatgactgcctgggcctcagagttctttttcttcagaaagtctatggtttctcgcaaatccagcagctcagtgtccttctcctcggccgtctctgccaggtgtcgcaggcgggatgtcatattcaccaggctctgctcaaaagcagccaccagattagcattggcagaaagctgagacgtcaaggtggccactttttcctgggatgattccagttccctacgaagcttccggatttgctcagattgcatcctctcctcagctgaggagtaggtggaggaggcactggaggccagggacagcactgagccgtgaacatcgtccgtggggtctcggaaggatcctgaccgaatcattcccttgngtctctcggccagggacagggtgct

SEQ ID NO: 2649 - DNA, 741 bp, Homo Sapiens
  misc_feature (195)..(195): n is a, c, g, or t
  misc_feature (201)..(201): n is a, c, g, or t
  misc_feature (208)..(208): n is a, c, g, or t
  misc_feature (220)..(220): n is a, c, g, or t
  misc_feature (223)..(224): n is a, c, g, or t
  misc_feature (277)..(278): n is a, c, g, or t
  misc_feature (372)..(372): n is a, c, g, or t
  misc_feature (403)..(403): n is a, c, g, or t
  misc_feature (416)..(416): n is a, c, g, or t
  misc_feature (419)..(419): n is a, c, g, or t
  misc_feature (429)..(429): n is a, c, g, or t
  misc_feature (447)..(447): n is a, c, g, or t
  misc_feature (488)..(488): n is a, c, g, or t
  misc_feature (617)..(617): n is a, c, g, or t
  misc_feature (697)..(697): n is a, c, g, or t
cgttttttttgtttgttttttttttttccaaaataagcccagaccattaaacaagtgaaactccaacaaataagtcttctccaacagcgagaaaaactgtacagttactcaaagctgattctgccagtggggccggggacagaagtgggtagggagggtgaaatcatggaggagggcctggggagggggctggancggganagggtcngggtcctgcccntcnnagtggggccgcctgcgtcctgcacactctgctgtcaggtggggtggggggccnntcttgcctccgtgtgtgttggcaccgggtccctcctcgcgccgaattctggggcggcgggcgaagttgcctgtagggactcgcgttggtgcagngcgggggcgggggtgggccgtggaggaagcnggttgcgtccgcnggncgacggaggngcccgccgggagcggggncgaggagcccgaggccgcgggaggcgggacgacggagtggngcggggagaggacggcgccggacggagggggagggagtggaggcacggatgaggagagaggagggccgcggacgagggggtcggacgcgccgcgggacgcccgtggaggtggctcagtggggggaggcncgaggccggacggaggcggccggaccgaggcgcgggcgggggcggacgcacggagcgagcccgcaggcagtgcgacgggngtcgggagcccggggcacgcgagcggcgacggacgcaggcgcgc

SEQ ID NO: 2650 - DNA, 3324 bp, Homo Sapiens
aaatttattgagctattagatacgatcttttttgttctgcgcaagaaaaatagccaagtgactttccttcatgtattccatcataccatcatgccgtggacctggtggtttggagtcaaatttgctgcaggtggtttgggaacattccatgcccttctaaatacagctgtacatgtagtcatgtattcctactatggactttctgcattggggccagcctaccagaagtatttgtggtggaaaaaatatttgacatcattacagcttgtccagtttgttattgtcgccatccacataagccagttctttttcatggaggattgcaagtatcagtttccagtctttgcgtgcatcattatgagttacagtttcatgtttctgctgctctttctccatttttggtaccgtgcttacaccaaaggtcagaggttgcccaaaactgtgaaaaatggaacttgcaaaaacaaagataattgaagcccaacataagtctatgatcgaaactgatacattgtcttccttgacaatcaagagatatttacctatgcagtgcattttgtatatttttcaaaactaagagcttgtatttttatggtaagttattgggatgtctgatatttgagagcccgaagcttccagataacagtcttctgataattagagcctacagcagccagaatttgtttttgtttttgtttttgtttttttagctgcttttaaacctaatccaaaggttttgtttaaaacattttgttgcagtgaaaaaaagatatgaagcaatacagtactcttcaaagaagtccaataaagatgaaaaatatcattaggtattttgagcacagacggagatccatgtgataaaatagattccttctgctgggtctggaaagtctggaaaccacctgtaggccctggctttgtcatttattgactgtattcagaagatactatatttgctctagagttaactcccattttagcaagctagcacaggtgaaaattgagtgagtttttgataacttgtcatttaaaatcattaatgataattttcaatggatcttttcagtagccatcaccagttttgctgataagacttcctcacaacccatttgttgtacaaactgtttcaaagtagcaatcctttgggttagtacacttgataccaagtttcattcagttgattattttcaaaacaaggtgatttgttttaatgggttaatgaatactttgctattactgttttacaattaactttgtatatctctggaaagaggtgaatttgtcaatgaaaaaagtattgtgtagttcagtgggaaaaacctgttgtctgttatagtatcacatcactttcttacattgtcatggtttaaattattatcttggtgaaatatataggttagatacttaaatgttcatattattagcacactacaggtactacccttaaatcataaataatattacccattgtacacagtttccagatatgagttagagtggctgtgaagcaactagaggcaaattgtggcacagagaatatccaggggaaaattgattatgtaagcaagggctgttctactttgagagagagacagacagactacataatagtaatatattatataattaatgttatagatacactgaacaataaaacattttctggaattatgaattaattaacaacctggatttctgtttccagacctataaaccatgtaatgaaggactgaaattcgtttggcatacactttgtttctttaaaattgctagtttctttctgttatttttacattttcttgtcagagaatcaaaactattagtcagtagagttttgtccatgaaataatatttggacatttgtgaatttttccctattttttttcttcttttatttatactcaattttgaagcactgtttatgtttgtaggactttaaacaattagtacttaaagccccagttaattttgaacacacagagatacttattgtactctgtgtacagtaagtatttttatgtttacacttaccagattcataaggttatttgcctttaagtgatcttttgtgattttacttgattacagcatgagaaggtaaaggttgataaatgggagtaattacatatatatatataatttattatttttttttctgaagcagagttttactcttgttgcccaggctagagtgcaatggcacaatctcggttcactgcaacctctgcctcccaggttcaagtgattctcctgtctcagcctcccaagtagctgggattacaggtgcccgccaccatgctcagctaatttttgtatttttagtagagacagggttggccaggctggtctcgagctcctgacctcaggtgatcctcccacctcggcctcccaaagttctgggattacaggggtgagccactgtgcccggccataattttatatttttagaaaataaagaatgaaggacaaaagagcacagctaaatgaaactgctgctctaatttattccactggaaaggtctcaggactccttaactgttttccaggtttggctcttcatatctaacctgtgctaaaatgagaaggtatgctaggtgctgttagaaatcacaccatttccaaagaacccaagtagtatagagaccaaaatgaggcaaaaataaaagagatgaaacaggagagtttatttcttgcatactttccgaccttcatcatacaacctctcctaacctccctgtagtctttaaaatgtttaacttgcctataagctaacatgtaataaaacacatactcaattatatgaatagaagtggagagccagaatgctacaaaagaaatcacagctgctagaagtatcctccatagaaacatcaacatgattgtggatcaaaatgattttcactggatatggaatttgtatgggccatatttattaaaagagttctgtgtggtcacatagagttcctttgggatttcatcccacttttcaggacttaatttgtttgggtttgcttacctaacaagcaacaacaacaacaaaataaatagttccaaaatctagtttattacataaatctctatgaatccttgagggcctatatctatattataaataaatacaaatatagatttttaaatatctatgggactttgccatttacagccttaagtataaaattacgagattatattctttccattaccctttatttctgctaactttttaaagactggaacattctgtggatgttgtcaaagtttgagtttgtttttccctgtgtattataataaatttgtggtattgcaaaaaaaaaaaaaaaaaaa

SEQ ID NO: 2651 - DNA, 497 bp, Homo Sapiens
  misc_feature (4)..(4): n is a, c, g, or t
  misc_feature (12)..(12): n is a, c, g, or t
  misc_feature (43)..(43): n is a, c, g, or t
  misc_feature (46)..(46): n is a, c, g, or t
  misc_feature (63)..(63): n is a, c, g, or t
  misc_feature (172)..(172): n is a, c, g, or t
  misc_feature (294)..(294): n is a, c, g, or t
  misc_feature (370)..(370): n is a, c, g, or t
  misc_feature (428)..(428): n is a, c, g, or t
  misc_feature (436)..(436): n is a, c, g, or t
  misc_feature (456)..(456): n is a, c, g, or t
acanacgctggnacccacgacgacagaaggcgccgatggcgcnctngctgagccctgcgcgcngcagggcgtctggaaccagacagagcctgaacctgccgccaccagcctgctgagcctgtgcttcctgagaacagcaggggtctgggtaccccccatgtacctctgggtncttggtcccatctacctcctcttcatccaccaccatggccggggctacctccggatgtccccactcttcaaagccaagatggtagctgccatccctgggagcctggaaccaggaatgttcgngggaggcaggggacaggctggaacctggtgaagtcttaaagtagactcctccgtatcggggtgtagaagggaatcngttaatcaaaccagagcaatattagaaaggctacagaggtcaactcagtgggaacacngtttcttnccaaacagattttgtaattncgaaaatccacgcatgggcaaacatacgcatacactcccat

SEQ ID NO: 2652 - DNA, 2809 bp, Homo Sapiens
acttccggaatctctcggcgtgtgagcttggttgtcctaccaaagccagcgtttcggctcgcgtgcgccggcctagtttgctcgcgccctcacgcgctttgggtttcccggtctcatggccggcctgaccttatttgtgggccgcctcccgccctcggcccgcagtgagcagctggaggaactgttcagtcaggtggggccggtgaagcagtgcttcgtggtgactgaaaaagggagtaaggcatgtcgaggctttggctatgtcactttttcaatgctggaagatgttcagagggccctcaaggagattaccacctttgaaggttgcaagatcaacgtgactgttgccaagaaaaaactgaggaacaagacaaaggaaaaggggaaaaatgaaaactcagagtgcccaaagaaggagccgaaggctaaaaaagccaaagtggcagataagaaagccagattaattattcggaacctgagctttaagtgttcagaagatgacttgaagacagtatttgctcaatttggagctgtcctggaagtaaatatccctaggaaaccagatgggaagatgcgcggttttggttttgttcagttcaaaaacctcctagaagcaggtaaagctctcaaaggcatgaacatgaaagagataaaaggccggacagtggctgtggattgggccgtggcaaaggataaatataaagatacacagtctgtttctgctataggtgaggaaaagagccatgaatctaaacatcaggaatcagttaaaaagaagggcagagaggaagaggatatggaagaggaagaaaacgatgatgatgacgatgatgatgatgaagaagatggggtttttgatgatgaagatgaagaggaagagaatatagaatcaaaggtgaccaagcctgtgcaaattcagaagagagcagtcaagagaccagcccctgcaaaaagcagtgatcattctgaggaggacagtgacctagaggaaagcgatagtattgatgatggagaggaactggctcagagtgataccagcactgaggagcaagaggataaagctgtgcaagtctcaaacaaaaagaagaggaaattaccctctgatgtgaatgaagggaaaactgtttttatcagaaatctgtcctttgactcagaagaagaagaacttggggagcttctccaacagtttggagaactcaaatatgtccgcattgtcttgcatccagacacagagcattctaaaggttgtgcatttgcccagttcatgactcaagaagcagctcagaaatgccttctagctgcttctccagagaatgaggctggtgggcttaaactggatggccggcagctcaaggttgacttggcggtgacccgtgatgaggctgcaaagcttcagacgacgaaggtgaagaagccgactggcacccggaatctctatctggcccgagaaggcttgattcgtgctgggacgaaggctgcagagggtgtgagtgctgctgatatggccaaaagagaacggtttgagctgctgaagcatcagaaactcaaggaccagaatatctttgtctcccgaaccaggctctgcctgcacaatctcccaaaggctgtagatgacaaacagctcagaaagctgctgctgagtgctactagtggagagaaaggggtgcgcatcaaggagtgtagagtgatgcgagacctcaaaggagttcatgggaacatgaagggtcagtccctgggctacgcctttgcggagttccaagagcacgagcatgccctgaaagccctccgcctcatcaacaacaatccagaaatctttgggcctctgaagagaccaatagtggagttctctttagaagatcgaagaaaacttaaaatgaaggaattaaggatccagcgcagcttgcaaaaaatgagatccaagcctgcaactggtgagcctcagaaggggcaaccagagcctgcaaaagaccagcaacagaaggcagctcaacaccacacagaggaacaaagcaaggtgcccccagagcagaagagaaaggcgggctctacctcatggaccgggttccagaccaaggctgaagtggagcaggtggagctgcctgatggaaagaagagaagaaaggtcctggcgctcccctcacaccgaggccccaaaatcaggttgcgggacaaaggcaaagtgaagcccgtccatcccaaaaagccaaagccacagataaaccagtggaagcaggagaagcagcaattatcgtccgagcaggtatctaggaaaaaagctaagggaaataagacggaaacccgcttcaaccagctggtcgaacaatataagcggaaattattgggaccttctaaaggagcacctcttgcaaagaggagcaaatggtttgatagttgatgatggcagcaggctgggtaagaagctgggttgtgtactttctggtgacactcctgggctcctccccatcccccgtgtctctcactgagggaaagaaaatccccaagggcactgccactgtgctcggaggtgccctggactgtgtacatctgaactttggtccatcctttgatgtgtggttcgttagccacaaagagaaatatctgaaagtcaacatgatgcttcttgcatattatccagattattgtatgaagttgtgtctataattattaccaattttttattctttatttctcaaatggaaacacctgaaaaagcattctggagtgctgaatttttaagatgtatattttgttaagcatattctctaaatgagatattgtgtggctttttagtaacaacgtcatttctaat

SEQ ID NO: 2653 - DNA, 347 bp, Homo Sapiens
tttttttttttttttttttttttttgcataattagtattatttattaagcacccagagaacagtcaagaccaaagtccctgcttgtccttggaaaaatgtcacctctatagcaggtgtcctaaccctgcagtccacccaccttaggaagtccttgaatagctctctgggggaaatctatcagctgcctgaagagctttgtgtgtatttgtacaccagcattttcctgaggaaggaggtgcctggcttcatcagtttctcaaagggtctaggacctcaaaagggatcagaatctagatatttggataccctattttttttttttttggcaaaggtggggtctcgctat

SEQ ID NO: 2654 - DNA, 567 bp, Homo Sapiens
ggtagcgaggtctgggtggcgacttcggcacgagggcggttgccacagctggtttagggccccgaccagtggggccccttgtcaggaggagacagcctcccggcccggggaggacaagtcgctgccacctttggctgccgacgtgattccctgggacggtccgtttcctgccgtcagctgccggccgagttgggtctccgtggttcaggccggctcccccttcctggtctcccttctcccgctgggccggtttatcgggaggagattgtcttccagggctagcaattggacttttgatgatgtttgacccagcggcaggaatagcaggcaacgtgatttcaaagctgggctcagcctctgtttcttctctcgtgtaatcgcaaaacccattttggagcaggaattccaatcatgtctgtgatggtggtgagaaagaaggtgacacggaaatgggagaaactcccaggcaggaacaccttttgctgtgatggccgcgtcatgatggcccggcaaaagggcattttctacctgacccttttcctcatcctggggacatgtacactcttc

SEQ ID NO: 2655 - DNA, 710 bp, Homo Sapiens
tcccacacttctgaggttttctttccaggacagcctggtttcccttcttcggcttattgttccatcagatttcagattttgagttctgatttttggtcagaagagtaaagtttctgggattggggacgtgtgtgctatgggaactcagtgtgtccccagcccttgtttgtaaacaaggaagggacagagatcagggaaataaaggcagaaggcagtgagagggaggctatgcctgctgcttggattctctgggctcactcccacagtgagctgcacactgtgatggagactcctctggagaaggccctgaccactatggtgaccacgtttcacaaatattcggggagagagggtagcaaactgaccctgagtaggaaggaactcaaggagctgatcaagaaagagctgtgtcttggggagatgaaggagagcagcatcgatgacttgatgaagagcctggacaagaacagcgaccaggagatcgacttcaaggagtactcggtgttcctgaccatgctgtgcatggcctacaacgacttctttctagaggacaacaagtgaccagggctgccctccaccctcaccctccaccctttgctgctgacctcggctgctcctctcacagaccctctttggccccctgccctcctctccctcccagatggacccttccatgggaggaaataaagtttccatcgcaggtgctggga

SEQ ID NO: 2656 - DNA, 645 bp, Homo Sapiens
gcctcgagtttttttttttttttttttcatgtctgcagtgttcttgtttatttgtttactagttcatcgtctactcaagtagaatgagcaccatgagggcagggattttctcagctgtgtccaccatggtatcatgaactcagtaccaggcttggcaaaaagcgtgggactccttagaaccaggtatgattctcccaaacaacccttgctctgctctgaggctgtcgtactgatttgcaaagatctgagccgggggtggcagaagcctggtacccaggggattgggggctgatgagagacttgggcccaggtcacccctaaggttcaagagatccctaggagtggggtggtagaacccaggcccttgagggaggcactgctactacccaggcgtgggcggtggggctgggccaagcccacgtataatgtctttcctcctccatcttctatcttttgtccctcgacattgtctgtcttgatccttatgcactggggatccgagtgtccaggagctccggcttggcatccactgtggcaggtgcagggtcctgggcaaggaccatggctatgtcaggccctccacagatgatggtgaaggtttgggattcctcaggtccaagggtctgggctgttgtcaggcgctgc

SEQ ID NO: 2657 - DNA, 326 bp, Homo Sapiens
tttttttttttttttttttttttttttaagagttaatgagctgctgttttattgcttttgaatctacagaggcagcaatccttagatgggggccccagttttccaaagtgacactcaattttcccctccccccagtacaccacccttctggcctcagctttcagtttcctgtcttggctgcaactgtggaaatagtgaagatattgtgagacagaaagtcagtctggaacaaagaggtatacacctgctaagaaggtggcccagaagcctgattctagaagtcctaaaggctacagagcaccaccaccccacctgcccctaatgca

SEQ ID NO: 2658 - DNA, 2722 bp, Homo Sapiens
aagccgaacaccatggccgtctggcttgcccagtggctgggccctctgctcttggtttccctctggggactcttggctccagcctcccttcttaggcgcctgggtgagcacattcagcagtttcaggagagctctgcccagggcctgggcctgagcctggggccaggtgctgcagccctcccaaaagtggggtggctggagcaactgctggaccccttcaacgtgtccgacagacgatccttcctacagcgttactgggtgaatgaccaacattgggttggccaggatggacccatattcctgcatctagggggtgagggcagccttgggcctggctcagtgatgagaggccatcccgcagccttggccccagcctggggcgccctggtgataagcctggaacacagattttatggcctgagtatacctgctggaggcctggaaatggcccagctccgcttcttgtccagccgccttgcgctggctgatgtggtctctgcccgcctggcactttcccgcctctttaacatctcctcctccagcccctggatctgcttcggaggctcctatgccggctccttggccgcctgggcccggctgaagttcccccatctcattttcgcgtcggtcgcctcctccgccccggtgcgggccgtgctggatttctccgagtataatgacgtggtatcccgaagcctaatgagcaccgcgatcggcgggtccctggagtgccgggcggcggtgtccgtcgccttcgctgaagtggagcggcggctgcgctcgggtggggcggctcaagcagcattgcggacggagctgagcgcttgcgggcccctgggccgcgctgaaaaccaggcggagctgttgggggcgctgcaggcactggtgggaggtgtagtgcagtatgatgggcagacgggagcgccgctaagcgtgcgacagctctgcggacttctcctcgggggcgggggcaaccgcagccactccacgccctactgcgggcttcgtcgggcggtgcagattgtcttgcacagcctgggccagaagtgtttaagcttttcccgagcagagacagtggcacagctgaggagcacagaacctcaactgtctggtgtgggtgaccggcagtggttgtatcagacatgtaccgagttcggcttctatgtcacctgtgagaatcccagatgtcctttctcccagctcccagcactgccctcccagctagacctatgtgagcaggtgtttgggctctcagccttgtcagtagcccaggctgtggctcagacgaactcctactacggtggccagacccctggggctaacaaagtgctgtttgttaatggggacacagacccctggcatgtgctaagtgtaacacaggctttaggatcctcagaatcaactcttcttatccgcactggctcccactgcttggacatggcacctgagaggccctcagactcccccagcctccgcctagggcgccagaacatcttccagcagctacagacctggctcaagctggcaaaggagagccagattaagggtgaagtctgaatctcataccctttccactccctgcatggtcacctcagtcctggacatacttgttcactgaacaaaagaaagcagcttgttttgaaagaagaaactcccaggaattggaattcagcacctgttccgcacgtaattggcatgtgtctgcaaacatccttattcccaacttaaagtgctttattgcagagagttatggaaatataagtggatgattattctcattgtaaatattggtattttgaatgttaaatgtcaaacaaatgtgacttatgctggtgccctcgccctgctgatcagattctggttcaaattctgccactccagctcctgggttaggggctttgctgtaagtttctttttctggactttagatcctgaacctgtccttgcttctcagtttctctcactgtacccctttccctcagtctcttcctctctctttcccctgtcactatttgtctttctaatctccttctgtttctctgaatatcttcatttctatctctgtgtttctgtctatttctctgtttatctttctgtccttcaatctgtgtttttgtttctggctctccgtcagtgtctttttctctcctctctctcttgctctgccatggctatttccactgctctatttctgactctcatttttggtctctgtgtgtctcctagtcactttctttctcactctgtctctgtctctatttctgtctctcctctgctgtgtcctcaatctctctgtctccctgaggctctatttctgtctctcctctgctgtgtcctcaatctctctgtctccctgaggctctatttctgtctctgatgctcttcttctgtgtctctatttctcttcctgtcacttaatcttttccttctctatctctcttatttagtcttccttccacacccttcactcaccatcttttcccacaatcaaatatcactccctggtacttccagcttccaactctagggattcatgattctggtggagattccttcttccagggcctgggaggatagggctaatcccaagggtgcctgcttaggctatgttagctgtgacaggaacctgccatagatttgcactgttctttcctaaagatcaattattttcagcaataaatacttctcagctttttgtatgtctttgtatgcaaaaaaaaaa

SEQ ID NO: 2659 - DNA, 314 bp, Homo Sapiens
tttttttttttttttttttttttttttttttggaatgaataacttcagtctttattcactggggggtggggggggttggggcagggaacggcatgcccagcatgcaacacaaggcgtgggtggagtggattcacagtctttttggaaaaaagcaggcaggaagcaggttggctgtgcagtgtggcctgagaatgagctcaaaacaggaagaggggaaaaggaactgggctggccaaaaggcttctttctggaaaaggcaggactggagcagggattttgaagcgtgggtacaggttggaaaaaaaagcaaacat

SEQ ID NO: 2660 - DNA, 514 bp, Homo Sapiens
  misc_feature (512)..(512): n is a, c, g, or t
gagaaatcaactattcaggaccggcccccacctttcctcaggagtcatttctgttccgcacaggcctgctgaactggggtgctttatataggaaaggaccaaccacgccgagctcagttatggcacacacagtgggacctagacaaagggagagggtgaccgacatcccaactagatttcagtcggagtgaagttcaggaggcatggagctgacaaccatgaggcctcggcagccaccgccaccaccgccgccgccaccaccgtagcagcagcagcagcagcagcagcagcaagagtaactctgacttaggaatagagacagccagagagaaatgtgatcaatgaaggagacatctggagtgtgcgtgcttcttcagagggacgggtgatgggcagattggaaaaagcaccgcagatgggaaccttaatctttcttttctaaaattgatgctatgaaaatttgcgttttctgtaacttgttaaaactaaaagttgcttgtctactgaaaaanaa

SEQ ID NO: 2661 - DNA, 474 bp, Homo Sapiens
ctgccagtgggacattttctcggcctgccagcccccaggaggaaggtgggtctgaatctagcaccatgacggaactagagacagccatgggcatgatcatagacgtcttttcccgatattcgggcagcgagggcagcacgcagaccctgaccaagggggagctcaaggtgctgatggagaaggagctaccaggcttcctgcagagtggaaaagacaaggatgccgtggataaattgctcaaggacctggacgccaatggagatgcccaggtggacttcagtgagttcatcgtgttcgtggctgcaatcacgtctgcctgtcacaagtactttgagaaggcaggactcaaatgatgccctggagatgtcacagattcctggcagagccatggtcccaggcttcccaaaagtgtttgtggcaattattcccctaggctgagcctgctcatgtacctctgattaataaatgcttatg

SEQ ID NO: 2662 - DNA, 365 bp, Homo Sapiens
taaaattctttggattttttattggattcacataaagcaaagaacttactcacttggaccgagaatatattgtaatgttccataagtcataacttaaggaccgagaatatattgcaatgttccataagtcataatttaatgtgcagtaagaacccatgaagttgtctgaccaaaagtaacactcttctgttgggaaagattttacatccttttattctggatgaatcctgaattctagatgttgggtttaatgcttcacacaatggcacatttacaagaggtacaaaacacttattgagctttcagggccactgtaaggggcttgcagaatagcctctttgcaacccagagaattaatctgattc

SEQ ID NO: 2663 - DNA, 449 bp, Homo Sapiens
tttttttttttttttttgaagcatcttttttttattcagatttttccagtcaagtaaattgtctcaaggcccctggcccaggtctgagtgtcactaccagaaggatccaccagatggcactccttcgctacttcctgtactcccaacttgccagagatgtcgcctctttccgctaaggcacaaaacttgcagagccaggtgttccccaggcgcttccccgcacgccaccgcccgcgccatccccccagcccccaccagcgtggtgagggtgtcctcggtccccaaggtctgcagtcttggccctctctgagtcgggttcatctctcgggcttccagggttctttttgaggggcgctctccagcttcgggctccagttctgcccagtccgcacatcgacccccccggtcaccagggcgccaggggctgggcttcaccaggacaccctcag

SEQ ID NO: 2664 - DNA, 221 bp, Homo Sapiens
  misc_feature (159)..(159): n is a, c, g, or t
  misc_feature (164)..(164): n is a, c, g, or t
  misc_feature (201)..(201): n is a, c, g, or t
agataacttgaatacctcttagtctaggtagatactttcactggataggtagaggccttttctacagggtctgagaaggccacggcagtcatttcttccattctgtcagacataattcctcagttaagccttcccacctcaatacagtctgataacagntgagnctttattagtccaatcagccaagcagtttttcaggcncttagtaattcagtgaaccc

SEQ ID NO: 2665 - DNA, 340 bp, Homo Sapiens
  misc_feature (8)..(8): n is a, c, g, or t
  misc_feature (13)..(13): n is a, c, g, or t
  misc_feature (22)..(22): n is a, c, g, or t
  misc_feature (147)..(147): n is a, c, g, or t
  misc_feature (194)..(194): n is a, c, g, or t
  misc_feature (216)..(216): n is a, c, g, or t
  misc_feature (265)..(265): n is a, c, g, or t
gcgcaagnttggnacgcagggnaagtgggaagtgtgagtcctcagtcttgggctattcggccacgtgcctcgcggacatgggacgctggagggtcagcagcgtggagtcctggccttttgcgtccacgggtgggaaattggccattnccacggcgggaactgggactcaggctgccccccggccgtttctcatncgtccaccggactcgtgggcgntcggactggcgctgatgtagtttcctggacctctgacccgtattgtctncagattaaaggtacgacatttgggagggcccagcgagaaacgtcaccggggagaaacgttaccggggcgagagcg

SEQ ID NO: 2666 - DNA, 633 bp, Homo Sapiens
aatttaggtgacactatagaagagctatgacgtcgcatgcacgcgtacgtaagctttttatcctcttgtagcggccgcctactactactaaattcgcggccgcgtcgacatttaatcttcacagcaactttgaagtaggtactattactgtgcatattttgaagatgggaaaactgaggcagacagtttgcctctggagccctcactcttaaactcttatgatatataccagaaactgtgacatagcccaggtgccaaatctggccctccacctgcttttgtaaataaagttttattggaatacacccatgcccactcatttacacattgtctatagccatttcggtgctatagcttcagggtggagtagttgctacagagaccacgtggcccacaaaccttaaaacacctactgtttggcactttgcagaaaaagtttgctaacccctgatgtcaactttaaactttacaaaaagactggagtttaaagggaaagaaataatatcttataataaaaatgccttatgtttgggatttactgtggatttgtacatatttatcttacttaattctcatagcaatcctgtgaaagaagtagtctttttatttccattttagaaatgaagaatcagg

SEQ ID NO: 2667 - DNA, 516 bp, Homo Sapiens
aatttctgtaaatcagaatattcagatgttgaaaaagtctttgccttcagatttaaaagatacctttgaaatgtagcatatcccaaaatgcaacccagaggctggcaatgtcaacatttttctgttttaaaaaacctcttatgaaaactattgccatactaaattttttacttgctgatgacttacagctggaaaggattctgtacatataagacatcaaatattgaggatactggaacttttaaattaatggcaaagaaagtcaacaaaggaagttcatatgaaatcaaactagtaatatgattaaaaaaaaaaaagtttaaaatttttcttggccccagtcttatcatttctgagccaaatacaattctatcgaaatcacctgaaactgaaatcaccattctaggctggttttcccataaagatggactgctccaaaaagaggaatcaagaaagaatttggctcacagtgaattattcactttgtcttagttaagcaaaaaaaaaatctgactg

SEQ ID NO: 2668 - DNA, 255 bp, Homo Sapiens
ttttttttttttttttcacatgctgatgtagcggccgatgatttcaacgcctggctttgagattccgtgagtaatcttgaagaaattagaagtcgaaaatcaaattctacttaatttctcataaagcgattggatttcctaattctcagatttaacatgtaagaaagtactttcgctaggggtcttaaatgaatggtggggtcgagatgactgcgtcagaattaaatctctggaatacctcagagctccttttaa

SEQ ID NO: 2669 - DNA, 349 bp, Homo Sapiens
ttttttttttttttttttttttttttttttggagaaacaagtcagtgctttattaacctggcaaaggggcagctaggcggcctgagcagcccctgccaaaccctcctttgcactcctttgcctaagtcacggcccaagccctggacacgtaggagtgtaggcgggcaggggcaaggccaaggaaggggtggagttgtccaatgcaaatgttaaggtccaacccgacttccttactgagtctaggtgtgggggccccccttttaccccttcctccctgcacagctttggctcttcctggagtcaggaggctgtgtgtcccacatctgctgtggtctggaaggtgatccca

SEQ ID NO: 2670 - DNA, 468 bp, Homo Sapiens
  misc_feature (26)..(26): n is a, c, g, or t
  misc_feature (181)..(181): n is a, c, g, or t
  misc_feature (246)..(246): n is a, c, g, or t
  misc_feature (320)..(320): n is a, c, g, or t
  misc_feature (325)..(325): n is a, c, g, or t
  misc_feature (376)..(376): n is a, c, g, or t
  misc_feature (384)..(384): n is a, c, g, or t
  misc_feature (436)..(436): n is a, c, g, or t
  misc_feature (442)..(442): n is a, c, g, or t
agggcggggaggtgtagcgtggcgtncagtccgcctgctactcggtcccggcgctgggctgaggggaggggttgtcttaaaagtctctccttccccctgtagggcggccggcgagtcccagtgagagcggagggtgccagaggtagggggccgagaaacaaagttcccggggcttcctccngggccgcggtcggggctgcgcgtttgaccgcccccctcctcgcgaaggcaatggcttccaaactnctgcgcgcggtcatcctcgggccgcccggcttcgggaaagggcaccgtgtcaagaaggatcgcccagaactttngtctncagcatttttccagcggccaattttttgcgggagaacatcaaggccagcancgaagttngtgagattggcaaagcagtattattagagaaaagtttttttggttttcagancatttngattcaaaagggttaattgatgttcc

SEQ ID NO: 2671 - DNA, 231 bp, Homo Sapiens
  misc_feature (103)..(103): n is a, c, g, or t
  misc_feature (124)..(124): n is a, c, g, or t
  misc_feature (129)..(129): n is a, c, g, or t
  misc_feature (152)..(152): n is a, c, g, or t
  misc_feature (185)..(185): n is a, c, g, or t
  misc_feature (196)..(196): n is a, c, g, or t
  misc_feature (203)..(203): n is a, c, g, or t
catatacaaaatcactttaatggttattcatataagtagatttatatagacagaaaatagctccatttttttttttttttttttttttttttttgccaagcantcaagcaaaacacaagaccantaganttagtagacagaagccttggggncaatggcagttcccttcctgagtaagacatgantgccatctggnggttccntttgaaactacagtgcagtaaccaaaga

SEQ ID NO: 2672 - DNA, 577 bp, Homo Sapiens
  misc_feature (471)..(471): n is a, c, g, or t
  misc_feature (482)..(482): n is a, c, g, or t
  misc_feature (496)..(496): n is a, c, g, or t
  misc_feature (502)..(502): n is a, c, g, or t
  misc_feature (519)..(519): n is a, c, g, or t
tgcaagtacaagggtaactttattgacccccagctgggcactgcttggcccctacatcattacccccctattttggctgttgcccccatggcactgcctgtcaacttctacaacctggtgatgtctggcatcaacccctcccaaagatggaggggattctcttgcgagtgatggtggcagctgtttcagggggcacagggctaaggctgagacgtgtcacctcaactgaagcagaagaggtggattatggcattggccacgaagaaaaggaaaatgcctccgctcatgctgctggatgctgaggggctgctggtttggctggtgtcgttttgtcctgagagtccagtttgtatctgtaccataaccaggaggctgatggtgagtaggaggaagaggaacgcttcattttggtaggacttcgtggctgtcttggtagcactttttaggtgatcccagggctgtctggagctnttttggtttantgcttttgaacagnctcgtncgaatcttggcctcgangcaaattcctatagtgagccgattaaatcgtaacatgcatactgtcccgtggaagtgg

SEQ ID NO: 2673 - DNA, 451 bp, Homo Sapiens
ttttcttttctttctttcttttttttttttgtagagacagggtcttgctgggttgctcaggctggtctcctggcctcaaaagatcctccagcctcagccccacaaagcactgggattacaggcgttgagacatcgtgcctggcctggatgatattatttcagtgagctctctatgccagtcttcaatgtggtgctcatcccacaaatatgtcatttctggattggtgttggaaaagggtatggatctgatgaaacagacacttattacatcccttaggtatgactgcatagcaaagaatatacaaaaagggttaacagtaaggggttctttacttggggcttcaggaatacccgggggcccatttaactgtatacaaaactacgtctctatgcatatgtgtgcatttcttctgaggagagtgttcatacctttcattagattttcaaagag

SEQ ID NO: 2674 - DNA, 6940 bp, Homo Sapiens
cttaaagtagatcatggaggacacccaggctattgactgggatgttgaagaagaggaggagacagagcaatccagtgaatccttgaggtgtaacgtggagccagtagggcggctacatatctttagtggtgcccatggaccagaaaaagatttcccactacacctcgggaagaatgtggtaggccgaatgcctgactgctctgtggccctgccctttccatctatctccaaacaacatgcagagattgaaatcttagcctgggacaaggcacctatcctccgagactgtgggagccttaatggtactcaaatcctgagacctcctaaggttttgagccctggggtgagtcaccgtctgagggaccaggaattgattctctttgctgacttgctctgccagtaccatcgcctggatgtctctctgccctttgtctcccggggccctctgacagtagaagagacacccagagtacagggagaaactcaaccccagaggcttctgttggctgaggactcggaggaggaagtagattttctttctgaaaggcgtatggtaaaaaaatcaaggaccacatcttcctctgtgatagttccagagagtgatgaagaggggcattccccggtcctgggcggccttgggccgccttttgccttcaatttgaacagtgacacagatgtggaagaaggtcagcaaccagccacagaggaggcctcctcagctgccagaagaggtgccactgtagaggcaaagcagtctgaagctgaagttgtaactgaaatccagcttgaaaaggatcagcctttagtgaaggagagggacaatgatacaaaagtcaagaggggtgcagggaatggggtggttccagctggggtgattctggagaggagccaacctcctggagaggacagtgacacagatgtggatgatgacagcaggcctcctggaaggccagctgaggtccatttggaaagggctcagccttttggcttcatcgacagcgacactgatgcggaagaagagaggatcccagcaaccccagttgtcattcctatgaagaagaggaagatcttccatggagtaggtacaaggggtcctggagcaccaggcctggcccatctgcaggagagccaggctggtagtgatacagatgtggaagaaggcaaggccccacaggctgtccctctggagaaaagccaagcttccatggttatcaacagcgatacagatgacgaggaagaagtctcagcagcgctgactttggcacatctgaaagagagccagcctgctatatggaacagagatgcagaagaggacatgccccaacgtgtggtccttctgcagcgaagccaaaccaccactgagagagacagtgacacagacgtggaggaggaagagctcccagtggaaaatagagaagctgtcctcaaggatcacacaaagattagagcccttgttagagcacattcagaaaaggaccaacctccttttggggacagtgatgacagtgtggaagcagataagagctcacctgggatccacctggagagaagccaagcctccaccacagtggacatcaacacacaagtggagaaggaagtcccgccagggtcagccattatgcatataaagaagcatcaggtgtctgtggaggggacaaatcaaacagatgtgaaagcagttgggggaccagcaaagctgcttgtggtatctctagaggaagcctggcctctgcatggggactgtgaaacagatgcagaggagggcacctccctaacagcctcagtagttgcagatgtaagaaagagccagcttccagcagaaggggatgctggggcagagtgggctgcagctgttcttaagcaggagagagctcatgaggtgggggcccagggtgggccacctgtggcacaagtggagcaggacctccctatctcaagagagaacctcacagatctggtggtggacacagacactctaggggaatccacccagccacagagagagggagcccaggtccccacaggaagggagagagaacaacatgtgggtgggaccaaggactctgaagacaactatggtgattctgaagatctggacctacaagctacccagtgctttctggagaatcagggcctggaagcagtccagagcatggaggatgaacctacccaggccttcatgttgactccaccccaagagcttggcccttcccattgcagcttccagacaacaggtaccctagatgaaccatgggaggtcctggctacacagccattctgtctgagagagtctgaggactctgagacccagccttttgacacgcaccttgaggcctatggaccttgcctgtctccacctagggcaataccaggagaccaacatccagagagcccagttcacacagagccaatggggattcaaggcagagggaggcagactgtggataaagtcatgggtataccaaaagaaacagcagagagggtgggccctgagagagggccattggagagagaaactgagaaactgctaccagaaagacagacagatgtgacaggagaggaagaattaaccaaggggaaacaggacagagaacaaaaacagttgttagctagagacacccagagacaagaatctgacaaaaatggggaaagtgcaagtcctgaaagagatagggagagtttgaaggtagaaattgagacatctgaggaaatacaagagaaacaagtacagaagcagacccttccaagcaaagcatttgagagagaagtagagagaccagtagcaaacagagagtgcgatccagccgagttagaagagaaggtgcccaaagtgatcctggagagagatacacagagaggggagccagagggagggagccaggaccagaaagggcaggcctccagcccaacaccagagcctggggtgggggcgggggaccttccgggacctacctcagcccccgtaccttctgggagccagtcaggtggaaggggatccccagtgagccccaggaggcatcagaaaggcctcctgaattgcaagatgccacctgctgagaaggcttccaggatcagagctgctgagaaggtttccaggggcgatcaggaatctccagatgcttgtctgcctcctgcagtacctgaagccccagccccaccccaaaagccccttaactctcagagccagaaacatcttgcacctccgccccttctttctccccttttaccttctatcaagccaaccgttcgtaagaccaggcaagatgggagtcaggaagctccagaggctcccttgtcctcagagctggagcctttccacccaaagcctaaaattagaactcggaagtcctccagaatgacaccctttccagctacctctgctgcccctgagccccacccttccacctccacagcccagccagtcactcccaagcccacatctcaggccactaggagcaggacaaataggtcctctgtcaagacccctgaaccagttgtccccacagcccctgagctccagccttccacctccacagaccagcctgtcacctctgagcccacatctcaggttactaggggaagaaaaagtagatcctctgtcaagacccctgaaacagttgtgcccacagcccttgagctccagccttccacctccaccgaccgacctgtcacctctgaacccacctctcaggctactaggggaagaaaaaatagatcctctgtcaagacccctgaaccagttgtccccacagcccctgagctccagccttccacctccacagaccagcctgtcacttctgagcccacatatcaggctactaggggaagaaaaaatagatcctctgtcaagacccctgaaccagttgtgcccacagcccctgagctccggccttccacctccacagaccgacctgtcacccccaagcccacatctcggaccactaggagcaggacaaatatgtcctctgtcaagacccctgaaacagttgtccccacagcccctgagctccagatttccacctccacagaccaacctgtcacccctaagcccacatctcggaccactaggagcaggacaaatatgtcctctgtgaagaaccctgaatcaactgtccctatagcccctgagctcccaccttccacctccacagagcagcctgtcacccctgagcccacatctcgggctactaggggaagaaaaaatagatcctctggcaagacccctgaaacacttgtccccacagcccctaagctcgagccttccacttccacagaccaacctgtcactcctgagcccacatctcaggccaccaggggcaggacaaataggtcctctgtgaagacccctgaaacagttgtccccacagcccctgagctccagccttccacctccacagaccagcctgttacccctgagcctacgtctcaggctactaggggaagaacagatagatcctctgtcaagactcctgaaacagttgtccccacagcccctgagctacaggcttccgcctccacagaccagcctgtcacctctgagcccacatctcggaccactaggggaagaaaaaatcggtcctctgtcaagacccctgaaacagttgtgcccgcagcccctgagctccagcctcccacctccacagaccgacctgtcacccctgagcccacatctcgggccactaggggcaggacaaataggtcctctgtcaagacccctgaatcaattgtccctatagcccctgagcttcagccttccacctccagaaaccagcttgtcacccctgagcccacatctcgggccactaggtgcaggacaaataggtcctctgtcaagacccctgagccagttgtccccacagcccctgagccccatcctaccacctccacagaccagcctgtcacccccaagctcacatctagggccactaggagaaagacaaataggtcctctgtcaagactcccaaaccagttgaaccagcagcctctgatcttgagccttttacccccacagaccagtccgtcacccctgaggccatagctcagggtggtcagagcaaaacactgaggtcttccacagtaagagctatgccggttcctaccacccctgaattccaatctcctgtcaccacagaccagcctatttcccctgagcctattactcaacccagttgcatcaagaggcagagagccgctgggaaccctggctccctcgcagctcccattgaccataagccttgctctgcacccttggaacctaaatcccaggcctcaaggaaccaaagatggggagcagtgagagcagctgaatcccttacagccattcctgagcctgcctctccccagcttcttgagacaccaattcatgcctcccagatccaaaaggtggaaccagcaggtagatctaggttcaccccggagctccagcctaaggcctctcaaagccgcaagaggtctttagctaccatggattcaccaccacatcaaaaacagccccaaagaggggaagtctcccagaagacagtgattatcaaggaagaggaagaagatactgcagagaagccagggaaggaagaggatgtcgtgactccaaaaccaggcaagagaaagagagaccaggcagaggaggagcccaacagaataccaagccgcagcctccgacggaccaaacttaaccaagaatcaacagcccccaaagtgctcttcacaggagtggtggatgctcggggagagcgggctgtgctggcactggggggaagtctggctggttcagcggcagaggcttcccacctggtcactgatcgcatccgccggacagtcaagttcctgtgtgccctggggcggggaatccccattctgtccctggactggctgcatcagtcccgcaaggctggtttcttcttacccccggatgaatatgtggtgaccgaccctgagcaagagaagaactttggctttagccttcaagacgcactgagcagggctcgggagcgaaggctgctagagggctatgagatctatgtgacccctggagtccagccaccaccacctcagatgggagagattattagctgctgtggaggcacatacctacccagcatgcctcggtcctataagcctcagagagttgtgatcacatgccctcaggacttccctcattgctccattccactacgggttgggctgcccctcctctcgcctgagttcctgctgactggagtgctgaagcaggaagccaagccagaggcctttgtcctctcccctttggagatgtcatccacctgagaactccactacccttttccctcccagaccacgaattagaagatatgtggaagaaagaactcagggcgttagaaaggattggggtatattgatacaacttgtcctggaacatgggtgggaccagaaatctttatgaataaatgaaaagataagggatttggaagccacaggttgttttttgtttgtttgtttgtttttttaatggccattttattttatttgtatttatagttttttatttgtatagatttaggggatacaagatttcttacatgcatgtattaaatggccattttaaaattagctagtttcatgctcagatgtcataagtggcagctatctttagccagactgttgcagttattgctcgatgccactcatggtgtcctacctcctatttggaaaccatctctatttttttcttactgagattcttactttggggtcaggaacttgaagggatgcttggagtgagtagatttgagggtccagttatggagtgctactaaaacattttcttctctcctggcctctggaagcatctttagctttgactttgggcaagtctctgtacttttctggccagcttttccaggatttataaaattagagcttcggcttgacctctgtgataaataaatattcactctgtgcctt

SEQ ID NO: 2675 - DNA, 435 bp, Homo Sapiens
ggagttgtgaagggcgcgggtggggggcgctgccggcctcgtgggtacgttcgtgccgcgtctgtcccagagctggggccgcaggagcggaggcaagaggggcactatggcagacaaagttaggaggcagaggccgaggaggcgagtctgttgggccttggtggctgtgctcttggcagacctgttggcactgagtgatacactggcagtgatgtctgtggacctgggcagtgagtccatgaaggtggccattgtcaaacctggagtgcccatggaaattgtcttgaataaggaatctcggaggaaaacaccggtgatcgtgaccctgaaagaaaatgaaagattctttggagacagtgcagcaagcatggcgattaagaatccaaaggctacgctacgttacttccagcacctcctggggaagcaggcagataa

SEQ ID NO: 2676 - DNA, 413 bp, Homo Sapiens
gctttttatagaatgtcagtaaagcttttctgacctttgaactccgatcaggtgataatctcttttagcatcctatagcccttatttcaattctaattatactgtgtatgcaattatttaaaaattgttcaatgtctatctcttctgctagacttctgcaaacatgtctgaaggaaggaattgcctggccaattcattactgtatcctcagcagttccatcaagtagatgctcaacaaatgtttagtgaataaatgagtgactcaatgactataagtagagtgctctaggtcgctactgactcagcaaaagccatttattattcagtggtatcaaatctatcctattgtaaagcacacagagaccttatcattcaaacattcttgaagtgtatgggtaaatatttggagttac

SEQ ID NO: 2677 - DNA, 432 bp, Homo Sapiens
tgaatttaggtgacactatagaagagctatgacgtcgcatgcacgcgtacgtaagcttggatcctctagagcggccgcctactactactactaaattcgcggccgcgtcgacttttttttttttttgtcttatgtctctaatctgcactgttcagctcttttaggcactgcaaagttgtcttgaattaggaaagaggtgctagaatgtgggcgtgggtgttgacctacatctgaacaatttacatatgattcaccacaattaaacaatttggtttgaaatagctataattaagttattatcagagaagtatttactagtctagaaattctaaatgtcgacgcggccgcgaatttagtagtagtagtcgacccgggaattccggaccggtacctgcaggcgtaccagctttccctatagtgagtcgtattaga

SEQ ID NO: 2678 - DNA, 471 bp, Homo Sapiens
gcgtcgacttttttttttttctttaaaaatagagctctttatttaaacagtttagggtaataccaacaagcagtaggatatcgtttaaatatgacataaacatagaaaaaatagaaataaatacaaatacataagaacaacatataccgttagtagtctaaagggatacatgttgctttcacctaaggcactaacacttttcacgggatatgcttccagcacaggcccagcccacaccgcgcagttcccacctgctgtgcatgtgaaagggctttgtaaacagttaagtgctgaccacacaaggcaaattattatactgattatcatgccctttccaaatgcttctcctggctttttgtgaatgacttaatgacgataaaggagatggagtttagagttactggaaaacttaagctatgtcagaaattaaactctggaaaaaattctttaaaaaaatagtaaggtttggct

SEQ ID NO: 2679 - DNA, 469 bp, Homo Sapiens
ttgatgtttgtacaaaattatttattattcatttattgatctaaaaacaaaagttcatttggaagaatatttctttataatatcgtacatacataaaatgttgagctactcaggaacctgaggctggaggatcgtttgagcccaggacttggagtccagactgggcatactagtgaaaacccatctcttaaaaaagaaaagttaacaagttgactctttggtttatcattttatccttttgttttaaatattctagaacccaggatctacctgaatatcatgataaagttattttaaaaaaaacagcaacgtacatgtcacatatatagtcaatgtaaagcaattctactttgcatcccttagccacaggataaggcagaacacagatatttctgtgttctgtgaatatctgtggaatgatacttgaatatgtggatcttgaataaagctgaattcatccagaattaaa

SEQ ID NO: 2680 - DNA, 555 bp, Homo Sapiens
gaggcagctgagccgggcagggcccctgcctctgctacggcagcccccgatcatgcagcccccactggacctcaagcagatcctgcccttcccactcgagccagcccctacccttggcctcttcagcaactacagcaccatggaccctgtgcagaaggctgtgctctcccacacttttgggggaccctgctcaagaccaagcggcccgtcatttcctgtaatatctgtcaaatccgcttcaagttctcagagccaggctgaggcgcactacaaaggtaatcgccacgcccgacgagtcaaaggcattgaggctgccaagaccagaggcagggagcctggcgtccgagaacctggagacccagctcccccaggcagcaccccaacaaatggggatggtgtagcaccccgtccagtttccatggagaatggactggggccagccccaggatccccagagaaacagcctggctccccatcccctcccagcattccggagactggtcagggtgtaaccaagggtgaaggggggactccagccccggcttccttgcctgg

SEQ ID NO: 2681 - DNA, 258 bp, Homo Sapiens
tttaaactataaacatatattgtaaatgttagcatattatatacattgcatattaacataagctaaaatcattgatataaatttatataaacaaaaggtagaaaatatgacaatgttcttcttgttttttgtctttgcatatttctttattggcccttgtcaaacgtgacccactaactcctgaatgctatctctctccccatggattcctaaggatgtcaccacagtgctggccagatgcacagatcacaggtgact

SEQ ID NO: 2682 - DNA, 457 bp, Homo Sapiens
gccctttttttttttttttttcgtggtttcgtctatttattaaaaaatatttgagaacaaaacctctgcctctttgagtcttgctctggcatccccagcatctctgattctccctggtgcccccagctcaggaagaaggtggtagtggggagagagggtcaggggggcttggcagggatgcaggcaccatgacttttgtgaccagttcctaaaaacgcatgggtatagcctcaggaggaaagcgagaggagctttaccatgggaacgaaggaaagggacaacattgggaggcaaacgttgggagactagtccagaaacttgcagttgaggatacaacagggtcctagtgtttcctccctgggtcagcgtagaagtagagctttttcactgtcgaaggcgggattgaagttagagattgccctggcagaggttggggagagagggactaggaggtggt

SEQ ID NO: 2683 - DNA, 1040 bp, Homo Sapiens
aacacatttcatctgggcttcttaaatctaaatctttaaaatgactaagttttcttccttttctctgtttttcctaatagttggggcttatatgactcatgtgtgtttcaatatggaaattattggagggaaagaagtgtcacctcattccaggccatttatggcctccatccagtatggcggacatcacgtttgtggaggtgttctgattgatccacagtgggtgctgacagcagcccactgccaatatcggtttaccaaaggccagtctcccactgtggttttaggcgcacactctctctcaaagaatgaggcctccaaacaaacactggagatcaaaaaatttataccattctcaagagttacatcagatcctcaatcaaatgatatcatgctggttaagcttcaaacagccgcaaaactcaataaacatgtcaagatgctccacataagatccaaaacctctcttagatctggaaccaaatgcaaggttactggctggggagccaccgatccagattcattaagaccttctgacaccctgcgagaagtcactgttactgtcctaagtcgaaaactttgcaacagccaaagttactacaacggcgacccttttatcaccaaagacatggtctgtgcaggagatgccaaaggccagaaggattcctgtaagggtgactcagggggccccttgatctgtaaaggtgtcttccacgctatagtctctggaggtcatgaatgtggtgttgccacaaagcctggaatctacaccctgttaaccaagaaataccagacttggatcaaaagcaaccttgtcccgcctcatacaaattaagttacaaataattttattggatgcacttgcttcttttttcctaatatgctcgcaggttagagttgggtgtaagtaaagcagagcacatatggggtccatttttgcacttgtaagtcattttattaaggaatcaagttctttttcacttgtatcactgatgtatttctaccatgctggttttattctaaataaaatttagaagact

SEQ ID NO: 2684 - DNA, 373 bp, Homo Sapiens
ttgcaatagggaattctcatcagttcaccagaaattacttttctgctgttttaaaaaaaaaaaaacagatggggagggaaaagttttctcctctttccactgagccagcgtttgcataaaatattgatgagactgctccccatcacttgttgcaggaacaggctgcttctggtgtcaagtgctggttaatcaaccaaatggcagatcaaattagctaagttctcttgttaagtactgcgtgtcctgctctttcccatggaggttctggctgctttaaaacctgatctgcagaaataactgttttatgctcaaggagctctgaacgctgcaggcggcaatcctgttcattactgtccccactggacagacagag

SEQ ID NO: 2685 - DNA, 404 bp, Homo Sapiens
ttttttttttttttttttttttttgggttctcagagctgttttgctttatttgcagacactgttgcttttcatctttcccatgtacaaagctgaacaattaataaaaaggcacctggagacagcaaagacgcattcatttcatgtgacatagtttaaaaaaagataaaaagattttaaaaatactctggttaacaatgcacgcttcctacgtaacaagcaattctggagatgccgtcccgtgtcctcgtgtcccgcggagttgaccgtgtgctgtgttcggggaaggagagggccagcgtggcggcttccagccctaagaggcttccctctccctcgctgtcaggtgagaaggaagggggaaagacaggcagaaaagcctgaggaccgcaccactgcagtgaca

SEQ ID NO: 2686 - DNA, 536 bp, Homo Sapiens
tttttggattaaacaaccatttattatggggcaaactgcaagcaagcactttgaacacatggatttttcggaagaaaggtgacaagaaaatcagagaaaacatcattgcatttttagggggaaaactacaaatttctaatttagctgcagaaaaaataattagagaacacaaataaaatgtactagtgaatacatgcttctctagacccaaacaaaaactatttgcaacgtaattaaaacaggttaagtgctgtgaaaaatagaaacatggtgacatagaagagcctgacgggggaacctaaccgagtcctgagagtgtaagccagcttccccaaggaagtgacacttcaaccgagatctgaaggacagcagtctataaatgaagtagagaaaggcagtgctgagggcagagggcacctgcatgggcagaggctgggagcaagatgagtacagcgtgccccaagtaatcaggaagtgccagtggctggagtgcagagacagcagcgcagttttagctagagatgagagtaagggag

SEQ ID NO: 2687 - DNA, 155 bp, Homo Sapiens
gcccgcggcaggcctgtgggctgcgaggaggagctttgcctagcttgcaggcagcgcagggcagacggcggcaggagaagcaagatgaatgcaggctcagatcctgtggtcatcgtctcggcggcgcggaccatcataggttccttcaatggtgc

SEQ ID NO: 2688 - DNA, 516 bp, Homo Sapiens
  misc_feature (217)..(217): n is a, c, g, or t
  misc_feature (379)..(379): n is a, c, g, or t
cggctagtgcgaggctgggtgttgaatcggccgagggccccgcatcgcgcagctctttgccgtcggagcgcttgtttgctgcctcgtactcctccatttatccgccatgataagtgccagccgagctgcagcagcccgtctcgtgggcgccgcagcctcccggggccctacggccgcccgccaccaggatagctggaatggccttagtcatgaggcnttttaggacttgtttcaaggcgggattatgcatcagaagcaatcaagtggagcacgttgttggtattgattctgggtactaccaactcctgcgtggcagttatggaaggtaaacaagcaaaggtgctggagaatgccgaaggtgccagaaccaccccttcangttgtggcgctttacagcatgatggtgatgcgacttgttggaatgccggccaagcgacaggctgtcaccaacccaaacaatacattttatgctaccaagcgtctcattggccggcgatatgatgatcctgaagtaca

SEQ ID NO: 2689 - DNA, 1701 bp, Homo Sapiens
ggaacaaaagctggagctccaccgcggtggcggccgctctagaactagtggatcccccgggctgcaggaattcggcacgagcagaagagggggctagctagctgtctctgcggaccaggggagaccccgcgcccccccggtgtgaggcggcctcacagggccgggtgggctggcgagccgacgcggcggcggaggaggctgtgaggagtgtgtggaacaggacccgggacagaggaaccatggctccgcagaacctgagcaccttttgcctgttgctgctatacctcatcggggcggtgattgccggacgagatttctataagatcttgggggtgcctcgaagtgcctctataaaggatattaaaaaggcctataggaaactagccctgcagcttcatcccgaccggaaccctgatgatccacaagcccaggagaaattccaggatctgggtgctgcttatgaggttctgtcagatagtgagaaacggaaacagtacgatacttatggtgaagaaggattaaaagatggtcatcagagctcccatggagacattttttcacacttctttggggattttggtttcatgtttggaggaacccctcgtcagcaagacagaaatattccaagaggaagtgatattattgtagatctagaagtcactttggaagaagtatatgcaggaaattttgtggaagtagttagaaacaaacctgtggcaaggcaggctcctggcaaacggaagtgcaattgtcggcaagagatgcggaccacccagctgggccctgggcgcttccaaatgacccaggaggtggtctgcgacgaatgccctaatgtcaaactagtgaatgaagaacgaacgctggaagtagaaatagagcctggggtgagagacggcatggagtacccctttattggagaaggtgagcctcacgtggatggggagcctggagatttacggttccgaatcaaagttgtcaagcacccaatatttgaaaggagaggagatgatttgtacacaaatgtgacaatctcattagttgagtcactggttggctttgagatggatattactcacttggatggtcacaaggtacatatttcccgggataagatcaccaggccaggagcgaagctatggaagaaaggggaagggctccccaactttgacaacaacaatatcaagggctctttgataatcacttttgatgtggattttccaaaagaacagttaacagaggaagcgagagaaggtatcaaacagctactgaaacaagggtcagtgcagaaggtatacaatggactgcaaggatattgagagtgaataaaattggactttgtttaaaataagtgaataagcgatatttattatctgcaaggtttttttgtgtgtgtttttgtttttattttcaatatgcaagttaggcttaatttttttatctaatgatcatcatgaaatgaataagagggcttaagaatttgtccatttgcattcggaaaagaatgaccagcaaaaggtttactaatacgtctccctttggggatttaatgtctggtgctgccgcctgagtttcaagaattaaagctgcaagaggactccaggagcaaaagaaacacaatatagagggttggagttgttagcaatttcattcaaaatgccaactggagaagtctgtttttaaatacattttgttgttattttt

SEQ ID NO: 2690 - DNA, 362 bp, Homo Sapiens
tcgacaagaatacttcctaatttccctgcagtcacatcataggcatgaccatcgcatctctttatggctgaagcttagcctgactgctggacccagacttttgcccagtgacctctggggtaggttactatcctctttgtcctgccagtacccctagaaatttgacttaattgctgcatctagggacttagggatttttcccaaatgctgtgtagaaagtcactggagttaaatctactccaaccatttttctgctgtttcttgaaaagacaggatgattcatttacatctcttttccttcacagaatcatgagggaagtattgtgattaccagtgttaagcatttgtgaatattttattcc

SEQ ID NO: 2691 - DNA, 2116 bp, Homo Sapiens
cggttctccaagcacccagcatcctgctagacgcgccgcgcaccgacggaggggacatgggcagagcaatggtggccaggctggggctggggctgctgctgctggcactgctcctacccacgcagatttattccagtgaaacaacaactggaacttcaagtaactcctcccagagtacttccaactctgggttggccccaaatccaactaatgccaccaccaaggcggctggtggtgccctgcagtcaacagccagtctcttcgtggtctcactctctcttctgcatctctactcttaagagactcaggccaagaaacgtcttctaaatttccccatcttctaaacccaatccaaatggcgtctggaagtccaatgtggcaaggaaaaacaggtcttcatcgaatctactaattccacaccttttattgacacagaaaatgttgagaatcccaaatttgattgatttgaagaacatgtgagaggtttgactagatgatgaatgccaatattaaatctgctggagtttcatgtacaagatgaaggagaggcaacatccaaaatagttaagacatgatttccttgaatgtggcttgagaaatatggacacttaatactaccttgaaaataagaatagaaataaaggatgggattgtggaatggagattcagttttcattggttcattaattctataaggccataaaacaggtaatataaaaagcttccatcgatctatttatatgtacatgagaaggaatccccaggtgttactgtaattcctcaacgtattgtttcgacggcactaatttaatgccgatatactctagatgaatgtttacattgttgagctattgctgttctcttgggaactgaactcactttcctcctgaggctttggatttgacattgcatttgaccttttaggtagtaattgacatgtgccagggcaatgatgaatgagaatctaccccagatccaagcatcctgagcaactcttgattatccatattgagtcaaatggtaggcatttcctatcacctgtttccattcaacaagagcactacattcttttagctaaacggattccaaagagtagaattgcattgaccacgactaatttcaaaatgctttttattattattattttttagacagtctcactttgtcgcccaggccggagtgcagtggtgcgatctcagatcagtgtaccatttgcctcccgggctcaagcgattctcctgcctcagcctcccaagtagctgggattacaggcacctgccaccatgcccggctaatttttgtaattttagtagagacagggtttcaccatgttgcccaggctggtttagaactcctgacctcaggtgatccacccgcctcggcctcccaaagtgctgggattacaggcttgagcccccgcgcccagccatcaaaatgctttttatttctgcatatgtttgaatactttttacaatttaaaaaaatgatctgttttgaaggcaaaattgcaaatcttgaaattaagaaggcaaaatgtaaaggagtcaaactataaatcaagtatttgggaagtgaagactggaagctaatttgcataaattcacaaacttttatactctttctgtatatacattttttttctttaaaaaacaactatggatcagaatagcaacatttagaacactttttgttatcagtcaatatttttagatagttagaacctggtcctaagcctaaaagtgggcttgattctgcagtaaatcttttacaactgcctcgacacacataaacctttttaaaaatagacactccccgaagtcttttgtttgtatggtcacacactgatgcttagatgttccagtaatctaatatggccacagtagtcttgatgaccaaagtcctttttttccatctttagaaaactacatgggaacaaacagatcgaacagttttgaagctactgtgtgtgtgaatgaacactcttgctttattccagaatgctgtacatctattttggattgtatattgtggttgtgtatttacgctttgattcatagtaacttcttatggaattgatttgcattgaacgacaaactgtaaataaaaagaaacggtg

SEQ ID NO: 2692 - DNA, 405 bp, Homo Sapiens
  misc_feature (11)..(11): n is a, c, g, or t
ggatccccagnttgaggttacacaggaagcatttaggagaactggctcaggtagacatcagtaactattagctggaattcggttaccactattgcattccttcctagcactgccaggggcctgggaattccctctcccaggtatttccatatcctgtcaggtattcccccacctattggaatagctctgcctacatggttctaataggaccaagagattggcgtcaagtccaaggggcaccattattatctgcattacttagattgcagatgatgacagtaagatcagggaacagtgttacccttagacccacccacagtattaccagtgcctatgttgctatggctaactttgctatttataacagcatcatccacatttcagattctatacgagagggatctg

SEQ ID NO: 2693 - DNA, 6274 bp, Homo Sapiens
gaaagtaatgacaggatttggatgaagtaatggatcactaatgaactacagtgctggtgagatgtgtaagaaattataaagagctctgatgggctatttgggtgatacccagtgcagtgaactgcaggatttttgtccctgagtcatggaagacagaagagctgaaaagtcatgtgaacaagcatgtgaatcacttaagaggcaggactatgaaatggccctcaagcactgcacagaggcccttctttctcttggccagtactccatggcagacttcacagggccttgtccattggaaatagaacgcatcacaatcgagagtcttctctacagaattgcctcatttttgcaactgaaaaattatgtgcaagctgatgaagattgtagacatgtgctgggagaaggactggccaagggagaagatgcctttcgggcagtgctttgctgcatgcagctgaaagggaagctccaacctgtatccaccattcttgccaagtcactcacaggagagtccctgaatgggatggtaacaaaggatttgacaagactaaaaacacttctctcagaaacagagacagcaactagtaacgccctctctggatatcacgtggaagacttagatgaggggtcttgtaatggttggcatttccgcccaccacctaggggaatcacaagcagcgaggaatatactttgtgtaaaagatttttagaacaaggaatctgtaggtatggtgcccagtgtacttcagcacattcccaggaagaactagcagaatggcagaaaagatatgcttcacggctgataaaattgaaacagcaaaatgagaataaacagctctcaggcagttacatggaaaccttgatagaaaagtggatgaattcattgtctcctgagaaagtgcttagtgaatgtatagaaggagtaaaggtagagcacaatcctgacctgtcagttactgtcagcaccaaaaaatcccaccagacatggacctttgctctcacttgtaagcctgcaagaatgctgtatcgtgtagcattgctttatgatgctcatcgtcctcattttagtatcattgcaatatctgccggagatagtactacccaggtatcacaagaagtcccagaaaactgtcaagaatggataggaggaaagatggcccaaaatggattagatcattacgtgtataaagtcgggatagcatttaacacagaaatatttggaacttttcgccaaaccatagttttcgactttggattggaaccagtactcatgcaaagagtaatgattgatgcagcttctacagaagatctcgaatacctgatgcatgcaaaacagcagctagtaaccacagctaaacgttgggattcttcctctaagactattatagattttgaacctaatgaaactactgatttggagaagagccttcttatcagataccaaattcccctctctgctgaccagctatttactcagtccgttttagacaaatcattgaccaagagcaactatcagtcacggttacatgaccttctttatattgaggagatagcccagtataaagaaatcagcaagttcaaccttaaagtgcaattgcagattctggcaagcttcatgctcactggtgtttctggaggtgcaaagtatgctcagaatggacaactttttggtcgctttaagcttactgaaacactttctgaagatactttggctggacgactggtgatgaccaaagtcaatgctgtttatttattaccagtccctaaacagaagttagtacagacccagggaaccaaagagaaggtttatgaagctactattgaagaaaaaacaaaggaatatatatttttaaggctatctagggaatgctgtgaagaacttaatcttcggcctgactgtgacacacaggttgaacttcagtttcaattaaatcgattacccctctgtgaaatgcactatgcactagacaggatcaaggacaatggggttttgtttccagacatcagtatgactcccaccataccatggagtcctaacagacaatgggatgaacagttggatcctcgactaaatgcaaaacagaaagaggctgttctggccattaccactccacttgcaatccagctgccgcctgtgcttatcatcggaccctatgggacaggcaaaacgttcactctagctcaggctgtcaaacatattctgcagcaacaggagactaggattctcatttgcacccattctaatagtgctgctgatctctacataaaggattatttacatccatatgtagaagcaggcaatccccaggcaagacctctcagggtatatttcagaaatcgctgggtaaagactgtccacccagttgtgcatcagtactgtttgatctcaagcgcacattccacctttcagatgccccagaaagaagatattcttaaacatcgagtggtggttgttaccttgaatacttcccagtacctctgtcagttggaccttgaacctgggttttttacacacattctattagatgaagctgcccaggccatggagtgtgaaaccattatgcctctagcattagcaactcaaaacactcggattgtcttggctggtgatcacatgcagctcagtccttttgtttacagcgagtttgccagggagagaaaccttcacgtttcattacttgaccgactctatgagcattaccctgctgagttcccatgtaggattctcctgtgtgagaactaccgctcccatgaagctatcatcaattatacctctgagcttttctatgagggcaaactgatggccagtgggaagcagccagcacacaaagatttctacccactaactttctttacagcacgaggagaagatgtacaagaaaaaaatagcacagctttttataataatgcagaggtgtttgaagtggtggaacgtgtagaagagttaagaaggaagtggccagtagcgtgggggaagttagatgatggcagtattggtgtggtgactccatatgctgatcaagtgtttagaatacgtgctgaacttcgaaaaaagagattatctgatgttaatgtagaaagggtgctaaatgttcaaggaaagcaattcagagttttgtttcttagcacagtacgtacaagacatacttgtaaacataaacagacaccaattaaaaagaaagagcaacttctggaagattccacagaggacttagattatggttttttatctaactacaagcttctcaatactgccatcacaagagcacaatccctggttgctgtggtgggtgatcccattgctctgtgctctattggaagatgcaggaaattttgggaacggtttattgccctgtgtcatgaaaacagtagcctacatggaatcacttttgaacagatcaaagcccagttagaggctttagaactaaagaagacatatgtgttgaatccgctggcacctgaatttatcccccgggctctaagactgcagcattcaggaagtaccaacaaacagcagcaatcaccacccaaggggaaaagtcttcatcatacccagaatgatcacttccagaatgatggaattgttcagcccaatccttctgtacttattggcaatcctattagagcatatactcctccaccccctcttggacctcacccaaatttgggaaaatctccaagccctgttcaaagaatagatcctcacactgggacaagtattctttatgtacctgctgtctatggagggaatgtagttatgtcggtgcctttacctgtaccatggacaggataccagggtaggtttgcagttgatcctcgaattattacacatcaggcagcaatggcctataacatgaacctattacagacacatggacgaggatctcctattccttatggccttggacatcacccacctgtcaccataggccagccacaaaatcagcatcaggagaaggatcaacatgagcaaaatcgaaatggtaaaagtgatacaaataattccggacctgaaattaataagattcgaacaccagagaaaaagccaacagaaccaaaacaggttgatttggaatcaaatccacagaacagaagtcctgaatcacgtcctagtgttgtttatcccagtaccaaatttcctcgcaaagataatctcaacccaagacacataaatcttccccttcctgctccccacgcacagtatgcaatccctaatcgccactttcatccccttccccagctaccaagaccaccctttccaattccacagcagcacaccttgttaaatcagcagcagaataatttgcctgaacaaccaaatcagataccacctcagccaaatcaggtagtccagcagcaaagtcagttgaatcagcagcctcagcagccacctcctcagctttctcctgcatatcaggcgggacccaacaatgctttttttaatagtgcagttgctcatcggccacagtctcctcctgcagaagctgtaattccggagcagcagccccctcccatgctgcaagaaggccacagtcctctgagagccattgcacaacccggccccattcttccttcacatctgaatagcttcattgatgagaacccctcgggattacctataggggaggctttagatcgtatacatgggagtgtcgctctggaaacattaaggcagcagcaggcacggttccagcagtggagcgagcatcatgcctttctcagtcagggcagcgttccatacccacaccatcaccatcctcacctccagcatcttcctcagccgcccctgggattacatcagccgccagtgagggcagactggaagctcaccagcagtgccgaagatgaagtggagaccacatactcaaggtttcaagacttaatcagagaactgtctcatcgtgatcaaagtgaaacacgggaactagctgaaatgccaccacctcaatcaagacttttgcaatatagacaagtacagagtagaagcccaccagcagtcccatctcccccatccagtacagaccacagtagccacttttctaactttaatgataacagcagagacattgaagtagccagcaacccagcatttccacagcgcctcccaccccagatattcaactcacctttctcgttgccatctgaacaccttgcccctcctcccttgaaatacctggcacctgatggagcatggacttttgctaacttgcaacagaatcacctaatggggccaggttttccctatggcctacctccattgcctcacaggccaccgcagaacccttttgtacaaatacagaatcatcaacatgctattggtcaagagccatttcacccattgtcatctcgaacagtatcttcttcttcgctccctagcttagaagagtatgagcccagaggacctggtcggcccttgtaccaaagaagaatctcatctagctcagttcaaccttgttctgaagaagtaagcactcctcaagacagtctggctcagtgtaaagagcttcaggaccacagtaaccaatcttctttcaacttttcatccccggagtcctgggtaaacaccacctcatctactccttatcagaacattccgtgcaatggatccagcaggacagctcagcccagagagttgatagcgccacccaagactgtcaaaccccctgaggatcaactgaagtcggagaacctcgaggtgtccagttccttcaactacagtgtgctgcagcatcttggccagtttccaccccttatgcctaacaagcagatcgcggagtcggccaatagcagtagcccccagagctctgcggggggcaagcccgccatgtcctatgccagcgctctgcgggcccctccaaagcccaggccccctcctgagcaggccaagaagagtagcgaccctctgtctctcttccaggaactgagcctagggagctcatctggcagcaatggcttttactcatattttaaataatcacttttttttccctcaagggagaatgttttaatttctgtttgtatcagtagaattaaggtagttggacttcatctatagatgcacagttccctttgttttaatattaaatatgttctcacttaattgctttgctgctagacttgcaactaatttttttaaagtatattccattattttgcatttttgatgtgtcaaaactttgacagcttttatgtagaataaaaaaatttttaaatttgtgtattgttacatatgtttgcatcaagctagcagccaagaggttaattgtgcaactat

SEQ ID NO: 2694 - DNA, 2358 bp, Homo Sapiens
ggagaggatcccggagccggtgagaattctctgttttttctctaccatcctttccaggccttttcctcacctaatgagtcgtagagacgagggcccagagagtctgtaaagtggctggtgaaagattagtgtcccagggccctacatccgggaggtggttcgggataaagagaactagtcttgggaacaatgtaggtgggaacttaagggaatgggagagcggcccatagaggtggacggagggcgcgattggagtaaagcggaccctgtgtaggtatagagttgagtcaagtggagtcactgcctctgtccctctggtcagcgtgatggccagaggcctggggggcccccactgggtggccgtgggactgctgacctgggcgaccttggggcttctggtggctggactcgggggtcatgacgacctgcacgacgatctgcaagaggacttccatggccacagccacaggcactcacatgaagatttccaccatggtcacagccatgcccatggtcatggccacactcacgagagcatctggcatggacatacccacgatcacgaccatggacattcacatgaggatttacaccatggccatagccatggctactcccatgagagcctctaccacagaggacatggacatgaccatgagcatagccatggaggctatggggagtctggggctccaggcatcaagcaggacctggatgctgtcactctctgggcttatgcactgggggccacagtgctgatctcagcagctccattttttgtcctcttccttatccccgtggagtcgaactctccccggcatcgctctctacttcagatcttgctcagttttgcttccggtgggctcctgggagatgctttcctgcacctcattcctcatgctcttgaacctcattctcaccacactctggagcaacccggacatggacactcccacagtggccagggccccattctgtctgtgggcctgtgggttctcagtggaattgttgcctttcttgtcgtggagaaatttgtgagacatgtgaaaggaggacatggtcacagtcatggacatggacacgctcacagtcatacacgtggaagtcatggacatggaagacaagagcgttctaccaaggagaagcagagctcagaggaagaaggaaaggaaacaagaggggttcagaagaggcgaggagggagcacagtacccaaagatgggccagtgagacctcagaacgctgaagaagaaaaaagaggcttagacctgcgtgtgtcggggtacctgaatctggctgctgacttggcacacaacttcactgatggtctggccattggggcttcctttcgagggggccggggactagggatcctgaccacaatgactgtcctgctacatgaagtgccccacgaggtcggggactttgccatcttggtccagtctggctgcaccaaaaagcaggcgatgcgtctgcaactactgacagcagtaggggcactggcaggcacagctgtgcccttctcactgaaggaggagcagtggacagtgaaattgcaggtggtgcaggtcctggctgggtcctgccatttactgcaggtggctttatctacgtagcaacagtgtctgtgttgcccgagctgctgagggaggcatcaccattgcaatcacttctggaggtgctggggctgctggggggagttatcatgatggtgctgattgcccaccttgagtgaggggtggataaactaccctgccccaaacctctacccctaactccaggtcaggggtgcgtagaggttgggggccctggccagggacatctgccaaaggaaggaactgtagcctgggagcaatggttactttggcattagggccttcaagggctggcagtcttacagaggctggagcggtgagaatgagaggccagagggaccatagtgttgggcactgtctgaccatgttgcatttggaaggctaaatggggccatgaagaaggctggaagggacagggggtgatggcagcctacctggtgtcccctaccccacctgttctcggagaaccaagttgctacacaggaagttctccaaggtccagtttcctttctcccaccagttggtggaggcttcagggaagaccagagtcctggacagagagggtaacaggaggagtcggggataaacatcaaacatcaatcgtgtgtcctgatttgggagtgattggggggatggggtgggagagggttaattggtattctcatggcctgattttttttgtttctattccttttatatcactgtgtttgaatcgagggggaggggtggtaaccggaaataaagacctccgatcttccgcccc

SEQ ID NO: 2695 - DNA, 213 bp, Homo Sapiens
  misc_feature (159)..(159): n is a, c, g, or t
  misc_feature (166)..(166): n is a, c, g, or t
  misc_feature (196)..(196): n is a, c, g, or t
  misc_feature (207)..(207): n is a, c, g, or t
tttagatatgttgtagatagtggggttcttcaaggacaaatcgtaaaggtagtgttttagacttctgcacacaaatggaaattcaggtagaatatctttctttcttttctagaaccatctatcttactcaaaaaggaaccgggtatgtccctccaagtnggggccntattgggggtttttaaaaaaaaaaaaaagncggggggtttnaattgg

SEQ ID NO: 2696 - DNA, 443 bp, Homo Sapiens
ttttttttttttttttttttttttttttcgtttctcttgattttattgatcttttaaaaaaataaaaggacatcttctgtggatacaggttaggatgtttctagggtaagaaacccaccatcgcagcgtaattctctgcggaatttcagtagcacttggaaagttctgttttcaacctgaaatttttgctgttcttccagaaaataacttagtaacaaaatgaaggccgtgaagctgcaggcacactccagaaattagtgtgttcttttaactcgtgtcccaaagagacagcagttcctaacatgcagtgatgagtggacacaccgtggtgcgttggaaatcccacgttcacgtctttgacaaggaagcctcctacaatgatcttgtgctttaattttacttgatggtcaccctggttacttcattatgcctttgaatgaagt

SEQ ID NO: 2697 - DNA, 420 bp, Homo Sapiens
ttttttttttttttttttcatggagagggtaagtaatttactcaaggtcacaaagcataaccacttattactaagtgattcttgttagggtcaaaccttggagcaaaactttgaaccctgtaagtctgactcctgagcaggtgttcttgtccatcctgtttgtaactgcattgggggactcccttcccctacccccacctcaggaaggggagtggcattgtgcctctccactcaccgactctggtggaaggccatttgtccctgaaagggggatggaggctggctgcaggctgcctgcaaagccagaccccaagcactgaggacacatcagtgtccagtggtccagtgatcagggagcattgaaaagaaaaacaggcgagggtggtcataggggcccctcctggattgagtaccaggcct

SEQ ID NO: 2698 - DNA, 2139 bp, Homo Sapiens
cctggtcagcgtcccatcccggtcgggagttctctccaggcggcacgatgccgaggaaacagtgaccctgagcgaagccaagccgggcggcaggtgtggctttgatagctggtggtgccacttcctggccttggatgagccgtacgcctctgtaaacccaacttcctcacctttgaaacagctgcctggttcagcattaatgaagattagtcagtgacaggcctggtgtgctgagtccgcacatagaagaatcaaaaatgtccaaaatgtaactggagagaaagtgggcaacttttgggagtgacttttccacaggaacttctgcaatgtcccatcaacctctcagctgcctcactgaaaaggaggacagccccagtgaaagcacaggaaatggacccccccacctggcccacccaaacctggacacgtttaccccggaggagctgctgcagcagatgaaagagctcctgaccgagaaccaccagctgaaagaagccatgaagctaaataatcaagccatgaaagggagatttgaggagctttcggcctggacagagaaacagaaggaagaacgccagttttttgagatacagagcaaagaagcaaaagagcgtctaatggccttgagtcatgagaatgagaaattgaaggaagagcttggaaaactaaaagggaaatcagaaaggtcatctgaggaccccactgatgactccaggcttcccagggccgaagcggagcaggaaaaggaccagctcaggacccaggtggtgaggctacaagcagagaaggcagacctgttgggcatcgtgtctgaactgcagctcaagctgaactccagcggctcctcagaagattcctttgttgaaattaggatggctgaaggagaagcagaagggtcagtaaaagaaatcaagcatagtcctgggtccacgagaacagtctccactggcacggcattgtctcactataggaggagatctgcagatggggccaagaattacttcgaacatgaggagttaactgtgagccagctcctgctgtgcctaagggaagggaatcagaaggtggagagacttgaagttgcactcaaggaggccaaagaaagagtttcagattttgaaaagaaaacaagtaatcgttctgagattgaaacccagacagaggggagcacagagaaagagaatgatgaagagaaaggcccggagactgttggaagcgaagtggaagcactgaacctccaggtgacatctctgtttaaggagcttcaagaggctcatacaaaactcagcgaagctgagctaatgaagaagagacttcaagaaaagtgtcaggcccttgaaaggaaaaattctgcaattccatcagagttgaatgaaaagcaagagcttgtttatcctaacaaaaagttagagctacaagtggaaagcatgctatcagaaatcaaaatggaacaggctaaaacagaggatgaaaagtccaaattaactgtgctacagatgacacacaacaagcttcttcaagaacataataatgcattgaaaacaattgaggaactaacaagaaaagagtcagaaaaagtggacagggcagtgctgaaggaactgagtgaaaaactggaactggcagagaaggctctggcttccaaacagctgcaaatggatgaaatgaagcaaaccattgccaagcaggaagaggacctggaaaccatgaccatcctcagggctcagatggaagtttactgttctgattttcatgctgaaagagcagcgagagagaaaattcatgaggaaaaggagcaactggcattgcagctggcagttctgctgaaagagaatgatgctttcgaagacggaggcaggcagtccttgatggagatgcagagtcgtcatggggcgagaacaagtgactctgaccagcaggcttaccttgttcaaagaggagctgaggacagggactggcggcaacagcggaatattccgattcattcctgccccaagtgtggagaggttctgcctgacatagacacgttacagattcacgtgatggattgcatcatttaagtgttgatgtatcacctccccaaaactgttggtaaatgtcagattttttcctccccaaaaaaaaaaaaaaaaaaaaaaa

SEQ ID NO: 2699 - DNA, 566 bp, Homo Sapiens
  misc_feature (418)..(418): n is a, c, g, or t
ttttttttttatttaccataataatttttaagaaagcttaccataaatacttccaaaaacaacaggctttacaaaatattatacaacatcctgtgtacagcagtaagtatctactcaggccatttgtcaagctgtttagtaattagtttctcatgtaccctcttgtctcaagaaggtcaataatcatctgatttcctctctagctaatgatctgttgttagcctacttttaacaatggaagaaggaactggtatatgttttaagtcaaccagttctccttaagtctcatagtttctgtttcaacatcatgttattgtgtacttacagaagcaatctctcagttaggaaaaataaaatcagtttcagggctcagaaagtaaaaagggaaattctttcccaatctccccctcccttccanccggcgttttttgggttaaaagaattatttaatttaaatgttcaggacccagcgcagggtcatttccctgaaataaactgaaggcaaatttctaaaattttcaaaggttttttagacaactccgaattttgggggtcgctcggggtgc

SEQ ID NO: 2700 - DNA, 1955 bp, Homo Sapiens
tgcagctgcaggcaagcctggccactgttggctgcagcaggacatcccaggcacagcccctagggctctgagcagacatccctcgccattgacacatcttcagatgctctcccagctagccatgctgcagggcagcctcctccttgtggttgccaccatgtctgtggctcaacagacaaggcaggaggcggataggggctgcgagacacttgtagtccagcacggccactgtagctacaccttcttgctgcccaagtctgagccctgccctccggggcctgaggtctccagggactccaacaccctccagagagaatcactggccaacccactgcacctggggaagttgcccacccagcaggtgaaacagctggagcaggcactgcagaacaacacgcagtggctgaagaagctagagagggccatcaagacgatcttgaggtcgaagctggagcaggtccagcagcaaatggcccagaatcagacggcccccatgctagagctgggcaccagcctcctgaaccagaccactgcccagatccgcaagctgaccgacatggaggctcagctcctgaaccagacatcaagaatggatgcccagatgccagagacctttctgtccaccaacaagctggagaaccagctgctgctacagaggcagaagctccagcagcttcagggccaaaacagcgcgctcgagaagcggttgcaggccctggagaccaagcagcaggaggagctggccagcatcctcagcaagaaggcgaagctgctgaacacgctgagccgccagagcgccgccctcaccaacatcgagcgcggcctgcgcggtgtcaggcacaactccagcctcctgcaggaccagcagcacagcctgcgccagctgctggtgttgttgcggcacctggtgcaagaaagggctaacgcctcggccccggccttcataatggcaggtgagcaggtgttccaggactgtgcagagatccagcgctctggggccagtgccagtggtgtctacaccatccaggtgtccaatgcaacgaagcccaggaaggtgttctgtgacctgcagagcagtggaggcaggtggaccctcatccagcgccgtgagaatggcaccgtgaattttcagcggaactggaaggattacaaacagggcttcggagacccagctggggagcactggctgggcaatgaagtggtgcaccagctcaccagaagggcagcctactctctgcgtgtggagctgcaagactgggaaggccacgaggcctatgcccagtacgaacatttccacctgggcagtgagaaccagctatacaggctttctgtggtcgggtacagcggctcagcagggcgccagagcagcctggtcctgcagaacaccagctttagcacccttgactcagacaacgaccactgtctctgcaagtgtgcccaagtgatgtctggagggtggtggtttgacgcctgtggcctgtcaaacctcaacggcgtctactaccacgctcccgacaacaagtacaagatggacggcatccgctggcactacttcaagggccccagctactcactgcgtgcctctcgcatgatgatacggcctttggacatctaacgagcagctgtgccagaggctggaccacacaggagaagctcggacttggcactcctggacaacctggacccagatgcaagacactgtgccaccgccttccctgacaccctgggcttcctgagccagccctccttgacccagaagtccagaagggtcatctgccccccaactcccctccgtctgtgacatggagggtgttcggggcccatccctctgatgtagtcctcgcccctcttctctccctcccccttcaggggctccctgcctgagggtcacagtaccttgaatgggctgagaacagaccaaaaaaaaaaaaaaaaaaaaaaaaaaaaaaaaaaaa

SEQ ID NO: 2701 - DNA, 430 bp, Homo Sapiens
tagcactcttctcttcagctctttctgtgccctgggagctgagatgcacgtcagtggccttgccagcgtggccaattctccgctgactgccagaaaaaagaggccaggaagaaagaggaaagagaagagatcgctcagggtctgtggtgtgtggtccatcctcttgctgagcacattgaaaggaactggctatctttgatctcttcctccagatcagagtcaaggaatgtgtttataatggacacttcatccaaagaaaatatccagttgttctgcaaaacttcagtgcaacctgttggaaggccttcttttaaaacagaatatccttcctcagaagaaaagcaaccatgctgtggtgaactaaaggtgttcttgtgtgccttgtcttttgtttactttgccaaagcattggcagaaggctatctgaaga

SEQ ID NO: 2702 - DNA, 1554 bp, Homo Sapiens
cgtcggacagccacagcggccagcgcagcggcagcggcggcggcaccaccatcaccgctcgcaccccagccgcccggcccgcgaccaggcagcggcggccgccggcgggatcggaggaggcggcggagcggcgaggaggaggagcaggagcgcgcagccagcgggtccacgcatctcagcacttccagaccaactccggcaccttccacacccctgcccgggctgggggctccgagagcggccgcgaagcgactccgatcctccctctgagccttgctcagctctgccccgcgcctcccgggctccggtccgcgcggcggggtccctgctcctgcgccccgggcgcgcttcccggacaccccggtccccgcagccaggacaaagccatgaagccagcgctgctggaagtgatgaggatgaacagaatctgccggatggtgctggccacttgcttgggatcctttatcctggtcatcttctatttccaaagtatgttgcacccagtcatgcggaggaatccctttggtgtggacatctgctgccggaaggggtcccgaagccccctgcaggaactctacaacccaatccagctggagctctcaaacactgctgtcctgcaccagatgcggcgggaccaggtgacagacacgtgccgagccaacagcgccacaagccgtaagcggagggtgctgacccccaacgacctgaagcacttggtggtggatgaggaccacgagctcatctactgctacgtgcccaaggtggcctgcaccaactggaagcggctcatgatggtcctgaccgggcgggggaagtacagcgaccccatggagatcccggccaacgaggcacacgtctccgccaacctgaagaccctgaaccagtacagcatcccagaaatcaaccaccgcttgaaaagctacatgaagttcctgtttgtccgggagcccttcgagaggctagtgtccgcctaccgcaacaagttcacccagaagtacaacatctccttccacaagcggtacggcaccaagatcatcaaacgccagcggaagaacgccacccaggaggccctgcgcaaaggggacgatgtcaaattcgaggagtttgtggcctatctcatcgacccacacacccagcgggaggagcctttcaacgaacactggcaaaccgtctactcactctgccatccctgccacatccactatgacctcgtgggcaagtacgagacactggaagaggattctaattacgtcctgcagctggcaggagtgggcagctacctgaagttccccacctatgcaaagtctacgagaactactgatgaaatgaccacagaattcttccagaacatcagctcagagcaccaaacgcagctgtacgaagtctacaaactcgattttttaatgttcaattactcagtgccaagctacctgaaattggaataaagggggtggggagagggagagaatcatgctttttaatttaagatttttatttgtcaaaagaattatatggatattgggttattttgtaaattaatatttctttggggac

SEQ ID NO: 2703 - DNA, 272 bp, Homo Sapiens
  misc_feature (101)..(101): n is a, c, g, or t
  misc_feature (140)..(140): n is a, c, g, or t
gtcggcttgtcaggtggtggaggaaaaggcgctccgtcatggggatccagacgagccccgtcctgctggcctccctgggggtggggctggtcactctgctnggcctggctgtgggctcctacttggttcggaggtcccgngccacaacaccaagaggttccgctttgccctgcccaccgcccaccacactctggggctgcctgtggggaaacatatctacctctccacccgaattgatggcagcctggtcatcaggccatacactcctgtca

SEQ ID NO: 2704 - DNA, 2149 bp, Homo Sapiens
caagcatgtgatgttcttgtaccttcttctgatagtacatctcaacagttgactccatatagtcaagtccatatttgtttgagatctggcaactatcaggaggtaatacagattttcattgaagacaacttaaccttgagtttacctgtccagttccgacagtcagtcctaagagaactctttaagaaagctcaacagggaaatgaagctctagatgaaatctgttttaaagtttgtgcctgtaatacagtccgtgatatactggaaggcagaacaattagtgttcaatttaaccagctatttcttagaccaaataaagagaaaatagactttcttcttgaggtatgttcaagatcagtaaatttagaaaaagcttcagagtctttgaaaggaaacatggctgcttttctaaagaatgtgtgtctggggttggaagatctgcagtatgttttcatgatttcttcacatgagcttttcattacattgttgaaagatgaagaacgaaagctacttgttgatcagatgaggaagagatcccctagagtaaatctgtgcattaaacctgtaacttcattttatgatatcccagcttcagcaagtgtcaacattggtcagttagagcatcaacttatattgtcagtggatccttggaggattagacaaattttaattgaattacatggtatgacttcagagcgccagttctggacagtgtctaataagtgggaagtaccttctgtctatagtggtgttatcctgggaattaaagacaatttaacaagagatttggtttatattcttatggccaaaggtttgcactgcagtactgttaaggacttttcccatgctaaacagctctttgctgcttgtttggagttggtaacagagttctcaccgaagcttcgtcaggtcatgctgaatgagatgttgcttttggatattcatacacacgaagctgggacagggcaggcaggagagagaccgccatccgaccttataagtagagtacgaggctatctggaaatgaggcttcctgatattcctcttcgtcaagttatagctgaggaatgtgttgcctttatgttaaactggagagaaaatgaataccttacactccaagttcctgcatttttgcttcagagtaatccatatgtaaagcttggacagcttttagcagctacatgcaaagaacttccaggccctaaagaaagcagacggactgccaaagacctttgggaagttgttgttcaaatctgtagtgtgtccagtcagcacaaacgaggaaatgatggcagagttagtttaataaaacagagggaatctacgttaggtatcatgtatcggagtgaactgctttcttttatcaaaaaattacgagaaccactcgttttgactattattttatcactctttgtgaaacttcacaatgttcgggaggacattgtgaatgatattacagctgaacacatttctatttggccatcttccattcccaacctccagtctgtggactttgaagctgtggcaatcacagtgaaagagctagttcgatatacactcagtataaatccaaataaccattcttggttaattatccaggcagatatttactttgcaacgaatcagtattcagcagctcttcactattacctccaggcaggagctgtgtgttctgacttctttaacaaggctgtgccccctgatgtttatacagaccaggtaataaaacgaatgataaaatgttgttctttgctgaattgccacacacaggtggctattttatgtcagttcctcagagaaattgactacaaaacagcgtttaaatctctgcaagaacaaaacagtcatgatgctatggactcctactacgactacatatgggatgttaccattttggaatacttgacttatcttcatcataaaagaggagaaacagataaaagacaaattgcaatcaaagccatcggccagacagagttgaatgcaagcaatccagaagaagtgttacagctggcagcgcagagaaggaaaaaaaagtttctccaagcaatggcaaaactttacttttaagcagttaaatttttttaacttttattttttaaacaatgggctaaaaataaacagtattaaaaggttaagtttatataat

SEQ ID NO: 2705 - DNA, 320 bp, Homo Sapiens
  misc_feature (300)..(300): n is a, c, g, or t
ggttggacgaggggagctggtgggcagggtttgatcccagggcctgggcaacggaggtgtagctggcagcagcgggcaggtgaggaccccatctgccgggcaggtgagtcccttccctccccaggcctcgcttccccagccttctgaaagaaggaggtttaggggatcgagggctggcggggagaagcagacaccctcccagcagaggggcaggatgggggcaggagagttagcaaaggtgacatcttctcggggggagccgagactgcgcaaggctggggggctatgggcccgttccangcagaaagagcaagagggca

SEQ ID NO: 2706 - DNA, 2393 bp, Homo Sapiens
ggccggcgcctcctcctggattcattcactcgctcttttcattcacgaaggtagtgaggcctagtggaaagccatggagagcgctctccccgccgccggcttcctgtactgggtcggcgcgggcaccgtggcctacctagccctgcgtatttcgtactcgctcttcacggccctccgggtctggggagtggggaatgaggcgggggtcggcccggggctcggagagtgggcagttgtcacaggtagtactgatggaattggaaaatcatatgcagaagagttagcaaagcatggaatgaaggttgtccttatcagcagatcaaaggataaacttgaccaggtttccagtgaaataaaagaaaaattcaaagtggagacaagaaccattgctgttgactttgcatcagaagatatttatgataaaattaaaacaggcttggctggtcttgaaatcggcatcttagtgaacaacgtgggaatgtcgtatgagtatcctgaatactttttggatgttcctgacttggacaatgtgatcaagaaaatgataaatattaatattctttctgtttgtaagatgacacaattggtactgcctggcatggtggaaagatccaaaggggctattctgaacatttcatctggcagtggcatgctccctgtcccactcttgaccatctattctgcaaccaagacttttgtagatttcttctctcagtgcctccatgaggagtataggagcaagggcgtctttgtgcagagtgtcctgccatacttcgtagctacaaaactggctaaaatccggaagccaactttggataagccctctccggagacgtttgtgaagtctgcaattaaaacagtcggcctgcaatcccgaaccaatggatacctgatccatgctcttatgggctcgataatctcaaacctgccttcttggatttatttgaaaatagtcatgaatatgaacaagtctacacgggctcactatctgaagaaaaccaagaagaactaagcatgataactgcattgtaacttggccagatgctccagcatatgcacgttcactgcaaagcaccctactggttttgaaaatctgaccttgtcatttcaatagttattaacatgactaaatattatcttaattaagaggaaaatagaagttgcttttaggggtttctgacatatattctggatactatccgaggtaattttgaagtttaatataaatgctcatatcaaatgaatatagaactaatattgtcgggaacacctaatagaaaggaatactattatagcaaatcacagaatgatagactcaagcataaaacttggcagttttatctgcttcaaaatgccattgatcattattcctgtattttctctgaaactgattataaaaaccaatgtccagctactcttttgtttttgacacttgaagaaatggagatcgatttgatttgtttataagcagacacactgcaatttacaaagatctctttacggttttataaaattatcttccagtttgtacatttatatggaattgttctttatcaagggtagctaatgacatgaaaataattgtgaaatatggaattatttctgacacatgaagcccactaaactatgctttcctataatgcatatttcttctcagtttaaatgtatgtaaatatcgaagctatatggtatgatttataaagataaatgggccaaagtgtacattgagactggcagccatctatggtaccactgaaaccctgacccagaaaagtggcttgcttggacacccagctgcctttgtttctgcattaaaccaatattgatcacacatatgacacaggctagtcctataaaagtaatgacttcatagaaatggcattataatttttaagttgatactctacaggtagctattgatataattagttttaataaaacatgctgcaaccatggtatacaacaaaaatacatttctttggtgattgaaattaaggccgtatttacaatgacttaatataagactgacttttatcctgcttcataacttgtatggagaactcaccaagaaagaattcaatactgtgaaatatgcagcaagaagattggtctttacctaggctgtgtttcctaagctctgagttttcagcaccagtagatttgtattaaaagaaaaaaaaatggggccttagcttctggcttttaattttgccagctaaggacataaaacaaaaataaacaaacaaaaacaaatagccatctgctatcagcatcattatgtaaaagaaaatatattttagcccctaaaattaggaagaatgtaatctcagaataaaggttgtcatttaagttgaataaatatatagctttatgaaaaacacaaaaaaaaaaaa

SEQ ID NO: 2707 - DNA, 678 bp, Homo Sapiens
ctcagtgctcagccgggagcagtcggaaggggttggagcgagggtccggagaagcattggcagacccgagttaaaaaatctggatccgtttttactgtttgatgaatttaaaggaggtagaccaggaggatttcctgatcatccacatcgaggttttgaaacagtatcctacctcctggaagggggcagcatggcccatgaagacttctgtggacacactggtaaaatgaacccaggagatttgcagtggatgactgcgggccggggcattctgcacgctgagatgccttgctcagaggagccagcccatggcctacaactgtgggttaatttgaggagctcagagaagatggtggagcctcagtaccaggaactgaaaagtgaagaaatccctaaacccagtaaggatggtgtgacagttgctgtcatttctggagaagccctgggaataaagtccaaggtttacactcgcacaccaaccttatatttggacttcaaattggacccaggagccaaacattcccaacctatccctaaagggtggacaagcttcatttacacgatatctggagatgtgtatattgggcccgatgatgcacaacaaaaaaatagaacctcatcacacagcagtgcttggagaaggtgacagtgtccaggtgcagaccacgatccaagaga

SEQ ID NO: 2708 - DNA, 464 bp, Homo Sapiens
  misc_feature (174)..(174): n is a, c, g, or t
cagcgtagtcgctttccctactggctgtctgtggcgtaggtacatgaggtgctcaatctcggcctggaaagaatacctcgaaagaataccacgcactggaactctgtgaagaagtgaagacgctaaaagcgggcagtgctgtgtttacttagagacagtggagtgggtccaggnctgtcctcgccaggctggtttttaaagcacttttggtttaggagtcagcttcgccatggtcactttcattatcattgtcattctcctcatcctcttccctcttttcctctttaagcattttcaggtatttactagctaaaatcttctttggtaatatatcgtggccttggccgtgagcaccaacgcctcctggttgatgctggacacctcgggggagctcttcatgatgacccggatgcgggatagaggcagcgagatgagccgctgctccccgcccttgtctttaccca

SEQ ID NO: 2709 - DNA, 652 bp, Homo Sapiens
  misc_feature (458)..(458): n is a, c, g, or t
  misc_feature (500)..(500): n is a, c, g, or t
  misc_feature (585)..(585): n is a, c, g, or t
agccagctgactttattgctctgggggcagggagcggagctgcggagccgcctggtctcccgcgtccatcggtccattcctgcgtcgttctgtccttccgaacgcacacttcaggagcagccgcgagggtggcatggcagcgagcacagacatggctgggctggaggagagcttccgcaagtttgccatccatggtgaccccaaggccagtgggcaagagatgaatggcaagaactgggccaagctgtgcaaggactgcaaggtggctgacggaaagtccgtgacagggaccgatgtggacatcgtcttctccaaagtcaaggggaagtctgctcgggtcatcaactatgaggagttcaagaaggccctggaagagctggcgaccaagagattcaaggggaagagcaaggaggaggccttcgatgccatctgccagctggtggctggcaaagagccanccaatgtgggcgtcactaaagcaaaaacagggggtgctgtanaccggctgacggacaccagcagatacacgggctcccacaaggagcgctttgatgagagccgcaagggcaaaggcattgcgggacngcaagacatcctggacgacagtgggtacgtgagtgcctacaagaatgcaggcacctacgatggcaag

SEQ ID NO: 2710 - DNA, 324 bp, Homo Sapiens
ttttttttttttttttttttttttttaattaaaatccactttttattctttcacagattttaacaattatacacaacttttaacataaaggtagggaaatctcaaggataaggaggcaatatatatggcctcttctattcgttattcaggatggaaggaaattttcaaagtacagggggggagattcaacactggaaaaatacatatgaaacttgtttaattggctccacttaggaccagacacagcacaataaatacagaactgcatcatctttttaaaagatcattggaattttaacacattcttactaaagaaatacatac

SEQ ID NO: 2711 - DNA, 464 bp, Homo Sapiens
agggagggtgtgctgtctagctctagttcctgaaacagacgctccgaatttgagttagttatcccttggccgtcttagtactcctcgggtttaatcttatttccacagagtttcttctgccgggatctccaccgaggttaccgaacaaaaacagcacagagcccagactggaggcagacccgggcgctgtctctgctaggcttatttacgtttagggcttttctttcctttttttaaagtgatgggggaaggctcattgtggtggtatggaacagttccgtttgctttaaaacaacaggacggaaccacgcgacaactagaaccagaggagggggcatgcgtttcttcaagtcagccaaacagcatctggtctttgaaagcgcaatttcatcaagaaactcctgttggatccctcctaactgtggaccaaaataagccaacaggaacgggtgtttacttaatgg

SEQ ID NO: 2712 - DNA, 9061 bp, Homo Sapiens
atgaatggtcaccgttttacgttcagaactcgttcgcttctacctttacaaaagggacaacacagatgcattactaagctcttggctcataacgatccctggggtatattcagagccccttcctcgcggcgttcatatagtgtctcaggggtctgtcagccagcaatccccaattcctcattacatattcctcacaatgcatgctggctaaaatggaaattgtgttcagaaatagccctgccctaccatcatatactaggagaaaggaggaaattatgctctattagaaagtttgaacactggcgggaagatgtccgcagctgttgccaggccagggttctcccgagagggaggacgctgggactgtggcttgccctgatcggccgagaagagtttgccatgaatcttctgcgtcggagtgggaaacggcggcgttcagaatcaggctcagattcgttctcgggaagcggcggtgacagcagtgccagcccccagttcctctccgggtccgtgctgagcccgccgcccggccttggtcgctgcctgaaggccgcagctgcaggagaatgcaagcctacagttcctgactacgaaatagacaagctactattggcaaactggggacttcctaaagcagttctggaaaaataccacagttttggtgtaaaaaagatgtttgaatggcaggcagagtgccttttgcttggacaagtcctggaaggaaagaatttagtttattcagctcctacaagtgctgggaagactcttgtggcagaattacttattttgaagcgggttttggaaatgcggaagaaagctttgtttattcttccctttgtttctgtggctaaagagaagaaatactacctccagagtctgtttcaggaagtaggaataaaagtagacggttatatgggcagcacctctccatcaaggcatttctcttcattggatattgcagtctgcacaattgagagagccaatggtctgatcaatcgcctcatagaggaaaataagatggatctgttaggaatggtggttgtggatgaattacatatgctgggagactctcaccgagggtatctgctggaacttttgctgaccaagatttgctatattactcggaaatcagcatcttgtcaggcagatctagccagttctctgtctaatgctgtgcaaatcgttggcatgagtgctacccttcctaatttggagcttgtggcttcctggttgaatgctgaactctaccataccgactttcgccctgtaccgcttttggagtcagtaaaagttggaaattccatatatgactcttcaatgaaacttgtgagggaatttgagcccatgctacaagtgaagggagatgaggaccatgttgttagtttatgttatgagacgatttgtgataaccattcagtattacttttttgtccatcaaagaaatggtgtgagaagctggcagatatcattgctcgagagttttataatctacatcatcaagctgagggtgagggattggtgaaaccctctgaatgcccaccagtaattctggaacaaaaagaactcctggaagtgatggatcagttaagacgtttgccttcaggactggactctgtattacagaaaactgtaccatggggagtagcatttcatcatgcaggtcttacttttgaggagagggatatcattgaaggagcctttcgtcaaggtctcattcgggtcttggcggcaacttctactctttcttctggggtgaatttacctgcacgtcgtgtgattattcgaacccctatttttggtggtcgacctctagatattcttacttataagcagatggttggccgtgctggcaggaaaggagtggacacagtagggagtatcttaatttgtaagaactctgagaaatcaaaaggcatagctctccttcagggttctctaaagcctgttcgcagctgtctgcaaagacgagaaggagaagaagtaactggcagcatgatacgagctattctggagataatagttggtggagtggcaagtacatcacaagatatgcatacttatgctgcctgcacatttttggctgcaagtatgaaagaagggaagcaaggaattcagagaaatcaagagtctgttcagcttggagcgattgaggcctgtgtgatgtggctactagaaaatgaattcatccagagtacagaagccagtgatggaacagaaggaaaggtgtatcatccaacacatcttggttcggccactctttcttcttcactttctccagctgatactttagatatttttgctgacctgcaaagagcaatgaagggctttgttttagagaatgatcttcatattctctatctggttacacctatgtttgaggattggactactattgattggtatcgatttttctgtttatgggagaagttgccaacttcaatgaaaagggtggcagagctagtgggagttgaagaggggttcttggcccgttgtgtgaaaggaaaagtagtagccagaactgagagacagcatcgacaaatggccatccataaaaggtttttcaccagtcttgtgctattagatttaatcagtgaagttcccttaagggaaataaatcagaaatatggatgcaatcgtgggcagattcaatctttgcaacagtcagctgctgtttatgcagggatgattacagtattttccaaccgtctgggctggcacaacatggaactactactttcccaatttcagaagcgtcttacgtttggcatccagagggagctgtgtgacctggttcgggtatccttactaaatgctcagagagccagggttctctatgcttctggctttcatactgtggcagaccttgctagagcaaatattgtggaggtggaggtgattctgaaaaatgctgtgcctttcaaaagtgcccggaaggcagtggatgaggaagaggaagcagttgaagaacgtcgcaatatgcgaactatctgggtgactggcagaaaaggtttaactgaaagggaagcagcagcccttatagtggaagaagccagaatgattctgcagcaggacttagttgaaatgggagtgcaatggaatccatgtgccctgttacattctagtacatgctcattgactcatagtgagtccgaagtaaaggaacacacatttatatcccaaactaagagttcttataaaaaattaacatcaaagaacaaaagtaacacaatatttagtgattcttatattaagcattcaccaaatatagtgcaagacttaaataaaagtagagagcatacaagttcctttaattgtaatttccagaatgggaatcaagaacatcagacatgttccattttcagagcaagaaaacgggcctctttagatataaataaagagaagccaggagcctctcagaatgaggggaaaacaagtgataagaaagttgttcagactttttcacagaaaacaaaaaaggcacctttgaatttcaattcagaaaagatgagcagaagttttcgatcttggaaacgtagaaagcatctaaagcgatctagggacagcagccccctgaaagactctggagcgtgtagaatccatttacaaggacagactctgtctaatcctagtctttgtgaagacccgtttaccttagatgagaagaaaacggaatttagaaattcagggccatttgctaaaaatgtatctttgagtggtaaggaaaaagataataaaacatcattcccattacaaataaagcaaaattgttcatggaacataacactaactaatgataattttgtggagcatattgtcacaggatctcagagtaaaaatgtgacttgtcaggccactagtgtggttagtgaaaagggcagaggagtagctgttgaggcagaaaaaataaatgaagtgctgatacaaaatggttcaaaaaaccagaatgtttatatgaaacaccatgacatccatccaattaaccagtacctgcgaaagcaatctcatgaacagacaagcactattaccaaacagaaaaatataatagagagacaaatgccctgtgaagcagtcagtagttacataaatagagactcaaatgttactatcaattgtgaaaggataaagcttaatacagaggaaaataaaccaagtcattttcaggcattaggagatgatataagcagaactgtgatacccagtgaagtacttccatcagctggagcatttagcaaatcagaaggccagcatgagaattttctaaatatttctagactacaagaaaaaacaggtacttatacaacaaacaaaactaaaaataatcatgtttctgacttaggtttagtcctctgtgattttgaagatagtttctatctggatactcagtcagagaaaataatacaacagatggcaactgaaaatgccaaactaggagcaaaggacaccaacctggcagcagggataatgcagaagagcttagtccaacagaactcaatgaactcttttcagaaggagtgtcacattccttttcctgctgaacagcaccctctaggagcgactaagatagatcatttggaccttaagactgtaggtactatgaaacaaagcagtgattcacatggggttgatatcctgactccagaaagcccgattttccattctccaatactattggaggaaaatggtctttttttaaaaaagaatgaagtttctgttactgattcacaattaaatagttttcttcaaggttatcaaacacaagaaactgtgaaaccagttatacttctgattcctcaaaagagaactcccactggtgtagaaggagaatgtcttccagttcctgaaacaagtttgaatatgagtgatagtttactatttgatagcttcagtgatgactatctagtaaaagaacaattacctgatatgcaaatgaaagaaccccttccttcagaagtaacatcaaaccattttagtgattctctgtgtctacaagaagacctaattaaaaaatcaaatgtaaatgagaatcaagatacccaccagcagttgacttgttccaatgatgaatctattatattttcagaaatggattctgttcagatggttgaagctttggacaatgtggatatatttcctgtccaagagaagaatcatactgtagtatctcctagagcattagaactaagtgatccagtacttgatgagcaccaccaaggtgatcaagatggaggagatcaagatgaaagggctgaaaaatcaaaattaactgggaccaggcaaaatcattcattcatatggtcaggggcatcatttgatctaagtccaggactgcaaaggattttagataaagtatccagtcctctagaaaatgaaaagctaaaatcaatgactataaacttttccagtttgaatagaaaaaatacagagttaaatgaagaacaagaagttatttcaaacttggagacaaaacaagtgcagggaatttcattttcttctaataatgaagtaaaaagcaagattgagatgctagaaaacaatgccaatcatgatgaaacctcatccctcttacctcgtaaagaaagtaatatagttgatgataatggtctcattcctcctacacccattccaacatctgcttctaagctgacatttccagggattcttgaaacacctgtaaacccttggaaaactaataatgttttacaacctggtgaaagttatttatttggctcaccttcagatattaaaaaccacgatttaagtccagggagtagaaatgggttcaaagacaacagccctattagtgacacaagcttttcacttcagttatcacaggatggattacagttaactccagcctcaagcagttcagaaagtttgtccataattgatgtagcaagtgaccaaaatcttttccaaacattcattaaggagtggcggtgcaaaaagcgattttccatctcactggcttgtgaaaagattagaagtttgacatcttctaaaactgctactattggcagtaggtttaagcaagctagctcacctcaggaaattcctattagagatgatggatttcccattaaaggttgtgatgacaccttggtggttggactggcagtatgctggggtggaagggatgcctattatttttcactgcagaaggaacaaaagcattctgaaattagtgccagtttggttccaccttctttagatccaagcctgactttgaaagacaggatgtggtaccttcaatcttgcttgcgaaaggaatctgataaagaatgttctgttgtcatctatgacttcatccagagctataaaattcttcttctttcttgtggcatctccttggagcaaagttatgaagatcctaaggtggcatgctggttactagatccagattctcaggagccgactcttcatagcatagttaccagttttcttcctcatgagcttccactcctagaagggatggagaccagccaagggattcaaagcctggggctaaatgctggcagtgagcattctgggcgatacagagcatctgtggagtccattctcatcttcaactctatgaatcagctcaactctttgttgcagaaggaaaaccttcaagatgttttccgtaaggtggaaatgccctctcagtactgcttggccttgctagaactaaatggaattggctttagtactgcagaatgtgaaagtcagaaacatataatgcaagccaagctggatgcaattgagacccaggcctatcaactagctggccacagtttttctttcaccagttcagatgacatcgctgaggttttatttttggaattgaagttgcccccaaatagagagatgaaaaaccaaggcagcaagaaaactctgggttctaccagaagagggattgacaatggacgcaagctaaggctgggaagacagttcagcactagtaaggacgttttaaataaattaaaggcattacatcctttaccaggcttgatattagaatggagaagaatcactaatgctattaccaaagtggtctttccccttcagcgggaaaagtgtcttaatccttttcttggaatggaaagaatctatcctgtatcacagtcgcacactgctacaggacgaataacctttacagaaccaaatattcagaatgtgccaagagattttgaaatcaaaatgccaacactagtaggagaaagcccaccttctcaagctgtaggcaaaggcctacttcccatgggcagaggaaaatataagaagggtttcagcgtgaatcctagatgccaggcacagatggaggagagagctgcagacagaggaatgccattttcaattagcatgcgacatgcctttgtgcctttcccaggtggttcaatactggctgctgactactctcagcttgaactgaggatcttggctcatttatcccatgatcgtcgtctcattcaagtgttaaacactggagctgatgttttcaggagcattgcagcagagtggaagatgattgagccagagtctgttggggatgatctgaggcagcaggcaaaacagatttgctatgggatcatttatggaatgggagctaaatctttgggagagcagatgggcattaaagaaaatgatgctgcatgctatattgactccttcaaatccagatacacagggattaatcaattcatgacagagacagtgaagaattgtaaaagagacggatttgttcagaccattttgggaaggcgtagatatttgccaggaatcaaagacaacaacccttatcgtaaagctcacgctgagcgtcaagctatcaacacaatagtccaaggatcagcagctgatattgtcaaaatagccacagttaacattcagaagcaattagagaccttccactcaaccttcaaatcccatggtcatcgagagggtatgctccaaagtgaccgaacaggattgtcacgaaagagaaaactgcaagggatgttctgcccaatcagaggaggcttcttcatccttcaactccatgatgaactcctatatgaagtggtagaagaagatgttgttcaggtagctcagattgtcaagaatgaaatggaaagtgctgtaaaactgtctgtgaaattgaaagtgaaagtgaaaataggcgccagctggggagagctaaaggactttgatgtgtaactgtgctgttgatgaagtcctcccagggaagcctgtgcagatgcagtcacctggaaagaacagagattaccctttcacctacctcagcaaaacaaactttcaagtcttgatagacttagcctagtaattttatagtgagagtttcaaactatatatcagtgtctatagcatcaaaaacttctgggggcgtgggggaagtagaataccaagtataatagttacattcactttcaaagagcatctatgaatttgccttttgtaacttactgtggctttaaacatattcagaacagatgcttgaaatatgcacttagcactttggttccacatctgtctgggtaaaccatgaagaaaatgaagctgctgcctcaatcgacccagacagcagccataggcagataaagatttggtttcaccctggtggtggtaggcatcgtgtgtgactttttttcctctaatatcaattttacagtacggaaatagtattttaaaatagtattggctaataaattatgaattctataaagtagtaagacttggtatggttggagtgtaggaatgaatattcatgaaatgtttcttattgcttttccttccctaattcatacaatgaatgtatttggaatacttacatattataaaataaactatacctcttcaagaggtatcctgttctgtaagatcagatgtttttattgcaggtcaatataatactgccagagacagaaaatacccccttatcagtcccttagtgcctctttctgtttgtggcatggtgagaaaacccatgctgaaaagattgtactttgtgatcccaatcagagggatggagctaatctttttgctgttgaaataaaatgaatttatgagaaaaaaaaaaaaaaaa

SEQ ID NO: 2713 - DNA, 232 bp, Homo Sapiens
  misc_feature (25)..(25): n is a, c, g, or t
  misc_feature (45)..(45): n is a, c, g, or t
  misc_feature (108)..(108): n is a, c, g, or t
  misc_feature (133)..(133): n is a, c, g, or t
atttggtcttagaagaccgaagatngaattccctgcgcctggtcnccccatgtggaatgggcgtatcaggggcatccatcgcctgggtgcggcagtggcccagagganatcagaagaagaaaaggacaatacnccagttcctgaagacctatttctacgatgtggaggctctgagggattacttgctccaaagggagatgtacaaggtgcatgagaaaaatccggttgagaa

SEQ ID NO: 2714 - DNA, 2518 bp, Homo Sapiens
  misc_feature (230)..(230): n is a, c, g, or t
  misc_feature (260)..(260): n is a, c, g, or t
  misc_feature (290)..(290): n is a, c, g, or t
  misc_feature (334)..(334): n is a, c, g, or t
  misc_feature (337)..(337): n is a, c, g, or t
  misc_feature (360)..(360): n is a, c, g, or t
  misc_feature (2204)..(2204): n is a, c, g, or t
  misc_feature (2273)..(2273): n is a, c, g, or t
  misc_feature (2287)..(2287): n is a, c, g, or t
  misc_feature (2474)..(2474): n is a, c, g, or t
  misc_feature (2489)..(2489): n is a, c, g, or t
  misc_feature (2496)..(2496): n is a, c, g, or t
gggaggggtgcgaggctagccacgcaggcggggccctgggtcattttaaactctcagagtgaacgtcttgataggaccgacaagacgcatgacatgtacttagatagcttatcttagagccacactgagattggaacccgcaaaatatgccagggaggaaggtgagcaagggacacgacactcacccggataaacccaacaagcgcagcgaggctgtggggaaaccgganccctgcacaccgccgggggaaggtgggccnccgccaccaccgtggaagaacagcgcggangcaccccacgagatgagacggaactgccgtgagatccagcaatnccnactgtgggtctgacccaggatancggaaagcagggacgtgaacagccctcctcatgttcttgacaccgtcattctcagcagctcagctaaggcacagaggcagccgagcgtctgtcagcagagtcgtggctgagcagaacacgccacacgccacacgccacacgccacacgtgcaggattgctcaagatggaagggcacagtggaatatatatatatatttatatttttggcgagaccctggaggacacactgaatacaatggaataccatcccgcctttgaaaggaagggaaatcctggcacacgctgcaacaggagggagcttgaggacactgtggtgagtggagcacgtgagacacggaaggacacacgctgaagacacgcagagatgcccacccacgtggggaggtgacaggggagcccagcgcacagagacaaagtggaatggaggcctgggggctgggagcaaatgcggagcgagtgcttcctggggcagagtctccgtttgggaagatgagaaggttctgccgacggatgctggcgatggttgcagaagaatgtgaatgtgcccaatgctactgaaaaacggttacaatggaaacgccaccccagtgaccaccactgccccgtgggcctccctgggcctctccgccaagacctgcaacaacgtgtccttcgaagagagcaggatagtcctggtcgtggtgtacagcgcggtgtgcacgctgggggtgccggccaactgcctgactgcgtggctggcgctgctgcaggtactgcagggcaacgtgctggccgtctacctgctctgcctggcactctgcgagctgctgtacacaggcacgctgccactctgggtcatctatatccgcaaccagcaccgctggaccctaggcctgctggcctgcaaggtgaccgcctacatcttcttctgcaacatctacgtcagcatcctcttcctgtgctgcatctcctgcgaccgcttcgtggccgtggtgtacgcgctggagagtcggggccgccgccgccggaggaccgccatcctcatctccgcctgcatcttcatcctcgtcgggatcgttcactacccggtgttccagacggaagacaaggagacctgctttgacatgctgcagatggacagcaggattgccgggtactactacgccaggttcaccgttggctttgccatccctctctccatcatcgccttcaccaaccaccggattttcaggagcatcaagcagagcatgggcttaagcgctgcccagaaggccaaggtgaagcactcggccatcgcggtggttgtcatcttcctagtctgcttcgccccgtaccacctggttctcctcgtcaaagccgctgccttttcctactacagaggagacaggaacgccatgtgcggcttggaggaaaggctgtacacagcctctgtggtgtttctgtgcctgtccacggtgaacggcgtggctgaccccattatctacgtgctggccacggaccattcccgccaagaagtgtccagaatccataaggggtggaaagagtggtccatgaagacagacgtcaccaggctcacccacagcagggacaccgaggagctgcagtcgcccgtggcccttgcagaccactacaccttctccaggcccgtgcacccaccagggtcaccatgccctgcaaagaggctgattgaggagtcctgctgagcccactgtgtggcagggggatggcaggttgggggtcctggggccagcaatgtggttcctgtgcactgagcccaccagccacagtgcccatgtcccctctggaagacaaactaccaatttctcgttcctgaagccactccctccgtgaccactggccccangctttcccacatggaaggtggctgcatgccaaggggaagagcgacacctccaggcttccgggagcccanagagcatgtggcangcagtggggcctcttcatcatcatgttcgcatcagtggcgatgactttatttgcggagcatttctgcaagcgttgcctggatgcggtggtgcattgtgggccctctgggctcctgcctcaaaatgtcagtgagcaccatgctggaagtcaccatcactgtggcagcgcccaggaaggcatagggcancctaccacctccaanggggcangcgccctcatctggggttgggt

SEQ ID NO: 2715 - DNA, 559 bp, Homo Sapiens
cttcctttcctttttcactatgtatcctgttactgggcttaaacagctttcagagaagagatgtcatttctattaaatgctctttcagtagcgaactgagttcacacttgactaaggatattttccggactgtctgtcatcagcatccttagtgggtttccccatatttaaattggtagaggccagggatggtggctcacacctgtaatctcagtactttgggaggccaaggtaggtggattgcttgagctcagaagaccagcctgggcaacctggtgaaaccctgtctctactaaaaattcaagttagctagctgggcatggtgatgcacttctgtagtcccagctacttggagagggggtggtgctggggcagcaggatcgcttgaacccaggaggttgaggttgcagtgagccaagatggtaccagcctaggtgacaaagtgacaccctgtctcaaaaaagaaaccaaacaaacataaaaaaaaaaacaaaaaaatcggtagagagtgatttctctcccaggcccacttaatgtagactgggcctggctgacacct

SEQ ID NO: 2716 - DNA, 478 bp, Homo Sapiens
tcagggttgccagataaaatacaggatgcccagttacagttgaatgtcagataaacagcaagtactatttcagcataagtcagtctcaaatgttgcatgagacataatgtactaaaaaaaaaaaatgctcattgtttacctgaaattcaaatttaactgggagccctgtacttttatttactaaatctggcaactctaccccagatgtctgtgaggttaagtggggccaggcatacagctgacggaaggacagagagagaggtggcagggactgctggcctcctgaggcagagctgtcccaggtctggtggggctatgattccagagaggccagagactgagtatgaaagtggcaggcggctgggtctgaggagatgccaagttggcctcttgagggaaataaacaggtatatttagctgttgtggcttgcgcctgaggacaggaagcagctgtttagcctaaatcagatgttaaaac

SEQ ID NO: 2717 - DNA, 1074 bp, Homo Sapiens
ggtcaggaaagctcaggcaagcccaccctcaggcattacagctagactccgagcttactgggcagtcatctgattcgaccaacatcagttcgcagggcttaagcccagtcccttacggcggctggggagggaccaggcccaagtatataaagctccctgagggtccgcgttggctttgcgcctgtgagtgtgattcaagaacgtcccagtgcccttggctcctttcggagtgtgaccccgtgcttgcacgggacacgttacccagctcgggtgagaagggtatcttccgggaacctcgcctttaatagcacaacgagcgcagagtccactggatctgcgagaagaaaccgcgctaactagtttgtccctacggccgcctcgtagtcactgccgcggcgccttgagtctccgggccgccttgccatggctgcccgtggtgtcatcgctccagttggcgagagtttgcgctacgctgagtacttgcagccctcggccaaacggccagacgccgacgtcgaccagcagggactggtaagaagtttgatagctgtaggactgggtgttgcagctcttgcatttgcaggtcgctacgcatttcggatctggaaacctctagaacaagttatcacagaaactgcaaagaagatttcaactcctagcttttcatcctactataaaggaggatttgaacagaaaatgagtaggcgagaagctggtcttattttaggtgtaagcccatctgctggcaaggctaagattagaacagctcataggagagtcatgattttgaatcacccagataaaggtggatctccttacgtagcagccaaaataaatgaagcaaaagacttgctagaaacaaccaccaaacattgatgcttaaggaccacactgaaggaaaaaaaaagaggggacttcgaaaaaaaaaaaagccctgcaaaatattctaaaacatggtcttcttaattttctatatggattgaccacagtcttatcttccaccattaagctgtataacaataaaatgttaatagtcttgctttttattatcttttaaagatctccttaaattct

SEQ ID NO: 2718 - DNA, 343 bp, Homo Sapiens
  misc_feature (11)..(11): n is a, c, g, or t
  misc_feature (82)..(82): n is a, c, g, or t
  misc_feature (293)..(293): n is a, c, g, or t
  misc_feature (298)..(298): n is a, c, g, or t
  misc_feature (325)..(325): n is a, c, g, or t
gttttcccttnactttatttatcttcataagtcacaaaatgtgagtgcagagataaatgtctgtgtgcatgtgccctgagcnacagggtggcataactcggcacactcataatgacacagccgttcacccagccacagatagtgacagggcacacatggcgacacccacatgtacggagataaatctcccccaccatgacatgggtagacagaaaacacgccgcagtatactctagtatgtttacacaaacagggagacaggcccgtgcaatgcatgtcaccaccacccacantcagnggttgacatctgcttgggggttcttcngacaaaggccaccccacc

SEQ ID NO: 2719 - DNA, 703 bp, Homo Sapiens
agtggcgccagggatttgaaccgcgctgacgaagtttggtgatccatcttccgagtatcgccgggatttcgaatcgcgatgatcatcccctctctagaggagctggactccctcaagtacagtgacctgcagaacttagccaagagtctgggtctccgggccaacctgagggcaaccaagttgttaaaagccttgaaaggctacattaaacatgaggcaagaaaaggaaatgagaatcaggatgaaagtcaaacttctgcatcctcttgtgatgagactgagatacagatcagcaaccaggaagaagctgagagacagccacttggccatgtcaccaaaacaaggagaaggtgcaagactgtccgtgtggaccctgactcacagcagaatcattcagagataaaaataagtaatcccactgaattccagaatcatgaaaagcaggaaagccaggatctcagagctactgcaaaagttccttctccaccagacgagcaccaagaagctgagaatgctgtttcctcaggtaacagagattcaaaggtaccttcagaaggaaagaaatctctctacacagatgagtcatccaaacctgggaaaaaataaaagaactgcaatcactactccaaactttaagaagcttcatgaagctcattttaaggaaatggagtccattgatcaatatattgaggagaaaaaaaaa

SEQ ID NO: 2720 - DNA, 2360 bp, Homo Sapiens
ggaagtgcctgcaaccttcgccgctgccttctggttgaagcactatggagggagagaggaagaacaacaacaaacggtggtatttcactcgagaacagctggaaaatagcccatcccgtcgttttggcgtggacccagataaagaactttcttatcgccagcaggcggccaatctgcttcaggacatggggcagcgtcttaacgtctcacaattgactatcaacactgctatagtatacatgcatcgattctacatgattcagtccttcacacggttccctggaaattctgtggctccagcagccttgtttctagcagctaaagtggaggagcagcccaaaaaattggaacatgtcatcaaggtagcacatacttgtctccatcctcaggaatcccttcctgatactagaagtgaggcttatttgcaacaagttcaagatctggtcattttagaaagcataattttgcagactttaggctttgaactaacaattgatcacccacatactcatgtagtaaagtgcactcaacttgttcgagcaagcaaggacttagcacagacttcttacttcatggcaaccaacagcctgcatttgaccacatttagcctgcagtacacacctcctgtggtggcctgtgtctgcattcacctggcttgcaagtggtccaattgggagatcccagtctcaactgacgggaagcactggtgggagtatgttgacgccactgtgaccttggaacttttagatgaactgacacatgagtttctacagattttggagaaaactcccaacaggctcaaacgcatttggaattggagggcatgcgaggctgccaagaaaacaaaagcagatgaccgaggaacagatgaaaagacttcagagcagacaatcctcaatatgatttcccagagctcttcagacacaaccattgcaggtttaatgagcatgtcaacttctaccacaagtgcagtgccttccctgccagtctccgaagagtcatccagcaacttaaccagtgtggagatgttgccgggcaagcgttggctgtcctcccaaccttctttcaaactagaacctactcagggtcatcggactagtgagaatttagcacttacaggagttgatcattccttaccacaggatggttcaaatgcatttatttcccagaagcagaatagtaagagtgtgccatcagctaaagtgtcactgaaagaataccgcgcgaagcatgcagaagaattggctgcccagaagaggcaactggagaacatggaagccaatgtgaagtcacaatatgcatatgctgcccagaatctcctttctcatcatgatagccattcttcagtcattctaaaaatgcccatagagggttcagaaaaccccgagcggccttttctggaaaaggctgacaaaacagctctcaaaatgagaatcccagtggcaggtggagataaagctgcgtcttcaaaaccagaggagataaaaatgcgcataaaagtccatgctgcagctgataagcacaattctgtagaggacagtgttacaaagagccgagagcacaaagaaaagcacaagactcacccatctaatcatcatcatcatcataatcaccactcacacaagcactctcattcccaacttccagttggtactgggaacaaacgtcctggtgatccaaaacatagtagccagacaagcaacttagcacataaaacctatagcttgtctagttctttttcctcttccagttctactcgtaaaaggggaccctctgaagagactggaggggctgtgtttgatcatccagccaagattgccaagagtactaaatcctcttccctaaatttctccttcccttcacttcctacaatgggtcagatgcctgggcatagctcagacacaagtggcctttccttttcacagcccagctgtaaaactcgtgtccctcattcgaaactggataaagggcccactggggccaatggtcacaacacgacccagacaatagactatcaagacactgtgaatatgcttcactccctgctcagtgcccagggtgttcagcccactcagcccactgcatttgaatttgttcgtccttatagtgactatctgaatcctcggtctggtggaatctcctcgagatctggcaatacagacaaaccccggccaccacctctgccatcagaacctcctccaccacttccaccccttcctaagtaaaaaaagaaaaagaagaggagaaaaaaacttctttaaaaaaacacataatttttcttttttttttggggaaaaaaaaattttttttaaaattttttccccaagggacgggggaaaattttatttttaaaatttttt

SEQ ID NO: 2721 - DNA, 350 bp, Homo Sapiens
tttttttttaagaaaaactggcaagttgaagaaatagtattagatataaattgccacagagtagttggcacaagcgcatctgaagctgaagttagtgcaccaagttttcctgccattccacacgtggaaacattacttctcctgaatttaagcttattcaaataatcactcaaaactattgcaggtgaaggtaaactttcacatgaagcatgtccctacaaacaacacaagacaggaaggaacccagaagacttgactgagtcacaatggccaccagaaaggcccatgaggaacacacaatgacaataaaagtatctttgaaacagacccctaattaaagacactgagtc

SEQ ID NO: 2722 - DNA, 1473 bp, Homo Sapiens
ctggggtgagggctgtaagtggcgcgattcgcggcagcgccccgatggaacctcctggtcctgtgagggggcccttgcaagattccagctggtatgagccttctgcagagctagtgcagactaggatggctgtatcactaacagcagctgaaactctggcccttcagggtacacagggacaagagaagatgatgatgatgggaccaaaggaagaggaacagtcttgtgagtatgagaccaggctacctgggaaccactctaccagtcaagagatcttccgccaacgcttcaggcatctccgctaccaggagactcctggtccccgggaggccttgagccaactacgagtactctgctgtgagtggctgaggccagagaaacacacgaaggagcagatcctggagttcctggtgctggaacaattcttgaccatcctgcctgaggagctccaatcctgggtgcggggacatcaccctaagagtggagaggaggctgtgactgtgctggaggatttagagaaaggacttgaaccagagccgcaggtcccaggccctgcacatggacctgcacaggaagagccatgggagaagaaggaatctctgggagcagcccaggaagcactgagcatccagctccagcctaaggagacccagcctttcccaaagagtgaacaggtatatttacattttctgtcagttgttacagaagatggcccagagcccaaggacaaaggatcattgccacaaccacccattactgaagtggaatcacaggtgttctcagaaaaacttgctactgacacctctacatttgaagctacctctgagggtaccttagaactgcagcagagaaatcccaaagcggagagactgaggtggtcccctgcccaggaggaaagtttcaggcagatggttgtcatccataaggaaattcccacagggaagaaagaccatgaatgtagtgaatgtggtaaaaccttcatttataactcacatcttgttgtccaccagagagttcattctggagagaaaccctataagtgtagtgactgtgggaaaactttcaaacagagctcaaacctcggtcagcatcagagaattcatacaggagagaaacccttcgaatgtaatgaatgtgggaaggccttcagatggggtgctcatcttgttcagcatcagaggattcactcaggagagaagccctatgagtgtaatgagtgtgggaaggcctttagtcaaagctcatatctaagtcagcatcggagaattcacagtggagagaaaccttttatatgtaaagaatgtgggaaagcttatggatggtgctcagagctcattagacatcggagagttcatgccagaaaagagccttcccattgaattgaaggggagaacgtctccagacagaattctacatcggtctaatctactttaggactggatcccataaaagttataagttccttaaaaaaaa

SEQ ID NO: 2723 - DNA, 648 bp, Homo Sapiens
  misc_feature (366)..(366): n is a, c, g, or t
  misc_feature (369)..(369): n is a, c, g, or t
  misc_feature (409)..(409): n is a, c, g, or t
  misc_feature (589)..(589): n is a, c, g, or t
  misc_feature (630)..(630): n is a, c, g, or t
  misc_feature (646)..(646): n is a, c, g, or t
tttaacatttcatcttttactttttagcaccaacagacttgataacagcctgatgctgatctgacaatgggttgatagccttcccccactgacccttaaatctgcttagtaacaagtcctttgcttctgtcattctcctgggggatggcctactgccctcctttctgtacaatctgggcaaaccgactggtgatggcaagagtggtgtcaatgaagcggtctacacagctggagagacaattttcagtgcgagagtctaggcgattccctggcttctcacacatttatcccaacataactcatgaagtgatcacctgtggcgtaaactgcgccttctgctggctcgcggcaccaggcgctgcactncgntttattcggctttgccagctcgcaatgttcgcctcagtgnccttatgccgaaatctttggctctaggccaaatcttataaggagggcgattaaaaaacgaatcatgtataaatgtttcctcgtgggaaaattgtttttccgttccaatttccaccaacataccaccgagataaaaagttgtagtctggggtgcttatatgaggggagctaccacataatntgggcgtgggcctaatgggcgttttttcccaacggaccccntttcgtgcagccgtgnat

SEQ ID NO: 2724 - DNA, 415 bp, Homo Sapiens
ggaggggacaaagcaactgggaaacagcaggtcgggccccgcaggtcattccccgctttgggtctcgcttccccaaagccaagatctctggatcacagcggagggagggcggcgagggtaggtcgagtcgaggtcttcctagttacagagtcctcccaatcttaggccccaaatcccgccccctaaacccgctgctcccgctccaatcagtttcgcccctcaccgccccgccccctcgtctcttctctagtccgctctccttccgctccccgctagcgctctggtccttctctacttccttccctccgacatcactgtcctctccttgtgcagttcctaccgcacccacttacctatgggtaccaccgggttctcgcgggtcttgcgaacgaacttttccttgaaactctctgga

SEQ ID NO: 2725 - DNA, 331 bp, Homo Sapiens
gagtagaatttatctaatctatcacctttgtatttacttggagcctttataaagtttttctctctgctcttcaaacaaccattgatttactttgctgtatgatggagtactttccattttctggaattttctgactgatgtaataaagtgtttcctcttataatccctgggtgctctcctgcatcatgcttattttgatgtcattgtagatatatgagttgtttattcgttttatgttgctgagaagtatagtctgccgtgaaatgtcattgtatattcattcattcatccatccatttatggatattttagttgctgcatactttttata

SEQ ID NO: 2726 - DNA, 2110 bp, Homo Sapiens
cgagccccgccgcaagctgagcgcctccgcccgccaggcgcgccggcgccgggccatgtactcggggaaccgcagcggcggccacggctactgggacggcggcggggccgcgggcgctgaggggccggcgccggcggggacactgagccccgcgcccctcttcagccccggcacctacgagcgcctggcgctgctgctgggctccattgggctgctgggcgtcggcaacaacctgctggtgctcgtcctctactacaagttccagcggctccgcactcccactcacctcctcctggtcaacatcagcctcagcgacctgctggtgtccctcttcggggtcacctttaccttcgtgtcctgcctgaggaacggctgggtgtgggacaccgtgggctgcgtgtgggacgggtttagcggcagcctcttcgggattgtttccattgccaccctaaccgtgctggcctatgaacgttacattcgcgtggtccatgccagagtgatcaatttttcctgggcctggagggccattacctacatctggctctactcactggcgtgggcaggagcacctctcctgggatggaacaggtacatcctggacgtacacggactaggctgcactgtggactggaaatccaaggatgccaacgattcctcctttgtgcttttcttatttcttggctgcctggtggtgcccctgggtgtcatagcccattgctatggccatattctatattccattcgaatgcttcgttgtgtggaagatcttcagacaattcaagtgatcaagattttaaaatatgaaaagaaactggccaaaatgtgctttttaatgatattcaccttcctggtctgttggatgccttatatcgtgatctgcttcttggtggttaatggtcatggtcacctggtcactccaacaatatctattgtttcgtacctctttgctaaatcgaacactgtatacaatccagtgatttatgtcttcatgatcagaaagtttcgaagatcccttttgcagcttctgtgcctccgactgctgaggtgccagaggcctgctaaagacctaccagcagctggaagtgaaatgcagatcagacccattgtgatgtcacagaaagatggggacaggccaaagaaaaaagtgactttcaactcttcttccatcatttttatcatcaccagtgatgaatcactgtcagttgacgacagcgacaaaaccattggggtccaaagtttgatgttaatccaagttcgtcctttgtaggaatgaaggatggcaacgaaaggtggggccttaaattggatgccacttttggactttcatcatcctcctgaagaagaagtgtctggaatacccgttctatgtaatatcaacagaaccttgtggtccagcaggaaatccgaattgcccatatgctcttgggcctcaggaagaggttgaacaaaaacaaattcttttaattcaacgggtgctttacataatgaaaaaaccacttgtgcacacgatgggcatctaacatcatcatcttctaatgtgttggagattttcatttcaaatatattttttaaattactctattttccaaaacacgtaatgcatttttctcgaaaataccttactgtaaaaataactgtcgcgtacacatgtgtgaagtagctagaacatactgaattttttttgtactgttggactctattcagtgtcatgtcctatatctgatcaagttatcaaggagataattctagaatgaaaaagaaaatcctcttgttggaaacaaaagacgttttatatgtgcagtatgacaaagaggagtttcagagacaactttgaatccttgtcagcctggagaccagcaccagaggaatctacaaggcaaactcccatatatttgcttcccccaaattgctgcccctacagactcaaagctctttttctttgttttgttgtttctctaaaaatttactgttctttgtcgatgctatataagccagggagttctaagacgccagctctttgagatttgctcattcccctgtatttcccacatatatattacatatacccgctaataaatttatgtttgttttaaaaaaaaaaaaaaaaaaa

SEQ ID NO: 2727 - DNA, 1492 bp, Homo Sapiens
gtaacggagtggtgcgccaacgtgagaggaaacccgtgcgcggctgcgctttcctgtccccaagccgttctagacgcggatgaagtgcaaaacaaacttctccatagaggagttgttgcaaagttccagtttataccaaacagtaatcagattccattggaagctaaagattttgagagccttttgtactatatgcaactaacttgatttcaagcttgggaaccttttaaaaaaaacattaaaagcaaaatgaaaaatgctttctgaaagcagctcctttttgaagggtgtgatgcttggaagcattttctgtgctttgatcactatgctaggacacattaggattggtcatggaaatagaatgcaccaccatgagcatcatcacctacaagctcctaacaaagaagatatcttgaaaatttcagaggatgagcgcatggagctcagtaagagctttcgagtatactgtattatccttgtaaaacccaaagatgtgagtctttgggctgcagtaaaggagacttggaccaaacactgtgacaaagcagagttcttcagttctgaaaatgttaaagtgtttgagtcaattaatatggacacaaatgacatgtggttaatgatgagaaaagcttacaaatacgcctttgataagtatagagaccaatacaactggttcttccttgcacgccccactacgtttgctatcattgaaaacctaaagtattttttgttaaaaaaggatccatcacagcctttctatctaggccacactataaaatctggagaccttgaatatgtgggtatggaaggaggaattgtcttaagtgtagaatcaatgaaaagacttaacagccttctcaatatcccagaaaagtgtcctgaacagggagggatgatttggaagatatctgaagataaacagctagcagtttgcctgaaatatgctggagtatttgcagaaaatgcagaagatgctgatggaaaagatgtatttaataccaaatctgttgggctttctattaaagaggcaatgacttatcaccccaaccaggtagtagaaggctgttgttcagatatggctgttacttttaatggactgactccaaatcagatgcatgtgatgatgtatggggtataccgccttagggcatttgggcatattttcaatgatgcattggttttcttacctccaaatggttctgacaatgactgagaagtggtagaaaagcgtgaatatgatctttgtataggacgtgtgttgtcattatttgtagtagtaactacatatccaatacagctgtatgtttctttttcttttctaatttggtggcactggtataaccacacattaaagtcagtagtacatttttaaatgagggtggtttttttctttaaaacacatgaacattgtaaatgtgttggaaagaagtgttttaagaataataattttgcaaataaactattaataaatattatatgtgataaattctaa

SEQ ID NO: 2728 - DNA, 600 bp, Homo Sapiens
  misc_feature (18)..(18): n is a, c, g, or t
  misc_feature (46)..(46): n is a, c, g, or t
  misc_feature (63)..(63): n is a, c, g, or t
  misc_feature (462)..(462): n is a, c, g, or t
  misc_feature (539)..(539): n is a, c, g, or t
  misc_feature (560)..(560): n is a, c, g, or t
  misc_feature (575)..(575): n is a, c, g, or t
  misc_feature (592)..(592): n is a, c, g, or t
  misc_feature (598)..(598): n is a, c, g, or t
agagatgggggtctcacnatgttgcccaggctggtctcaaactccngggctcaagcgatcctntggcctcggctcccaaagtgcatgagccaccatgcctggcctgtttagttttgtttcaagttgaaatacctttcttgtgttttctaattagaaaagtaatatctactcattgtaaaaactcaaacagtgcagaaatgtagaaagtagaaagtgtaagtccctggttgtcccttctgcctgagacaaccactgctcacagtttgatgtatatccttccagagactctcaaatttaagcaaataatttttattaccatgtctttttatttgaagaccgtacatttgcctccaaagttcaacacaagttcaactggaccatatccttccatgacctgaatagatgctatcctttatcacgatgttcaattggcctttgaaagagagtagtccaggtatattnctgatcaaaatttggcatttttgatgatactactctacacagatcagactcatgtgcagaatcgtgcctggagaganaggtttggttaagacggaganttctggaaacattcnaattgcaaatgggaaantggaancc

SEQ ID NO: 2729 - DNA, 2620 bp, Homo Sapiens
aattctttcatttcagagttgagcaaactgtgtctcaaggaggtgtgcgctgcaggtagctgatgtggccaggatttgaacccacattttatattctttgccattagattccatttttcttatctcttatttctcagcgccaggtctctttttgtttctgggcctctttcttccttggcctcctgcctccctgtcttcccatgttcttgtatctgctgctgcctgtgtttttctcattgtgtctctgcctagctccctctgcccaggtttctatgtgtctctttctgtcagaactgtcttctatttcttctcagtccccttctctgcatttgttacatcatctcttcatcttaatgtattaggctggggctgttttgggactccagagagttactttttaactagctacatctgtcttcaggtgcctggctttctggcctgaggtggaagcagaggccagcctctctccgtcatccctatctcccctgggcttacatcatggcggggctttgaaaatctccctctgtggcttcttggagccgcatagatgggtgatcagagctggctctggaaccaggctgctccaggagtaaggagcccagtctttgcatgcagtgttgaaaaaggtaatgtccctcttgtgctgagcgagcacctggcacacagcagggacccaggcagtggggctgttaggttccttatctctcctgagccttgggcttccgctatccttgggacgtctggtcttctggcttccccggttcttcctgccgccctggatgcggtgacctgccagcacctgccgcagccttcgtccgggagtcgccccatctctccacgcaatcggccctgtgccccttgctgctgcagccgggcaccatgtcgacctcgtccttgaggcgccagatgaagaacatcgtccacaactactcagaggcggagatcaaggttcgagaggccacgagcaatgacccctggggcccatccagctccctcatgtcagagattgccgacctcacctacaacgttgtcgccttctcggagatcatgagcatgatctggaagcggctcaatgaccatggcaagaactggcgtcacgtttacaaggccatgacgctgatggagtacctcatcaagaccggctcggagcgcgtgtcgcagcagtgcaaggagaacatgtacgccgtgcagacgctgaaggacttccagtacgtggaccgcgacggcaaggaccagggcgtgaacgtgcgtgagaaagctaagcagctggtggccctgctgcgcgacgaggaccggctgcgggaagagcgggcgcacgcgctcaagaccaaggaaaagctggcacagaccgccacggcctcatcagcagctgtgggctcaggcccccctcccgaggcggagcaggcgtggccgcagagcagcggggaggaggagctgcagctccagctggccctggccatgagcaaggaggaggccgaccaggaggagcggatccgtcgcggggatgacctgcggctgcagatggcaatcgaggagagcaagagggagactgggggcaaggaggagtcgtccctcatggaccttgctgacgtcttcacggccccagctcctgccccgaccacagacccctgggggggcccagcacccatggctgctgccgtccccacggctgcccccacctcggacccctggggcggcccccctgtccctccagctgctgatccctggggaggtccagcccccacgccggcctctggggacccctggaggcctgctgcccctgcaggaccctcagttgacccttggggtgggaccccagcccctgcagctggggaggggcccacgcctgatccatggggaagttccgatggtggggtcccggtcagtgggccctcagcctccgatccctggacaccggccccggccttctcagatccctggggagggtcacctgccaagcccagcaccaatggcacaacagcagccgggggattcgacacggagcccgacgagttctctgactttgaccgactccgcacggcactgccgacctccgggagcagcgcaggagagctggagctgctggcaggagaggtgccggcccgaagccctggggcgtttgacatgagtggggtcaggggatctctggctgaggctgtgggcagccccccacctgcagccacaccaactcccacgccccccacccggaagacgccggagtcattcctggggcccaatgcagccctcgtcgacctggactcgctggtgagccggccgggccccacgccgcctggagccaaggcctccaaccccttcctgccaggcggaggcccagccactggcccttccgtcaccaaccccttccagcccgcgcctcccgcgacgctcaccctgaaccagctccgtctcagtcctgtgcctcccgtccctggagcgccacccacgtacatctctccccttggcgggggccctggcctgccccccatgatgcccccgggccccccggcccccaacactaatcccttcctcctataatccagggcggaagggggcctggctccatccggctgccccattccggctccctgggagatcagtgttgtgagtgcatgtgaaatgg

SEQ ID NO: 2730 - DNA, 1908 bp, Homo Sapiens
gggacgtcagcggacggggcgctcgcgggccggggctgtatggggctcccgcgcgggtcgttcttctgggtgctgctcctgctcacggctgcctgctcggggctcctctttgccctgtacttctcggcggtgcagcggtacccggggccagcggccggagccagggacaccacatcatttgaagcattctttcaatccaaggcatcgaattcttggacaggaaagggccaggcctgccgacacctgcttcacctggccattcagcggcacccccacttccgtggcctgttcaatctctccattccagtgctgctgtggggggacctcttcaccccagcgctctgggaccgcctgagccaacacaaagccccgtatggctggcgggggctctctcaccaagtcatcgcctccaccctgagccttctgaacggctcagagagtgccaagctgtttgccccgcccagggacacccctccaaagtgtatccggtgtgccgtggtgggcaacggaggcattctgaatgggtcccgccagggtcccaacatcgatgcccatgactatgtattcagactcaatggagctgtgatcaaaggcttcgagcgcgatgtgggcaccaagacttccttctatggtttcactgtgaacacgatgaagaactccctcgtctcctactggaatctgggcttcacctccgtgccacaaggacaggacctgcagtatatcttcatcccctcagacatccgcgactatgtgatgctgagatcggccattctgggcgtgcctgtccctgagggcctagataaaggggacaggccgcacgcctattttggaccagaagcctctgccagtaaattcaagctgctacatccggacttcatcagctacctgacagaaaggttcttgaaatcaaagttgattaacacacattttggagacctatatatgcctagtaccggggctctcatgctgctgacagctttgcatacctgtgaccaggtcagtgcctatggattcatcacaagcaactactggaaattttccgaccactatttcgaacgaaaaatgaagccattgatattttatgcaaaccacgatctgtccctggaagctgccctgtggagggacctgcacaaggccggcatccttcagctgtaccagcgctgaccccaatgcactgagcgctttgcttcttcaagagttgcggccctgatcctctcaagtggccaaaagcttttttaacttttcaatcttcaccttcccttgccaacagagggcactggggtgaattcaagattttcatcgaggtctgttcaatataggacaccccagcttgtccttggctcatccaagaactcttctgtatctaaaacaatacatctcaatcttggccaagggaaaatggactgctttgctggattggcactgagcaactttaggaaatgtcggtggagtgttcagcaagatcagacagcagtccaggtcaaaggcaaacacacacgctccagcccaaatcctcctggtggcacatcctaccccagatgctaaagtgattcaaggactccaggacacctcttaagagcctttctaagaacatgataggcttacttctgctccataataaagtgggagaaaaaagccagaatataacttaagactagataactgcgtacatgatggaccattttttttttttttggctgggtagagaaatcatataaaacgcaggctgtttagcatggagatgactctcagaacactgggagggtctggcacttgatgggggttagttgcttggcagcctgcctgccactgagggaagtcccattagagatgtatcaccaccttgtcaccaacaggatgatgtcaccaacaggatgatgtcaccaggtaataaaccttcatcctcac

SEQ ID NO: 2731 - DNA, 372 bp, Homo Sapiens
ggctcggtacctgcatattgcaggccaggcatctgctattgggcgctgacaggggcgggttattagggctgaggatgggaggatgctcaggatattggggtcagggtggcattatgcccagctcaagccgggccgggctgactcagcatcctgccccagccagcttccatccctgacacctctgcactcccttgggcagagatgggagatggcgccggtgttgcccctggtgctgcccctgcagccccgcatccgcctggcacaagggctctggctcctctcctggctgctggcgctggctggtggcgtcatcctcctctgtagtgggcacctcctggtccagctaaggcaccttggccttgccatatgcaa

SEQ ID NO: 2732 - DNA, 553 bp, Homo Sapiens
acggggctgtacgagctggtgtggcgggtgctgcacgcgctgctctgtctgcaccgcacgctcacctcctggctccgcgttcggttcggcacctggaactggatctggcggcgctgctgccgcgccgctctgccgcggtcctagcgccgctcggcttcacgctccgcaagcccccggcagtcggcaggaaccgccgtcaccaccggcacccgcgcggggggtcgtgcctggcagccgcacaccaccggatgcgctggcgcgcggacggtcgttccttggagaagctgcctgtgcatatgggcctggtgatcaccgaggtggagcaggaacccagcttctcggacatcgcgagcctcgtggtgtggtgtatggccgtgggcatctcctacattagcgtctacgaccaccaaggtattttcaaaagaaataattccagattgatggatgaaattttaaaacaacagcaagaacttctgggcctagattgttcaaaatactcaccagaattttcaaatagtaatgacaaagatgatcaagttttaaattgccattt

SEQ ID NO: 2733 - DNA, 434 bp, Homo Sapiens
tttttttttttttttttggagctgcatgggtatttcattgaaagttcacagacacaagggctctgagcggggtcacatcgtggaggaggcagggtcggggagcacagagtgagtcctcccaacctgggacaattttgcataagcccttcctgctaggtgtcaggtccaaggggccccaggagcctgggaaggggcacgtgagggcagggacacagacgctggaagccagggtgcagcagcgaggggagaagcccccaggccccagacacaggcagggtggaggccaagaggcggagggggtggactgagggccaagctcactgcccccttgctgtactcagcttctgatggccttgctgcccagttcacagctcaagggggccccaggacaagaagccctgccctgccccaacctcatgggattctgcgtttca

SEQ ID NO: 2734 - DNA, 206 bp, Homo Sapiens
gcagagaggaaggtttaatgagccctgtccagggcccttcagtggggagcctccttcttcttgcccttctccttcttgcccttctccttcttcttcactttgggcttcttggccttgcccgggatgctctcgtgctgcttggagccagcagcgtgggacttcacatccgtgtccgaatcgctggagctgctgctggagtcggaaga

SEQ ID NO: 2735 - DNA, 3186 bp, Homo Sapiens
  misc_feature (2083)..(2083): n is a, c, g, or t
  misc_feature (2098)..(2098): n is a, c, g, or t
ggatccccggcatctgagacgtggggctcagcaagggagagatgccgggaggaagggccagagggtctgtctcaagcccaggcctgactggccccagtacccacggtgctcccaaaagcctcagcccagcccaggaccaccctcctcggaaccggccctgccctgccctgggcctgttgttgtctgttcatcagccacgttggcagcggcggcaggaggctgggcccagggctgacctccatctgtgccccggctcccactcaccttcagcctagccagggcaggggcaaagcaagtctgtgggcccctccacaccactcaggtgggtgctgcccagcacaggcgaacggcaaaacgtgctgggctgaacagtggatgggggccccaaagaggttgggttcttgcgcgaggcggtgggttgttcagagacccgttcttccagggaaagaaattccttcctgtgagtataaagagggtgaaggcggggactggcttccaactcaacgggcggcagaccaagaacctgctttgaggccctgggtgctggggcccagccccaaagagttcacgattttggggagactggagccgggacacctagagcaatagttacaaagtggccgggatggcgctgcccccaacgtagcaggaggggcctggagagtgggggaaggaatcccacggggagggcttctggggccctggagggcgggaggcagggctggtggagaccaggagggctcagtctctccctgcacaacgcagggtggagttgctgcctccacagcccgggccttctgcccacagggctccccaggcaacttcgagggccgggtcctcacagtcctcactctgtccagtgctcacctcactgctgccccagctgccctccctgcctcggagtggcctctgcctctgcctctgcctcacacaccccatcagcccacagccaccccgagcccttgcagctcaaggaccttctgcatccccggcagcaaccctgagcccagagccaggagagtaggaccagcacctgcccttcctacctcccctgccctggacacccacgggcacccacagggcaccgggcacaggctgcaactctattgagggaactatggggggaatgcagggacaaagacacaggatggtgatggatggtggggggtggggggcggggggtagcgggtggcaggtcagagacaaagtgacccaggaacggacggcagcgagagaacaagacccacagagacagagaagtgaaagtgggagagatggaggcacagcagcaggaacagcagggccaggaggccactgggccccgttgcggagggcagacctctgcctggcggggggcagcaggggcagcgcccagcgacagccaggctggtgggcgtgggccaggcagggtggggcaggtgcccgtcctgggctgacgcttgcacagagccctgcagaatgccgctggctggcggactgcccacccccgcccagcccgtgcctataaggccttggcaatgcaggggcccgcactgctcccagacgacatcagagatgaggacagcattgctgctccttgcaaccctggctgtggctacagggccaggtgaggggctgggccaaggggacgggcgggtgggcggwtctggcctgtgtggtcaccaaatactaggagcctggagctgacgacatctaggcacagagaaccccgacactgtgggtgctagactcttcaaatttaaaacaacatggagcccgaatcttaacgagtgtcagatttacaatgtttcagaatctgaggatcttagaactgactcctggagtcacggaccctgagagagtggagcagggggttgtcttgagatgcttctcactgggagagcggccatctagtccctgccaccagcccctcccggtccccaggtctcccccagcacagcccaggacagcccaaaggccaccaagcccttcctgtcataggctcagagcagccaagctggctgcccccggggccttagctccgtcaggccctcagaaacatagccatctcctccagggacatcccctggggtggggacaaganccagtgtcctcttgncagtcgcagagctccctgagaccttggaggaaaggcttgcaacacaccctagacaggggcagggcaggacacctcttccaagccggcccaggctggaatacatgtcccctgaggctgcactcagggcacatgccctgccaggacccagagcccgggtttgggggcctagggcaagggcagcagggcctctgtccaggaggggtctctgcaggtgggggagcaggccctgctaagtcaccaggaggcctctgttgggcccgctgagccggactccctccccgccagcccttaccctgcgctgccacgtgtgcaccagctccagcaactgcaagcattctgtggtctgcccggccagctctcgcttctgcaagaccacgaacacaggtgggtagcatctgtccaggtgtccctggggctggggacatccctggctgttgtgggtgttggctggaaggttgtggggaggtggggggcagaggtggctgcctggcctgaccacactcacctgtgcccagtggagcctctgagggggaatctggtgaagaaggactgtgcggagtcgtgcacacccagctacaccctgcaaggccaggtcagcagcggcaccagctccacccagtgctgccaggaggacctgtgcaatgagaagctgcacaacgctgcacccacccgcaccgccctcgcccacagtgccctcagcctggggctggccctgagcctcctggccgtcatcttagcccccagcctgtgaccttccccccagggaaggcccctcatgcctttccttccctttctctggggattccacacctctcttccccagccggcaacgggggtgccaggagccccaggctgagggcttccccgaaagtctgggaccaggtccaggtgggcatggaatgctgatgacttggagcaggccccacagaccccacagaggatgaagccaccccacagaggatgcagcccccagctgcatggaaggtggaggacagaagccctgtggatccccggatttcacactccttctgttttgttgccgtttattttgtactcaaatctctacatggagataaatgatttaaacc

SEQ ID NO: 2736 - DNA, 276 bp, Homo Sapiens
gcacatggacctatctcaactcatgagatagtaatgatgatgcttttttataagtaagaaaataaaggctcagagaaggtaaggagcttggcttaggtcacacagtgagttgactaggactcgggttttggttctgagaagaaatcacttgctgggaagatggggatcagaaacagagagtccatggtgatgtgaaggtaggggacttctggagccaggatatgtgtgaacccacatgggtgtggtaaggagcaggggggaagtccatcctgaagt

SEQ ID NO: 2737 - DNA, 4700 bp, Homo Sapiens
atggccccctcggcctgggccatttgctggctgctagggggcctcctgctccatgggggtagctctggccccagccccggccccagtgtgccccgcctgcggctctcctaccgagacctcctgtctgccaaccgctctgccatctttctgggcccccagggctccctgaacctccaggccatgtacctagatgagtaccgagaccgcctctttctgggtggcctggacgccctctactctctgcggctggaccaggcatggccagatccccgggaggtcctgtggccaccgcagccaggacagagggaggagtgtgttcgaaagggaagagatcctttgacagagtgcgccaacttcgtgcgggtgctacagcctcacaaccggacccacctgctagcctgtggcactggggccttccagcccacctgtgccctcatcacagttggccaccgtggggagcatgtgctccacctggagcctggcagtgtggaaagtggccgggggcggtgccctcacgagcccagccgtccctttgccagcaccttcatagacggggagctgtacacgggtctcactgctgacttcctggggcgagaggccatgatcttccgaagtggaggtcctcggccagctctgcgttccgactctgaccagagtctcttgcacgacccccggtttgtgatggccgcccggatccctgagaactctgaccaggacaatgacaaggtgtacttcttcttctcggagacggtcccctcgcccgatggtggctcgaaccatgtcactgtcagccgcgtgggccgcgtctgcgtgaatgatgctgggggccagcgggtgctggtgaacaaatggagcactttcctcaaggccaggctggtctgctcggtgcccggccctggtggtgccgagacccactttgaccagctagaggatgtgttcctgctgtggcccaaggccgggaagagcctcgaggtgtacgcgctgttcagcaccgtcagtgccgtgttccagggcttcgccgtctgtgtgtaccacatggcagacatctgggaggttttcaacgggccctttgcccaccgagatgggcctcagcaccagtgggggccctatgggggcaaggtgcccttccctcgccctggcgtgtgccccagcaagatgaccgcacagccaggacggccttttggcagcaccaaggactacccagatgaggtgctgcagtttgcccgagcccaccccctcatgttctggcctgtgcggcctcgacatggccgccctgtccttgtcaagacccacctggcccagcagctacaccagatcgtggtggaccgcgtggaggcagaggatgggacctacgatgtcattttcctggggactgactcagggtctgtgctcaaagtcatcgctctccaggcagggggctcagctgaacctgaggaagtggttctggaggagctccaggtgtttaaggtgccaacacctatcaccgaaatggagatctctgtcaaaaggcaaatgctatacgtgggctctcggctgggtgtggcccagctgcggctgcaccaatgtgagacttacggcactgcctgtgcagagtgctgcctggcccgggacccatactgtgcctgggatggtgcctcctgtacccactaccgccccagccttggcaagcgccggttccgccggcaggacatccggcacggcaaccctgccctgcagtgcctgggccagagccaggaagaagaggcagtgggacttgtggcagccaccatggtctacggcacggagcacaatagcaccttcctggagtgcctgcccaagtctccccaggctgctgtgcgctggctcttgcagaggccaggggatgaggggcctgaccaggtgaagacggacgagcgagtcttgcacacggagcgggggctgctgttccgcaggcttagccgtttcgatgcgggcacctacacctgcaccactctggagcatggcttctcccagactgtggtccgcctggctctggtggtgattgtggcctcacagctggacaacctgttccctccggagccaaagccagaggagcccccagcccggggaggcctggcttccaccccacccaaggcctggtacaaggacatcctgcagctcattggcttcgccaacctgccccgggtggatgagtactgtgagcgcgtgtggtgcaggggcaccacggaatgctcaggctgcttccggagccggagccggggcaagcaggccaggggcaagagctgggcagggctggagctaggcaagaagatgaagagccgggtgcatgccgagcacaatcggacgccccgggaggtggaggccacgtagaagggggcagaggaggggtggtcaggatgggctggggggcccactagcagcccccagcatctcccacccacccagctagggcagaggggtcaggatgtctgtttgcctcttagagacaggtgtctctgcccccacaccgctactggggtctaatggaggggctgggttcttgaagcctgttccctgcccttctctgtgctcttagacccagctggagccagcaccctctggctgctggcagccccaagggatctgccatttgttctcagagatggcctggcttccgcaacacatttccgggtgtgcccagaggcaagagggttgggtggttctttcccagcctacagaacaatggccattctgagtgaccctcagagtgggtgtgtgggtgcgtctagggggtatcccggtagggggcctgcagggagccagagggtggaaatggcctctaagctagcaccccgtaagaagagcctacctgaccgacttggggagggaacacagaggtgttgggaaggtggagcaacaatgcacctcccctcctgtcgcgccgtgatatcttggtggctccctgccactgcccaccgcctcttctccatctgagaatcacggagaggtgtagataatctagaggcatagactgctagagcccccagggatctggggtggtcagggctcaggcttcactttgtaaaccaggtgggggcatctcacagcctgacttcccttccccaggccagggttgctgggatgcctgcccctcctgagaggaccccctccccattgtcaggctctccatgtccacgagcggggaggggtgggttctggggcattgttgtcccttgtgtctgtggactagagatagggtgggggagctggggaagggtgcaggcgggaagagtgggctgtctttcccagggtgatgcaagcatgccgcagccctggaggctgggaatgtggaggctctgtgagccctgcagccctcagaatcagggccagggatgcagaagattgagaggatatggagatggatagagggcaggagacccttaggatagattgtgggacccaggcaggaacaggtgtccacaagaactcaggatggcatcagttagctcagaagccacctggaagacccagtgtttccatctctggaatctctgttttatgctaaatggatttaggaagactgtttttcttttaagggggaaacaaggtagagaaaaggacgaagaagtgtaagtcccgctgattctcgggggtaaggctcggatggcaaggacgcgttctgcctgggcatgtaggggaggtgtttttgccatcaccagtttctcaggctggggagcacagaggggaggaggaggactaaatgaaaagttgttcccagcctgcacatgaacacattcatgacacacaaaactggctggaaggagataagagcactgggtttgagattccctccattaaaacaaccaagacaaagaaaggaggggaaaaaaagataaaaagcaagccagggttccctgccctattgaaactcaaacccagactgccttgggttttatctttcccttacccctggcacctccagagaactgggacctgaaatagtccctccgttctcccctttgaccatgtaataaatgaaccagaagcactgagattaacctatcaacgccctgagaagccttccagcctgcggtgctgtctgctgggaggtcagctggtcaaggcagaggaggagaggaggaaaggatgggggctgaagagcagaagggaggggagacagaggggattaaagaggggaggagagagtgcagagctccaggaaagggtatcagagctgcagccagctctgccctctaccctagggaggccagaaagacacaaacagccctccgggcctttacgctggactctggcttggcaggctccaggcagggtcctctgggaagttactctagaaaacgaagggaggaggagcacaagatcctcagcaacgaacacctgcacttagaaaaagtggacagcttctgccaaccacaccctacccatggtactgtatgctattaactcctggaaacgccccgtaaatgcgagttgtttttgtatttgtgtgttgagatgggccttgtggtttctctgtactcagagcacatttcttgtaattactattgttatttttattgtcatgactgcccctgagctctggtgagaaaagctgaatttacaaggaaagggatgaagttaatatttgcatcacataattatatcattactgtgtatctgtgtattgtactaaatggactgatgctgcgcacatgagctgaaaatgaagagccctcccatcc

SEQ ID NO: 2738 - DNA, 2528 bp, Homo Sapiens
cccaaaggtaggctcaggctccgacggtggcccgcgggggtcacgaggcttcgtagtggaggaacgggtttggcgtgtgggacgcagctgcctctgtactggggagtcacggagtggccgggctccagggacatggcggcggcctctgcggtgtcggtgctgctggtggcggcggagaggaaccggtggcatcgtctcccgagcctgctcctgccgccgaggacatgggtgtggaggcaaagaaccatgaagtacacaacagccacaggaagaaacattaccaaggtcctcattgcaaacagaggagaaattgcctgcagggtgatgcgcacagccaaaaaactgggtgtacagactgtggcggtttatagtgaggctgacagaaattccatgcatgtagatatggcagatgaagcatattccatcggccccgctccctcccagcagagctacctatctatggagaaaatcattcaagtggccaagacctctgctgcacaggctatccatccaggatgcggttttctttcagaaaacatggaatttgctgaactttgtaagcaagaaggaattatttttataggccctcctccatctgcaattagagacatgggtataaagagcacatccaaatccataatggctgctgctggagtacctgttgtggagggttatcatggtgaggaccaatcagaccagtgcctgaaggaacacgccaggagaattggctatcctgtcatgattaaagccgtccggggtggaggaggaaaaggaatgaggattgttagatcagaacaagaatttcaagaacagttagagtcagcacggagagaagctaagaagtctttcaatgatgatgctatgctgatcgagaagtttgtagacacaccgaggcatgtagaagtccaggtgtttggtgatcaccatggcaatgctgtgtacttgtttgaaagagactgtagtgtgcagaggcgacatcagaagatcattgaggaggccccagcgcctggtattaaatctgaagtaagaaaaaagctgggagaagctgcagtcagagctgctaaagctgtaaattatgttggagcagggactgtggagtttattatggactcaaaacataatttctgtttcatggagatgaatacaaggctgcaagtggaacatcctgttactgagatgatcacaggaactgacttggtggagtggcagcttagaattgcagcaggagagaagattcctttgagccaggaagaaataactctgcagggccatgccttcgaagctagaatatatgcagaagatcctagcaataacttcatgcctgtggcaggcccattagtgcacctctctactcctcgagcagacccttccaccaggattgaaactggagtacggcaaggagacgaagtttccgtgcattatgaccccatgattgcgaagctggtcgtgtgggcagcagatcgccaggcggcattgacaaaactgaggtacagccttcgtcagtacaatattgttggactgcacaccaacattgacttcttactcaacctgtctggccacccagagtttgaagctgggaacgtgcacactgatttcatccctcaacaccacaaacagttgttgctcagtcggaaggctgcagccaaagagtctttatgccaggcagccctgggtctcatcctcaaggagaaagccatgaccgacactttcactcttcaggcacatgatcaattctctccattttcgtctagcagtggaagaagactgaatatctcgtataccagaaacatgactcttaaagatggtaaaaacaatgtagccatagctgtaacgtataaccatgatgggtcttatagcatgcagattgaagataaaactttccaagtccttggtaatctttacagcgagggagactgcacttacctgaaatgttctgttaatggagttgctagtaaagcgaagctgattatcctggaaaacactatttacctattttccaaggaaggaagtattgagattgacattccagtccccaaatacttatcttctgtgagctcacaagaaactcagggcggccccttagctcctatgactggaaccattgaaaaggtgtttgtcaaagctggagacaaagtgaaagcgggagattccctcatggttatgatcgccatgaagatggagcataccataaagtctccaaaggatggcacagtaaagaaagtgttctacagagaaggtgctcaggccaacagacacactcctttagtcgagtttgaggaggaagaatcagacaaaagggaatcggaataaactccagcaaggaaatggccagttaagtagtgtcttctctctccaccaaaaagaggaagtgcctccagcttttctgggggtctcataaagagcagttttactaaatgattgtatgcttatgctgaacacctttcatattggagaatcatgcatttgggtcactaattatctcaaaatatttcatactaataaagttgaattattttttattggaagcc

SEQ ID NO: 2739 - DNA, 654 bp, Homo Sapiens
cacagcacagccaggatggggcctggagaaggccggccgcagcagattgagaccctgggagtcagggatggacaccaggcctgcagggacttcttggaactagcagagatacacagtcggaaatggcagcgggcactgcagtatgagcaggagcagcgcgtgcacttggaggaaaccattgagcagctggcgaagcagcacaacagcctcgagcgggccttccacagtgcccctggccggccggccaacccctccaagagcttcattgagggaagcctcttgactcccaaaggagaggacagtgaggaagatgaagataccgagtactttgatgccatggaagactccacatccttcatcaccgtgatcaccgaggccaaggaagacagcagaaaagctgaaggtagcaccgggacaagttccgtggactggagctcagcagacaatgtactagatggtgcctcgctcgtgcccaagggttcatccaaagtcaagaggcgagtccgcattcccaacaagcccaactacagccttaacctctggagcatcatgaagaactgcatcggccgggagctctccaggatccccatgccggtgaacttcaatgagcccctgtccatgctccagcggctgacagaggacctggagtaacac

SEQ ID NO: 2740 - DNA, 389 bp, Homo Sapiens
tgctgctgggcggccgcggggcagcggagtggcgccggcactccggtccccgccgctccccgtccccgctgctcctatcccctgccgcgtccccggcggagcgggcattgcgccacccgcggcgcctggccgggaccgtgtgggccgtgaggatgaggacggctgggagacgcgaggggaccgcaaggcccggaagcccctggtggagaagaagcggcgcgcgcggatcaacgagagcctgcaggagctgcggctgctgctggcgggcgccgaggtgcaggccaagctggagaacgccgaagtgctggagctgacggtgcggcgggtccagggtgtgctgcggggccgggcgcgcgagcgcgagcagctgcaggcggaagcgagcgatg

SEQ ID NO: 2741 - DNA, 379 bp, Homo Sapiens
  misc_feature (150)..(150): n is a, c, g, or t
tgaagctataacatctttatctgaagcaactgaaaaagttggtttttgcaagtatggctgtcggaaacaccaaagcagcacttacttaggttcttctcagggatggatacaggctggctaggagaaggtgggagagggggctggctgggngacttttacagccagccacagagatggccctggacacaatcttgctaagggacctcagaccacagccccagctccagcctcccggcaggcgagcagcgcccagcacgactccaaccagccaccgtccctcccccacaccctccccagtgctgtcagcgtcctcacttcttctggaaggccaggagcagcctttgggttccagggatgttctcctccggctcccaactgt

SEQ ID NO: 2742 - DNA, 174 bp, Homo Sapiens
cggccgcctgatgtgcgagcagcccgcgacgaggcagtgcacgctcagacgccccgctcctcccgccagcgcgcggcctcgctcctcctagaggacgctctctgcgcgggccctcggaggaggcggcggcggggcgagctgcagcgccgggacaggaggtttgtccccgcccgc

SEQ ID NO: 2743 - DNA, 406 bp, Homo Sapiens
gcgtcgacattgaccctgtggacctgctttctgtcggtgccttccctgccctcagtctcaggagcctgagactggcttctagatgggtttggacaatggatagcactggcaggaggagagtagagttgctgtgtttattttcctggtttcctcctgcaagatcatgtcatgttggctctcccagagggcatggctcatatcatggggccctctttgtctttccaagcctgtagatgatagcagcttcaggaggttgcactatcttttgactgtgcccacacccttcacaccttgtaaatagtccctttcttaaactctccttaaattacccagtttgggggtgctatctgtttcctgctgggatcctgatggctgtgttgcccaaacctaaatgtcagtcatgctt

SEQ ID NO: 2744 - DNA, 2163 bp, Homo Sapiens
ctaatcttccagttgccccctattgactttaaaccaaagctttgattcatgaccactgggatccagccagcgggggatttcttttcctgatggactgtacccaggatctcacatttgcttaagcagctcccacaattgggttcttataaaaggacacagaagagacaagctcagttttctctgaaggagaaggactgcacttagaactgcattttggtgacctctgaaattcagtacggcagtgaatgagcttctgaccttgaggtgaacttaacaaaattatttttggaaaaatcgttgtgggaaccattaaaagaactccaggaaacatgaattctggaatcttacaggtctttcagggggaactcatctgccccctgtgcatgaactacttcatagacccggtcaccatagactgtgggcacagcttttgcaggccttgtttctacctcaactggcaagacatcccatttcttgtccagtgctctgaatgcacaaagtcaaccgagcagataaacctcaaaaccaacattcatttgaagaagatggcttctcttgccagaaaagtcagtctctggctattcctgagctctgaggagcaaatgtgtggcactcacagggagacaaagaagatattctgtgaagtggacaggagcctgctctgtttgctgtgctccagctctcaggagcaccggtatcacagacaccgtcccattgagtgggctgctgaggaacaccgggagaagcttttacagaaaatgcagtctttgtgggaaaaagcttgtgaaaatcacagaaacctgaatgtggaaaccaccagaaccagatgctggaaggattatgtgaatttaaggctagaagcaattagagctgagtatcagaagatgcctgcatttcatcatgaagaagaaaaacataatttggagatgctgaaaaagaaggggaaagaaatttttcatcgacttcatttaagtaaagccaaaatggctcataggatggagattttaagaggaatgtatgaggagctgaacgaaatgtgccataaaccagatgtggagctacttcaggcttttggagacatattacacaggagtgagtccgtgctgctgcacatgccccagcctctgaatccagagctcagtgcagggcccatcactggactgagggacaggctcaaccaattccgagtgcatattactctgcatcatgaagaagccaacaatgatatctttctgtatgaaattttgagaagcatgtgtattggatgtgaccatcaagatgtaccctatttcactgcaacacctagaagttttcttgcatggggtgttcagactttcacctcgggcaaatattactgggaggtccatgtaggggactcctggaattgggcttttggtgtctgtaatatgtatcggaaagagaagaatcagaatgagaagatagatggaaaggcgggactctttcttcttgggtgtgttaagaatgacattcaatgcagtctctttaccacctccccacttatgctgcaatatatcccaaaacctaccagccgagtaggattattcctggattgtgaggctaagactgtgagctttgttgatgttaatcaaagctccctaatatacaccatccctaattgctctttctcacctcctctcaggcctatcttttgctgtattcacttctgaccagagacaaatcagaaatgtgttcacatgctgtgggaacccctttatcccaggaagtcctcttccttgtgccttaacatacaggacaaataggctctattttatgtcttgaattgccttctaatgttatcaaaactcatttattgtgttactattaaatatgctgaaaacgctaaaagtatacgtattggttctttattaaataatttttgaaaaatcattattcatgatcatggcatacagtatattctcttttttttctttatttatgactgtcactgagtgaaataatagatgacagacatgtctgaatgaagtaaaaatcaatggaagacagtcgggatcttttgcttcatgcaaaaaacttggagtgaagtctcaatgataactgggaaatgtttttcttcctctttatctaactatattacacttatccatcaggtttcattgtattaatctatcctttgaggtaata

SEQ ID NO: 2745 - DNA, 2008 bp, Homo Sapiens
ccgggcaggtctcctgtggtttccagccgcgtgagtccagggacaagaccaacagctatggggtctttcagctcacacatgacagagtttccacgaaaacgcaaaggaagtgattcagacccatcccagtcaggaatcatgacagaaaaagtggtggaaaagctttctcagaatccccttacctatcttctttcaacaaggatagaaatatcagcctccagtggcagcagagaagctcatagccaaactgaaaagcggaggagagataaaatgaataacctgattgaagaactgtctgcaatgatccctcagtgcaaccccatggcgcgtaaactggacaaacttacagttttaagaatggctgttcaacacttgagatctttaaaaggcttgacaaattcttatgtgggaagtaattatagaccatcatttcttcaggataatgagctcagacatttaatccttaagactgcagaaggcttcttatttgtggttggatgtgaaagaggaaaaattctcttcgtttctaagtcagtctccaaaatacttaattatgatcaggctagtttgactggacaaagcttatttgacttcttacatccaaaagatgttgccaaagtaaaggaacaactttcttcttttgatatttcaccaagagaaaagctaatagataccaaaactggtttgcaagttcacagtaatctccacgctggaaggacacgtgtgtattttggctcaagacgatcttttttctgtcggataaagagttgtaaaatctctgtcaaagaagagcatggatgcttacccaactcaaagaagaaagagcacagaaaattctatactatccattgcactggttacttgagaagctggcctccaaatattgttggaatggaagaagaaaggaacagtaagaaagacaacagtaattttacctgccttgtggccattggaagattacagccatatattgttccacagaacagtggagagattaatgtgaaaccaactgaatttataacccggtttgcagtgaatggaaaatttgtctatgtagatcaaagggcaacagcgattttaggatatctgcctcaggaacttttgggaacttcttgttatgaatattttcatcaagatgaccacaataatttgactgacaagcacaaagcagttctacagagtaaggagaaaatacttacagattcctacaaattcagagcaaaagatggctcttttgtaactttaaaaagccaatggtttagtttcacaaatccttggacaaaagaactggaatatattgtatctgtcaacactttagttttgggacatagtgagcctggagaagcatcatttttaccttgtagctctcaatcatcagaagaatcctctagacagtcctgtatgagtgtacctggaatgtctactggaacagtacttggtgctggtagtattggaacagatattgcaaatgaaattctggatttacagaggttacagtcttcttcataccttgatgattcgagtccaacaggtttaatgaaagatactcatactgtaaactgcaggagtatgtcaaataaggagttgtttccaccaagtccttctgaaatgggggagctagaggctaccaggcaaaaccagagtactgttgctgtccacagccatgagccactcctcagtgatggtgcacagttggatttcgatgccctatgtgacaatgatgacacagccatggctgcatttatgaattacttagaagcagaggggggcctgggagaccctggggacttcagtgacatccagtggaccctctagcctttgatttttaactccaaaaatgagaaacattttaaagcatttcatttacgaaaaactgtctcaactattcttaagtactgtattgatattgtttgtatcttttattaatgttctaccactttttatagatttgcatcttcctgtcacagggatgtggggaaatacgttttcctcccaagagaaccaagtt

SEQ ID NO: 2746 - DNA, 625 bp, Homo Sapiens
  misc_feature (479)..(479): n is a, c, g, or t
  misc_feature (532)..(532): n is a, c, g, or t
  misc_feature (582)..(582): n is a, c, g, or t
  misc_feature (600)..(600): n is a, c, g, or t
  misc_feature (616)..(616): n is a, c, g, or t
tttttttttttttttttttcagttggaatcatttttaatatttaaatacaaaaagtgagcactgacttctctttttttaaacacacacacaggtctaacagccaaaatgtgcagaggaaatgagctcctgctgtcttccatagtccccattctgtggctgaagctgcagcctgcctccctcctctcatacatagggattcatagtggccactttacactacaggtgtaatgcattttgtctgtttcacattgtgtgcatgtcctgccccaacaactccattctttaaaaaaaaaaaaaaaaaacagtcgttaatggtcaggggcacatccctcccactggcatcggttcctaccccacaaggggaaagtgagatcttccagttaggagcaatttggtgaaaggagtcgggtgaccagagctggaataaccatctgcatggctgcactctggtatcgagtggagacagagtaaggatatntggagggcacattgcagttgagtcttcctgagacatgtggggatattctcccnccaggttagaagatcatgtgccaagttaaaaaaaaaaaaatccattttcngggtcaacctgattcaanttccctggaagtcaancatacattg

SEQ ID NO: 2747 - DNA, 7334 bp, Homo Sapiens
gatccagtcatgtttatggtggctttctatggatgcctcctggcagaagtgattccagtgcctatagaggtacctcttaccagaaaggatgctggaggtcagcagattggcttcttgctaggaagctgtggtattgccttagctcttaccagtgaagtttgtctaaaaggactgccaaaaacccagaatggagaaattgtacagtttaaaggttggccccggctcaaatgggttgtaacagattccaagtacctttcaaagccaccgaaagactggcagccacacatctcacctgctgggacagaaccggcatacattgagtataaaacaagcaaagaagggagtgtaatgggagttacagtatcccggcttgcaatgttgtctcactgccaagctctgtcgcaggcctgcaattattctgaaggggaaacaatagtaaatgtcttagactttaagaaggatgctgggctgtggcacggcatgtttgcgaatgtaatgaataagatgcacacaatcagcgtaccctactctgttatgaaaacctgtcctctctcttgggtccaaagagtacatgctcacaaagccaaggtagctttagtaaaatgtcgggacttgcactgggctatgatggcacatcgggaccaaagagacgtgagcttgagttccctccgaatgttaattgtgactgatggagctaacccctggtccgtgtcatcctgtgatgccttcctgagtctgttccaaagtcatggactgaagcctgaggccatctgtccgtgcgccacgtctgctgaagccatgactgtagcaatccgcaggcctggagttccaggagcccctttgccaggaagagccattctctcaatgaatggattgagctatggggtaatacgggtcaatactgaagataaaaattcagcactgacggtccaggatgtagggcatgtaatgcctggtgggatgatgtgcattgtgaaaccagatggacctccccagctctgcaaaacagatgaaattggagaaatctgtgttagctccagaactggaggcatgatgtactttgggcttgctggtgtgacaaaaaatacatttgaggtaattccagtgaattctgcaggctctcctgttggggatgtgccattcatccgatcaggattgctggggtttgtagggccgggtagtttggtgttcgtggttgggaaaatggatggcttactgatggttagtggtcgaagacataatgctgatgacattgttgctactggattggctgtagaatcaataaagactgtttatagaggaagaattgctgtgttttctgtgtctgtattttatgatgagcgcattgtggtggttgcggagcaaagacctgatgcttctgaggaagatagtttccagtggatgagccgcgtgctgcaggcgatcgatagcattcatcaagtgggggtttattgtcttgctctggtgccagccaatacattgccaaaaactccactaggaggaatccatatatctcagacgaaacaactctttctggagggatcactgcatccttgcaacatcctcatgtgcccccatacatgtgtgacaaacttgccaaagccccggcaaaaacaaccaggtgtaggccctgcttccgtgatggttgggaatctggttgctggaaaacgtatagcacaagctgctggaagggatctgggacaaatagaagagaatgatttggtgagaaagcaccagtttctggcagagatcctacagtggcgagcccaggcgactcctgaccatgtactcttcatgctgttaaatgccaagggaaccactgtatgcacagccagctgccttcagcttcataagcgagcagagaggattgcatctgttcttggtgataagggacatctaaatgcaggagataatgtggtgttgctctatccacctggcattgagttaatcgccgccttctatggctgcctgtatgcgggctgtatacctgtgaccgtcagacctccacatgctcagaacctcacggccacgctgcccactgtccgaatgattgttgatgtcagcaaagcagcctgtattctcaccagtcagaccctaatgaggctactgaggtcccgagaggcagcagcagctgtggatgtgaaaacctggccaaccatcattgacacagatgatttacccaggaaaaggttacctcagctgtataaaccgcccactcctgagatgttggcatatcttgattttagtgtctccacaactggcatgcttacaggagtgaagatgtcccactctgcagtgaacgctctgtgtcgagccatcaagctccagtgtgagttgtactcttctcggcagatcgccatctgccttgacccttactgtggacttggcttcgcgctctggtgtctctgcagtgtctattcaggccaccagtctgtcttaattcctcctatggagttagagaacaaccttttcctctggctctccacagtcaaccagtacaaaataagggacactttctgctcctattcagtgatggagctctgcaccaaaggtcttgggaaccaagtggaagtgctaaagaccagagggatcaacctctcctgcgtccggacctgtgtggtggtggcggaggagaggccccgcgttgcactccagcagtccttctctaagctcttcaaagacatcgggctgtccccgcgggctgtcagcaccacttttggatcaagagtcaatgtagcaatatgtttacagggaacctcagggcctgatccgactactgtgtatgtggatctgaaatcactaagacatgacagggttcgtctcgtggaacgtggcgcccctcagagtttgcttctctcagagtctggaaagattttacctggagtgaaagtggttattgttaatcctgagaccaaagggccggttggagactctcaccttggagagatttgggtgaacagtccccatacagccagcggctactacaccatctatgatagcgagactcttcaagctgatcatttcaacactcgcctcagctttggagatgcagctcagacactctgggctcggacaggataccttggttttgtccgccggaccgagctcacagcggccactggagagcgtcatgatgcattgtatgtggtgggagcgctggatgaaacactggagctgagaggattacgataccacccaatcgatattgagacctcggtgtcccggatccacagaagcattgctgaatgtgccgtgttcacatggaccaacttgcttgtggtggttgtggaactgtgcggctctgaacaggaagccctagatctggtcccattagtgaccaacgtggtcctggaagagcattacctcatcgttggcgtcgtggttgtggtggacccaggtgtcatcccgatcaactccagaggagagaagcagaggatgcacctccgtgatagcttcctagctgaccagttagaccccatctacgtggcttataacatgtaaccagccttgtggggactgcagtgggccattctgaagaatcacaaagacagaagacctctggctacgagcaggcttcaaacgatgtgaaataagctgagatggctacatgatattcttcatctcatcctgtgggattctgcaatcataaaacacaggaaaggggaattctgtgatggcaaatgaaaaaaatgttaacatttggtagacatgtgctttgacatagcgtgagcagcacattactaaagcaattacatgcatgttgcatttttttcatctgttgtacatagttgtatttttatctaatgccattttagaattttctaagggaatttaatgaattcacatgaaaggggtagtctgagtgacacagttccccactccgtactgtattttgccattctgccgtagctagatgttctgtggggtttgttaacatggaactactcagctttctttcagtcaacccataagcaaatcagataacccactgactatgagaattactttatatagataattcttgactgtaaaacattttgaccagtgttttacaacatgtacataagaatacacataattcaactagagatttgaagaattggcttgtatagttataacaaccacagtagaaacatttctactttgagagaatttcaatattctcttaatgttgtgtaattgattaggtaactaaaaagcgcaaattgttggcaggttttgctgcacattgttctatgtctttgttggctggtgtattttataaactaaagctgcctatgtttctttttaaagctcgcattcccagaatcagcttaggcttctatgaattcagcctgtttctaaaagctgaaaatctcagtttaaaaatcaaaatgttaacacaaagctaagattcatcagagcccaccctattctaaggaaccacaataacttactctggccccagtgttaaaacgatctttcagatttagagtgactatgtaagaatttaggatttcctcttttccaggcacattgtaaactgtgtctacagtttatccatataacttctcttctgaaaactgaggagtgtcctctgttcttccagttcacgagggcagggggtttaaaacaagaatgataggccaggaaggcagtggggatccaccatcacatggaactgtaaggccatataactacacaaaactgaccaatctgggttgccaaagcagccaggcttatgctgaaaccggggaagtctgacatatgcaggaaactcttttgaaataactttggtgcccaggccaagtagaatgagatgagactgagtttggcctctggctcggtttcctttctttggtctgatacttcatgtatttgaatatagttaaatcgtattatttttttcttaacagaaatatttttaaaaatgaaaaagtactcaaaagtgagaagagttaacttgtcaaagcagaatggttctctttgacccactctggtctattgtgtaaatatttatttagactattttaataatacatattatttaccccactgtaacatcatgtaaactaagtatgtttttaaacaatttttaagacttgtaattaccctgaaaataaggtttataatgcaaagaccagctcctttgcggtggcagtgctctagggctgccattacacggtcttgtgatgtgactaaaagccactttgtgactcccttcatgtaatcctcttttcctccccactcctccacagagggcagagctcaggacatttgccagttccagatctctttttcagcattttgatggaattaatttacacgtaatgagggaagtcctaggatggatagaaaaaaagcacttacattggggcacacaggaaatcccagtgtctagcaatggtttggtttgcagagaacacagcctgatacttaattttcttaaaactatttttaatgatccactaaacaaagcaggggatcctgaagctgatataaataagtctagctctataatccccaagttctaaaagttatggttagatgctattctgtgggttgctttgataattcttactaacacagattagggtataggcatctagagatgcactgtccactgtaaatactataatgagagccacatctgtaatttaaatgtttctagtaaccacatttttttaaaagtaaaaagaaacccatggtattgatttaaatatattttatttaacccaatagctcaaaaacactatcatttcaacataggatcaatataaaaattattaatgagttattttactttttttcatattaggcctttgaaattcagtgtgtattaaacacatctcaattcaaaccatcaccatatttcaagtctttgtagccaaatgtgactagtggctaccatattagacagtgcagatctatactcattccttcaaatacattactctgttaatctcaaagtgtggccaactcccatttacttagaggctgattatctagttttgtagttcctcaggcctctaatttattttttgctttctgctttattgatcttttgcatgtcccccaaagccagaatctgctcatggaggaaggaaggctaagaactgtccttgaggaacttcatcagtaactctggtaaagcatcctgtggagggagaggagagcccagtcatttgcttagatggtgtttgtgggatcacctgcagatttaaagcctactctgccacagactcgagtaagaaaatgttctcttgatgacacagtgctcctactctatccacattaagtagcacttttgtggtagaactgattcttaaggcaggcctgaaaggccattactaatagaaacacagcctttccaatcctctggaacatattctgtctgggtttttaatgtctgtggaaaaaaactaaacaagtctctgtctcagttaagagaaatctattggtctgaaggtttctgaacctctttctggttctcagcagaagtaactgaagtagatcaggaaggggctgcctcaggaaaattcctagatcctaggaattcagtgagaccctgggaaggaccagcatgctaatcagtgtcagtgaatccacagtctttacttcctgcctcataaagggccaggtctccccagtaccaagtcctttcctcatgaagttgtgttgcctcaggctgtttagggaccattgcctgtcttggtcacatgagtctgtctccttactttagtccctgggcaatccttgcttaatgcttttgttgactcaacgagggcccgaggccttaggttttctattaaggtctctgccccaggcatggtgctctatatcttggccaaataaattactttccttgaatatccaggaatcttttagtctaaagcaatgaggagttatcacctcatcctcaaactccaacaagatctatgccttagtgttgtttttgttgtctgctttgatgtaaaagcaagagtatttggagcaagaagctgcaatgcgccaaatacacaataggccttttctttatcattcatacgacatttctggtttaggtgtatgtagttgggccatgttacttgtccagaggaagagactaaagatataagaataattttttagtcctaaatgctgttttgtttactttctgtcaagatatttacccgtgtcaaattcaaactacagtactgtgtaattatgtataaagtttttttatttatttgaagttagactagatatacgtttttaaatttaacatctggctggacagtgttctattaactcattgaatgtgtttcctttgtcttgtgttaataaatattgatgcctgattctgtttaaaaaac

SEQ ID NO: 2748 - DNA, 4661 bp, Homo Sapiens
catcaataaccttttcagatgaaagcttatagttattcttcaataaaaattcattgactaagaagtttagagctctcttttcaagaggtttgattggctcctgaatttcaggacttgatttgtaatttttattgaagaataactataagcttacatcaataaccttttcagatgaaaacgatgatcaggattttgaattatgggatgatgtaggattaaacattccaaaacctccagacttattgcaactctaccgggattttggaaatcatcaagtaactggaaaagatcttgtagatgtggccagtggagtagaagaagatgaattagaggcccttacaccaattataagcaaccttcctccaactcttgaaactccccagcctgcagagaactccatgttagtacagaaattagaagataaaattagtttgttaaatagtgagaaatggtcattgatggagcaaatcagaagacttaaaagtgaaatggacttcctcaaaaatgaacactttgccatcccagcagtttgtgactctgttcagcctcctttggatcagttgccccacaaagactctgaggacagtggacagcatccagatgtaaatagttcagacaagggaaaaaacacagacatccatctttcaatatcagatgaagctgattccactattcctaaagagaattccccaaattcattccccaggagagaaagagaaggaatgccaccttcttctctatcaagtaaaaagacagttcattttgataaacctaataggaaattgtctcctgcattccatcaagcactactctctttttgtcgaatgtcagcagatagtcgtttaggatacgaggtgtctcgtattgcagacagtgaaaaaagcgttatgttaatgctgggacgctgcctgccacacattgttcccaatgtgctattggcaaagagagaggagttgatccccctcatattgtgtacagcatgtctacatcctgagcctaaagagcgagatcagcttctccacatacttttcaatttgatcaagaggccagatgatgagcaaaggcaaatgatactgacaggttgtgtggcatttgcgcgtcatgttggaccaacacgtgtagaagctgaacttttaccacagtgttgggaacagattaatcacaaatacccagaaagacgactgcttgtggcagaatcctgtggagcactggcaccttaccttcctaaagaaatccgtagctccttggttctttcaatgttgcaacaaatgttaatggaagataaggcagatttggtaagagaagctgttatcaaaagccttggtatcattatgggatacattgatgatccagacaaatatcatcagggttttgaattgttgctgtcagccttgggtgatccctcagaaagagtagttagtgctacacatcaagtatttttaccagcttacgctgcgtggactacagaacttggaaatttacagtctcatcttatacttacactactgaacaagattgaaaaacttctcagggaaggagaacatggactggatgaacacaaactccacatgtatctttctgccttgcagtccttgatcccatctctctttgcattagtgctacagaatgcacctttctccagcaaagccaagcttcatggtgaagtgccacagatagaagtgactaggtttcctcggcctatgtcgcctcttcaagatgtgtccactattatcggaagtcgtgagcaattggcagtgctgctgcaactttatgactaccagctagaacaagagggtacaacaggctgggagagtttactgtgggttgtcaatcaattgttgccacaacttatagaaatagttggcaaaattaatgttacttcaactgcctgtgtccatgaattctccagatttttctggcgcctttgccggacatttggcaaaatttttacaaacactaaggtaaaacctcagttccaggagattttaagactatctgaagaaaacattgattcctcagcaggaaatggggtcctcactaaagctacagttcccatttatgcaacaggagtccttacgtgttatattcagataaaggagtatttgcatatacataatgagatatcttgggaatgggacccaagtctaaacacaaaatgtgtttcatatacacattatacacatagcctgaaggaagaagaccgaaaactgttagttggattcttagaagatgtaatgacgctgctttcattatctcatgctcctcttgatagcctgaaggcttcttttgtggaattgggtgcaaacccagcctaccatgagttactattaactgttttgtggtatggtgttgtccatacttcagcactcgtgaggtgtactgctgctagaatgtttgagctgttggtgaagggggtgaatgaaactctggtagctcagagggttgttcctgctctcattactctctccagtgaccctgaaatctctgtcaggattgccacaattccagcctttggcactattatggaaacagtaattcaaagagagttgctggaaagagtgaaaatgcagttggcttctttcctggaagatcctcagtatcaagaccaacattctttgcatacagagatcataaaaacatttggtagagttggccctaacgcagaacccaggttccgagatgagtttgttataccacatttgcataagttagccttggtgaacaacttacagattgtggattctaaaagactggacattgctacgcatctttttgaagcctacagtgcactttcctgttgtttcatttcagaggatttaatggttaatcactttttacctggtctcagatgtttacggactgacatggaacatctctctccagagcatgaggttattttaagttccatgataaaagaatgtgaacaaaaagttgaaaacaagaccgtccaagagcctcaaggctcaatgtcaattgctgcaagcttagtgagtgaagatacaaagaccaagtttttgaacaaaatgggccagttgacaacatcaggtgccatgttggccaatgtatttcagagaaagaagtagaagcaggaaagaagcccccagtaaacactaagatggacctcaagccgactggttccttgtacttgaagtacttgccttttttgtttcctcagttttatgttcttgcattataattttatcctaacctccaaagatatttgcactgcttttaattactgctgtatatttgttgattttggagttacaactgtggtgatagaaaattgagttgatggtctgtaccaagtcccttgtctatgttcttgtctttcagaataatttttatataaatatatatatagtgaagaagttttttttaatttttggatgggatattcgcaaatatctgtattatacactaagctattacaatggtacttaaaataatgtaaatttgaagtcattgttataaaataataaagtggagattacttaagtatttaaattatgaaagaataatgcagactttttattgtttcttaactgactagaaagagccaccagcattactctgtgccttttggacatcagtttgtgtgttctgtaggaattgtgtgcattccattcacacagtatttctttaggatgctgtgatgatttgaattacaaatcctacagtcaatagctaaagacgaaaccttcatttcagaactctcatgaatattctttaagtgctatttaaacctccccagcacttagatgcatataatggacttacctgaggaaagacagcacataggcatggggagaggtaaccaaggtgaattttacaaactggtgtatagtagatttaaatgctcaaaaataaatgtaactgagaagagttaataattgtgagatttttcccaaattgagatacagaagaaaatatagtttgaatctgaaatttaacacttatttatgtaaaacattttatttaagatattttctaatgattttaattttagagagtaccttttcattctgtgtgttacagagaagtactgaaaagttaaggacacttgggggctacttttttccctctaaactaaaaaagacattggctgaattataactagttagttatcacctcgtcccttaaagtcagtgacctcctgtgtttgatgtatattacatagagtcttaagtcagtgtacagttccactggaatttgacagttgtctctacagtcatgcaactcgaagtagaaaagagtgctggacataggaagggggtgcttggtttgaggggttaatgtgaggcctttttgaaaaatgaatattttgataaaaagaattcttgttttagcacagttgatgcacataagtgattctcatatttgttgtataaactggtttaatacatttggaacatagttggattacattcatttcctgggaaagctagcttaccatacattcaagtttataaaacaatttgccataggcaaagccatttaaaaagttcattctgaaattatttcatttacctacagtgaaataattgtgaactaagtagtctttctgaaaactgttgggttctaggcattcctgagaaattgaaagtggctacctttcatgtcaaaaatgttgatctattataaataaaatgtttttgcat

SEQ ID NO: 2749 - DNA, 520 bp, Homo Sapiens
  misc_feature (506)..(506): n is a, c, g, or t
tttaggtttgtaagggaggcttccttcatgatatgaccgtaggatgctgtcaccctgacccggttcctgatgcgtgatgtttctaagtgctcagtaagtaccaatctactcccacactgcagtatgtgggcgtgtgatgctgaacagagagagcacgatgtgatcatagttaattccctctggtatcaaaaaaataaaaacctatcaaaaaataaaaacgtatgttgctctcgtctgcgtcatcattgttgttcagacttttacataacatgccgaatgagaagactcagaaagccaggcagaatcatgaagaaataactgaatagttctgattccaagaactgtgtgaccttatgacatttaaagagtgaggaagagaaagcaacaggttccaagtattatagcaagcataccagctttacttcaggaaggctcgtggagaagctgtgatcacattgtggttatttagatacttccaaatggaaatggcattgataactattcanctgtgatatgaagg

SEQ ID NO: 2750 - DNA, 534 bp, Homo Sapiens
tttttttttttttttttaaaattcaatgttttttatttctcatctttataagaacaaatttatgaacattgttttggggacagtgactactagaatagaataacaaaaggtaagtatccagaatacttaaggaatttacaaaaaaaaaaaaaaaaagtgaaaaacccaaagaaaggggcagacgttatgaacataaaattcacaaacaggaagcaggagtggccacaagccacggacacgctcagtcccaccagtgctcagagacacacaaactcagacaggtgaaatggacaaaaattcagatcatcagtgggtaacataacgcccaagtgggtgactttgccctgggggacatttggcaatgtgtggagtcatttctggtttcatagctgggggtgtcgttgtcatctgtgggtggagaccacggatgcggctcaacaccccacagtgcacaagacgtcccacggtgcacaggatgccccacagcaaagagccgtttaggcaaaaccatcagcagtgccagacaaagatgcc

SEQ ID NO: 2751 - DNA, 340 bp, Homo Sapiens
tttttttttttttttttttttaaagttacagatagtatttaattggttactgtgatatcatagaaataccaataatcataaaagtaaaaaaagctgctaagttgtacataatgtttccggaatactaagaagttgctgctggtctacagagccctgggaggtgacggtgaggatggtcccaagaggcgcacgtagggtcactggccccggtcctggtgcctcttgcctttgcctttcttcttcttgtcctctggccgtggctccagggcgcagacacaggcggacccgctagcgatggccttgggcaggtcgacgcccctgctccacttgtcggcctcgc

SEQ ID NO: 2752 - DNA, 1510 bp, Homo Sapiens
  misc_feature (125)..(125): n is a, c, g, or t
  misc_feature (127)..(127): n is a, c, g, or t
  misc_feature (139)..(139): n is a, c, g, or t
  misc_feature (229)..(229): n is a, c, g, or t
gcgagcgccgggaacgagcaccaccagggcttggcagcggacggctttagaagagcctagctgctgcgcgcgtcggagaggctcctgggaaactcccacggcccagggactttcgaaagcagagngnggagccctcgancgcgctagtctgcgagtgagcgctcagcccggcacctgttcctccagcgccgccgccttcccacccctcggacccgcgccgctcgcgcgncgcccgttcctgcgatgaatccggccctaggcaaccagacggacgtggcgggcctgttcctggccaacagcagcgaggcgctggagcgagccgtgcgctgctgcacccaggcgtccgtggtgaccgacgacggcttcgcggagggaggcccggacgagcgtagcctgtacataatgcgcgtggtgcagatcgcggtcatgtgcgtgctctcactcaccgtggtcttcggcatcttcttcctcggctgcaatctgctcatcaagtccgagggcatgatcaacttcctcgtgaaggaccggaggccgtctaaggaggtggaggcggtggtcgtggggccctactgacccgccctctgcccccgcggcaaccgctcccacgcctgcccactttgctagcccggctgtgcccctcactatcagagactgggcgaagcaaacctgtcggagtcaattatttctctcgacttcggcctttcggaaagaagcgaccggtttctccctcgccctctgaaagtcctcatgcctggcagtcggaggagagcgcccagactctgaactcagcagaaagtggcaagaagagggcgattagggcgcagaactttggaagctgctacttacttggaatgcggggagaccgacggtgcgaaggcccttgttctcacccgcaggtgggccaagctctgggggcaggtggagagggcgggcaggggagagacccagcggcactgatcgccttgtgaccggaagagtgacctgttaaaagccacgcagcagactcatggggtctcacaaatccgtgtccgggtgcgctcccactcttctcctgctccccccctgccctggaggggaggggcgataaatacctttgattgtaacgtgccgttttaagaggttttgtgtttgtttgcttgaatacaaatgtttgataagtctttttctgccccagtggcctgtttgcctgcctgaggagttacagttttgtcattgtgggaagaaggggtggggggagggggagcctgcgaatttgaacggggtgagttgtttcttttagtgcatttcccactgggtcttttgggaggcgtctagcgttcctgctggccctgggacaaagacccagaatagaactcgtagctcgtgactgcacggtttacgccacaaaagtgctcttgacatccgtgacaccgttttgactttttgtttttttcttatttaacatttccttaataaatgcaacatttaagcgttaaaaaaaaaaaaaaaaaaaaaaaaaaaaaaaaaaaaa

SEQ ID NO: 2753 - DNA, 499 bp, Homo Sapiens
aggcgacactatagaagagctatgacgtcgcatgcacgcgtacgtaagcttggatcctctagagcggccgctctactactactaaattcgcggacgcgtcgactgccactggaaatgttgaaatgaaaaatattcagccgttggtctttgaaatttcctgtgatgtgtttcaatctagatgcaaagaacatggaaaaatcaaagtgctcgagtggtttaaatatgttttgggtattcctgtttatagactataatacttttccaattaaaatcctcagttgtcacgcagaagaaggttaagctgtatttgattgccagttttactgaaaatgcttagtattttacagtatcaccaaatatattttgtttagccaaggtcgacgcggccgcgaatttagtagtagtagtcgacccgggaattccggaccggtacctgcaggcgtaccagctttccctatagtgagtcgtattagagcttggcgtaatcatggtcatagct

SEQ ID NO: 2754 - DNA, 300 bp, Homo Sapiens
ggaaccccctccccaacaaccgcgcacaacgtggcgactctgggagctgaactggagtggagctcgaagtggctggggcgggcaaagactcccgcttcactctgggacacaactgggacggcgcttcaacctctgcctgcaggcgtgcttctcgcgcgcaccagcaagctctctatccacctcgcctgggcctttgcagcgccctgccgcccaggctccagcgcctctactaccctagccccttctcaacacgcggctctgccttcttcaccagtaccactgcactgccgaaaataagcc

SEQ ID NO: 2755 - DNA, 394 bp, Homo Sapiens
tttttttttttttttttttttttttttttttttttttttttttttttgctgcaaagagcacctttattcacagcaaaaggacgtcaccatagcaacaacacttcaattccctgagaacttttcccttatcattcgctttcctagctatgtctttgcaaagagaaaaacaacaagaaacacagcccacgggacaggtgagccatgctgggcccagcggggaaggtggcagctacacaggaggagggcagggatgggaggttccagatgctggaacgcataaatacacagagtgccagacagtcccacttcagctttaaaaacaaagatgaccccgagtttggcttctgttttttctgatccacagaaaagataagataaaataagaccctccccc

SEQ ID NO: 2756 - DNA, 3194 bp, Homo Sapiens
aattcggcacgaggccacagtggttatctccaagctcagggcaatcccttccctcctgtcaactgctccccgactcctgcatggctcattccttcacaatgtcgccgtggctgccaggttcctcaggcagccccggtgggaggctgcggaccatggggactcagctctgcatggcaggcaaaggcccagggacactgacgtgcatgagcttgctgctttccagggtgtgttgagggtggccatgggtgacacgtcccactctttctgatggaggggcatccgtggtgccttctagcttagaaccattttccaggtctcttctgggttgggcaggactgatattcccaagctggtggaagatggttcatcttcctcgcacagtgtgggttcttggagttcatccagggaaggcggcgcctctttctcaggtcctgcaggctggtctctgagcctgcccccacgaactttctggattccaaggtgggatggtgatccctttgacccctgcagaccctctacttgcgaaaagcagcattgaagcagccttttcccattgtagaagggacagggagtcagatcccctcaaccccccggcttcagggaccccagaagtgccttccaagcttcccccaagatccacatcacccacgaccctgccactgtttttgctgtgttcaccacatctctgatcctgaagtgaattctggaactatggaccacattagactgggcagagattcgcccaacccctagcactccggctctgggctttcggccagaagttaattaacctcagagccaggagcctggggctggggcctccctcccaggccctgtttagctgtttagctggttgtgttttaagcaagttcttgcccaatcatgcatcctgctagaaaaggaaatgaagcaacgttcccagccaccgcaggcagttgtcggcgactttctgatgtaagcacctgggctccgacttgaggggggcccttcaagacccaatgtccatttcccaatccttgtcatcggcagggcccagggatgtgacaatttttgctaatggaggagtcacttctttttttttttttctttttgagatggtctggctctgtcacccaggctggagtgcagtggtgcaatcatagctcaccacagcctcaaactaggggtcacttctaagggatgctgggggttgggcggaaggggtgaggaggtaggattgagtaacttgctgtcactgcttgtactttgtagacagcctgagagtggcaggaccttatgtgaatggggggatggactgtgatcagtgccggggagtctctgaagctggggtccccacctccaggggcttctgctcagaggttacgtgtgcagtttgaagatgtacatcttgacctccggtttagaggcactttctgcccatcagattccaaactctaggggcgcagcaccttttctttgctcccaaacaccaaccaacaccccttcacaggaccagcactgttaggatggctaagtggatgttttatgttcccacgtccctgatctgtttcagaggttgtgtctgctctcccagcccctgaagccaaaatgacttcctgcagctttcatgagctcagcctttccctggggtatgtgtgagggggaaagcctggttcaagtttagatttatttctagggagccctggtttcttcataccagaggctacccttagaactttggagtggggtatctttttttcatttgtttttttgatacagagtctcgctctattgcccaggctggagtgcggtggcacaatctcagcttactgcaacctccacctccagggttcaagcgattctcctgcctcagcctcccgagtagctggcattacaggcacctgccaccacacccggctaaattttgtatttttagtagagaaggggtttcaccatgttggtgaggcttgtctcaaactgacttcaagtgatccacttgcttcggcctcccaaagtgctgggattacaggcgtgagccatcacgcccagccgagggtatcttttataccaacaaattagatgactgaggtgtaatggacaaatcctatgcacaaagtgagggtatctgaatatgtgggcgggagtcaaaaatttttagctactttaacactaaagtcaaactaaagtagcttcaaaaagacttctcaagatgcagtatggcctgctgaggtttttttgttttttttttttttaagacagagagtcgctcgtcgcccaggccgcagtgcagtagcatgatctcagctcactgcaacctccacctcccgggttcaagcgattctcctgtctcagcctcctaagtagctgggactacaggcacctgccaccacgcccatctaagttttgcatttttagtagcgacggtttcaccttgttggccaggctggttttgttggccaattgtctctaaactgctgtcaaaaaaaggaatggatcagattgtcttgaatagggcagagctaacctgtaatcacctgtgtgatgagaaacagctttgactgcattttactcctgacctggcctaagctttctgtttacataagatttttcaagaattcaacttcaagtagcagccgagagagctgcctcaggattctctcaaaaactgggaataatatgggaacatttgtttcttctaaaaataaggcaaatgttacattgaatgatttggggggtgaggtttaattggaaatggtctctggggactgaaaactgatgtttttgcagattacctcagggaaacggaggtttgttgagtttacagacacattaaaccaaaggccgtgggaaaacccctctccagctccaggggattggtcaggaccacccactaaccagtgccttccttcttaacattcacttttagcagcttgtgtttattttacatgggcagttttgatgggaaattgccatgaccacaggggtttggagttctgctttttttttttcttcttctttttcgggggactgggggactcctcccaagatcacattttagcatctttctctcctactccatttagaaaaataagtaacaggtgaaatgtggtctcagtgttaacgggataattctgctaccggctcctccctgatgattctgaaatacactactgaacgagctctggctggtcctttcaaaaaaaaaaaaaaaaaaa

SEQ ID NO: 2757 - DNA, 570 bp, Homo Sapiens
cctgttactgtccattctttgagtacttcactggcactaccttccatgaatgcttgtactgttttgtccacacagttatcaaagtgctgcaaaaccaggataatttcattgttgctcttattaggaactattgcacgtaccgcatttatcttctctttcatgttctcaaaagctcctccctgggccagtacggtattggactgcaaatcaaaaatgaatcctgatgaatccttctggttctgtttcctggacattgtcgtttcttcgatctcaaaaaatatacaagaaaagtatccttttgccttgtctgggttttgagtgtaggtatctctgatttaaaagttggcaacggaagtgtgcagttggaagcaaaaaatacgaaatcctgctgttcgaaattctgctcactagctgttaatctcctttccttttcttgtatcaacttcttgtcaggaagtatcattgcagacattcatgtctccttttccagggagattatatgaggtaaccagggtagtcacattcatagagacagaaagtagaatattggtagccagcagctagcccagg

SEQ ID NO: 2758 - DNA, 324 bp, Homo Sapiens
  misc_feature (171)..(171): n is a, c, g, or t
  misc_feature (260)..(260): n is a, c, g, or t
  misc_feature (296)..(296): n is a, c, g, or t
  misc_feature (304)..(305): n is a, c, g, or t
  misc_feature (313)..(313): n is a, c, g, or t
agccttcacccaccgctccacttttgtcttgcatcacaggagccacactggagaaaaaccctttgtgtgcaaagagtgtggcaaagcctttcgagataggccaggtttcattcgacactacatcatccacacgggagagaagccctatgagtgcattgagtgtgggaaggncttcaaccgccggtcatacctcacgtggcaccaacagattcacactggagtgaaccctttgaatgcaacgagtgtggaaaagctttttncggagagtgcagacctcattcaacactacatttatncacacttnnggagaagncctataagtgc

SEQ ID NO: 2759 - DNA, 484 bp, Homo Sapiens
cactttgtacaagaaagctgggtacgcgtaagcttgggcccctcgagggatactctagagcggccgccctttttttttttttttctttggtccagagaagtttaatgatgactgaagctttgaccacattgaggaaactcaaggtttctaaaatagattctttgataactagttaggcctgagtgtccaaagaacttttgatattactgctatattagtagagtttatttgcggtatgaattctttgatgtctaataagagctgaacttactcggaaaggccttccacactcatcacattcatagggtttttcacctgtgtggattctctgatgctgaataagacctgtgcgcccactgaagtctttcccacattctttacatttatagggttttactcccgtgtgtactctatgatgtccaatgagatgtgagcgctgaatgaaggcttttccacactcatcacatttatagggcttctcttc

SEQ ID NO: 2760 - DNA, 447 bp, Homo Sapiens
  misc_feature (56)..(56): n is a, c, g, or t
  misc_feature (342)..(342): n is a, c, g, or t
  misc_feature (446)..(446): n is a, c, g, or t
aaggaatgaccctcttcatcgcctctcctaattcagtcctcacaacagtccttttncaaatgggacaacaggttagaggaagtcaggcagatttccagcatcatagagagtaaaggaccagggaaggatcaggattcaaggactgcacccaggctctgcttccagcttgctgtgtgactttgggtaattttgttcccttagggaactggagctttctcatttgtaaatgcaaacaggctgttgggaggatcaaatgagatccaggggtgaaaacagcttagtttactttcaggaatttacccacgcggtatataaaggcaaaatattattatagtcaggtgnttgtagattgaggaacccatttcctccattctgcaaattgcaaacctggagggcccaaagagggacaggggcttgccagggtctccagcaggctgtgagcaagnt

SEQ ID NO: 2761 - DNA, 443 bp, Homo Sapiens
ttcttttgagatggggtctcactccattacccaggctggagtgcagtggtgcaatcacagctcactgtagcctcgacctccctgggttcaggtgatcctcccacctcagcctcccaagtagctgggactataggcatgcaccaccatgcctggctaatttcagaataatattttcatacacataaaatatgtaggattacaaagtaagctagttatatttatatacagttgtcaaaatatttttaaaatgtataacgtgatactatgtgtataggtttctttattaacatattgaataaaaagatcgagggtaggcctattaaacaatggtaaactgaagagagatgagtgtaaacaatattttaagatacctgtggcaaactgtaaagggatatgaaaaactctgtaatttctattggcactgctgatacaactgcactttg

SEQ ID NO: 2762 - DNA, 1545 bp, Homo Sapiens
ccgagggcggggccgggcccgggagcctgtggcttcaggaagaggagggcaaggtgtctggctgcgcgtttggctgcaatgagctcggcctcggggctccgcagggggcacccggcaggtggggaagaaaacatgacagaaacagatgccttctataaaagagaaatgtttgatccggcagaaaagtacaaaatggaccacaggaggagaggaattgctttaatcttcaatcatgagaggttcttttggcacttaacactgccagaaaggcggcgcacctgcgcagatagagacaatcttacccgcaggttttcagatctaggatttgaagtgaaatgctttaatgatcttaaagcagaagaactactgctcaaaattcatgaggtgtcaactgttagccacgcagatgccgattgctttgtgtgtgtcttcctgagccatggcgaaggcaatcacatttatgcatatgatgctaaaatcgaaattcagacattaactggcttgttcaaaggagacaagtgtcacagcctggttggaaaacccaagatatttatcatccaggcatgtcggggaaaccagcacgatgtgccagtcattcctttggatgtagtagataatcagacagagaagttggacaccaacataactgaggtggatgcagcctccgtttacacgctgcctgctggagctgacttcctcatgtgttactctgttgcagaaggatattattctcaccgggaaactgtgaacggctcatggtacattcaagatttgtgtgagatgttgggaaaatatggctcctccttagagttcacagaactcctcacactggtgaacaggaaagtttctcagcgccgagtggacttttgcaaagacccaagtgcaattggaaagaagcaggttccctgttttgcctcaatgctaactaaaaagctgcatttctttccaaaatctaattaattaatagaggctatctaatttcacactctgtattgaaaatggctttctcagccaggcgtggttactcacacctgtaatcccagcactttgggagtccaaggtgggcggatcacctgaggtcgggagttcgagaccagcctgaccaacatggcagaagccccgcctctactaaaaatgcaaaaaaaaatttagctaggcatggcggcgcatgcctgcaatcccagctacttggaaggctgaggcaggagaatcacttgaacccaggaggtggaggctgcggtgagccgagcattgcgccattgcactccagcctgggcaacgagtgaaactccgtctcaaaaaaaaagaaaatgtctttctcttccttttatataaatatcgttagggtgaagcattatggtctaatgattcaaatgttttaaagtttaatgcctagcagagaactgccttaaaaaaaaaaagttcatgttggccatggtgaaagggtttgatatggagaaacaaaatcctcaggaaattagataaataaaaatttataagcatttgtattattttttaataaactgcagggttacacaaaaatct

SEQ ID NO: 2763 - DNA, 382 bp, Homo Sapiens
  misc_feature (26)..(26): n is a, c, g, or t
  misc_feature (236)..(236): n is a, c, g, or t
  misc_feature (275)..(275): n is a, c, g, or t
  misc_feature (307)..(307): n is a, c, g, or t
  misc_feature (328)..(328): n is a, c, g, or t
  misc_feature (341)..(341): n is a, c, g, or t
  misc_feature (346)..(346): n is a, c, g, or t
  misc_feature (367)..(367): n is a, c, g, or t
tttttttttttggcgttatattgcangaatcgctgatttattatttgattcccctcccaactccttggatcattcttctatggtctccccatggatcgaataatcattggcacatagcaaacatttcataaaaacagatacaattggcaacattatattcatacaaacctaatacacgcacacactgggcatgatgatggtgcagtccttgagcagggtttacaggcaggatcctnttcccgatgcttcacccgtggtatctgatacaaccccanttcattcagaggcgaacaccttccccacgggntcctgtgcccccacccagctntatgccatccctntcctntcactcaccagcccaccttgnttttgacccgttccc

SEQ ID NO: 2764 - DNA, 1468 bp, Homo Sapiens
gacaccgtggggggtaggtttgatgccactcaggcatttgtcggggagctcagccagttcaacatatgggaccgcgtccttcgcgcacaagaaattgtcaacatcgccaactgctccacaaacatgccgggcaacatcatcccgtgggtggacaataacgtcgatgtgttcggaggggcctccaagtggcccgtggagacgtgtgaggaggctctccttgacttgtagccgccttctcctctgtccaggaggccgggatcaggctgttgccatggaagttcagggccatagactgccccacttaaactcttgtcagtctgggctcagggttcccagagctcattccccaggaatctctaagaccagggctggggcagtgtctgtcactggcttgtttgttccctaccaatattctgttgctgtttgaagtagtgccagggtcccctgggaagatgcccccaagacacctgccccaagtgggtggatatctgccttcctgctgcaagtggaggcaggtccagcagcccctcttcagagcccctgtaaatgctatcgcagcctgagtcctgccgccttccagttccttggtgtcccgtgcaccccttctgtctgtcccctttcatgctgtgcagccgtcccgctggagtggccatgtcccttgtgcattgagtgcatccccgctggtgactaagctcgcagcaagcgctacccccgatctgcaaaagggcctctccctttgtgttctatacattgtgaatcttcccgtctgaagaacgcccagcctgcccagacaaagccccgccttccccaaagcagaggggctgtctgtgtctccagaaaggggacatcggggggggaggggggctcagaaaggagaagggctgtgatctccggtcccttcccccatcatccttccttagactgatgctttgactgaatcatcactagctatggcattaaaaggcctctcttctcatctggtgccaaaggttccgttgcagctttttacaaccatccggtgtggtttggaggatttgttttttttttttcccaacagaaaagaacagccattagaagaaggctcccattttctgatgttccgccccactgtgaagagtgtgctcgttttaaattcatgttgattcttgtaagcactggactgtcttcatcaagtatttcccctacagaactcctcaagaaaaacagagatcatttggctagagattgtctgagtgactccaagctactcactgtattggacgggagtagtaatttattttaaagataaagtgactaagtggggaaatttataaagctaaatattatatattttatttttcatacatgtttgaagtgcaaatctgtggatattccatttgtaggaccaagtcgacatgcccatcctgacattgtatgctacgagaactcttctgatgatggaatttcgattaaagtgcactgaaagatg

SEQ ID NO: 2765 - DNA, 738 bp, Homo Sapiens
  misc_feature (98)..(99): n is a, c, g, or t
  misc_feature (104)..(104): n is a, c, g, or t
  misc_feature (110)..(110): n is a, c, g, or t
  misc_feature (125)..(125): n is a, c, g, or t
  misc_feature (128)..(129): n is a, c, g, or t
  misc_feature (131)..(131): n is a, c, g, or t
  misc_feature (139)..(140): n is a, c, g, or t
  misc_feature (143)..(143): n is a, c, g, or t
  misc_feature (148)..(148): n is a, c, g, or t
  misc_feature (187)..(188): n is a, c, g, or t
  misc_feature (192)..(193): n is a, c, g, or t
  misc_feature (202)..(203): n is a, c, g, or t
  misc_feature (205)..(205): n is a, c, g, or t
  misc_feature (212)..(213): n is a, c, g, or t
  misc_feature (220)..(221): n is a, c, g, or t
  misc_feature (223)..(223): n is a, c, g, or t
  misc_feature (259)..(259): n is a, c, g, or t
  misc_feature (269)..(269): n is a, c, g, or t
  misc_feature (279)..(279): n is a, c, g, or t
  misc_feature (285)..(285): n is a, c, g, or t
  misc_feature (287)..(287): n is a, c, g, or t
  misc_feature (301)..(301): n is a, c, g, or t
  misc_feature (307)..(307): n is a, c, g, or t
  misc_feature (309)..(309): n is a, c, g, or t
  misc_feature (316)..(317): n is a, c, g, or t
  misc_feature (331)..(331): n is a, c, g, or t
  misc_feature (338)..(338): n is a, c, g, or t
  misc_feature (354)..(354): n is a, c, g, or t
  misc_feature (365)..(365): n is a, c, g, or t
  misc_feature (370)..(370): n is a, c, g, or t
  misc_feature (376)..(376): n is a, c, g, or t
  misc_feature (391)..(391): n is a, c, g, or t
  misc_feature (394)..(394): n is a, c, g, or t
  misc_feature (403)..(403): n is a, c, g, or t
  misc_feature (406)..(406): n is a, c, g, or t
  misc_feature (413)..(413): n is a, c, g, or t
  misc_feature (431)..(431): n is a, c, g, or t
  misc_feature (438)..(438): n is a, c, g, or t
  misc_feature (442)..(442): n is a, c, g, or t
  misc_feature (454)..(454): n is a, c, g, or t
  misc_feature (476)..(476): n is a, c, g, or t
  misc_feature (488)..(488): n is a, c, g, or t
  misc_feature (495)..(496): n is a, c, g, or t
  misc_feature (499)..(499): n is a, c, g, or t
  misc_feature (516)..(517): n is a, c, g, or t
  misc_feature (521)..(521): n is a, c, g, or t
  misc_feature (526)..(526): n is a, c, g, or t
  misc_feature (529)..(529): n is a, c, g, or t
  misc_feature (533)..(533): n is a, c, g, or t
  misc_feature (539)..(539): n is a, c, g, or t
  misc_feature (543)..(543): n is a, c, g, or t
  misc_feature (545)..(545): n is a, c, g, or t
  misc_feature (547)..(547): n is a, c, g, or t
  misc_feature (549)..(549): n is a, c, g, or t
  misc_feature (560)..(560): n is a, c, g, or t
  misc_feature (579)..(579): n is a, c, g, or t
  misc_feature (582)..(582): n is a, c, g, or t
  misc_feature (589)..(590): n is a, c, g, or t
  misc_feature (594)..(594): n is a, c, g, or t
  misc_feature (600)..(600): n is a, c, g, or t
  misc_feature (605)..(605): n is a, c, g, or t
  misc_feature (611)..(612): n is a, c, g, or t
  misc_feature (614)..(614): n is a, c, g, or t
  misc_feature (618)..(618): n is a, c, g, or t
  misc_feature (623)..(623): n is a, c, g, or t
  misc_feature (625)..(625): n is a, c, g, or t
  misc_feature (627)..(627): n is a, c, g, or t
  misc_feature (630)..(630): n is a, c, g, or t
  misc_feature (637)..(637): n is a, c, g, or t
  misc_feature (645)..(645): n is a, c, g, or t
  misc_feature (656)..(656): n is a, c, g, or t
  misc_feature (658)..(661): n is a, c, g, or t
  misc_feature (668)..(669): n is a, c, g, or t
  misc_feature (672)..(675): n is a, c, g, or t
  misc_feature (680)..(680): n is a, c, g, or t
  misc_feature (683)..(683): n is a, c, g, or t
  misc_feature (689)..(690): n is a, c, g, or t
  misc_feature (692)..(692): n is a, c, g, or t
  misc_feature (699)..(700): n is a, c, g, or t
  misc_feature (709)..(709): n is a, c, g, or t
  misc_feature (711)..(712): n is a, c, g, or t
  misc_feature (722)..(722): n is a, c, g, or t
  misc_feature (726)..(726): n is a, c, g, or t
  misc_feature (734)..(734): n is a, c, g, or t
  misc_feature (736)..(736): n is a, c, g, or t
  misc_feature (738)..(738): n is a, c, g, or t
gaattcggacgaggtaacatgtagcctttgctggggacaaagatgcaacaagtctctgccccatcctaggtgctgccccgtgtagggctcttcccggnncctgnctcgtnccgattcggaagagngtnngngcccggtnnccnatttngccctttagtgagtcgtattacatttcattggccgttgnnttannaacgttgtnncntgggaannccctggnntnacccaacttaatcgccttgcagcacatccccctttngacagctggntaaatagcgncgcttncnatatttttgttaanaatttngngttaaanntttttgtttaaaanaaagctncaatttttttaacccnaattagggccngaaantggggnaaaaattccctttantanattcaaaanggnattaggncccgatgataggggtttnaggtgtntgtnccaagttttggnccaaggagtccacctttttaangaaccgtcgacntcccaanntcnaaaggggcggaaaaccnntctnttaanggngggntggccnttangngnanccattaccctnattcaggctttttggggtnggnggtcctnnaatngattanatttngacccnnangggngcccncngnttnagggatnaccggggnacgcctttagntnnnntcaaagnntgnnnncttgntcntaggtnncnttgcctnncaaattttnanngtcccttttnatanccaccaancntn

SEQ ID NO: 2766 - DNA, 457 bp, Homo Sapiens
  misc_feature (381)..(381): n is a, c, g, or t
ttttcaaaaatacatgtttttatattttaccatatgttcacatttacaagaagtctttataactctatatggctgtaagttactatttcctttcattcaacctgaattcctcccttcagcatttctttgagagaaaaaataggaaaattagtgattggaggtccctataaaattttcttacatctcaagtgttcctgaaatcaggtgtttggctttatgaaattctgagtaactttttttttaacaataagagttttataaaaatggatggtgaagaactggaaaaagtccatagcagatgtactatttacaaatgactgacctaatgattatttcacatcttgaaaaaagagttacacttgctaaagagatttgaaatantaaagtttggcttagcgttacacacttcactactaacttttaacaaaatgtcaatcttttcttgacacttacatca

SEQ ID NO: 2767 - DNA, 464 bp, Homo Sapiens
tttttttttttttttttttttttattttcattctgagtttatttaacatttcatccagttgaactgaaataatacatggcctccaacactggcaagacgctgtgctaatactgaaataaaagctgccagtcagtaaacacttacaatcatcatcctttgtatcatgttaatagaaatattaataactacttagctttataagcttattgcacttcatgtggatttttttttctccagaaaaggtatttctaaaagatcggcaaggattgccaatcttggtttatttgttctttcttataaaccgtgatcaacatacagttgatagctttatataaaggcattaagagtctgaagcatcaaaaaacaacgtttaaaaagatgcagctccatgttcatcatcccttttataatctctttggggttttttttgagatggagtttcgctcttgttgccacggctggag

SEQ ID NO: 2768 - DNA, 370 bp, Homo Sapiens
  misc_feature (11)..(11): n is a, c, g, or t
  misc_feature (13)..(13): n is a, c, g, or t
  misc_feature (278)..(278): n is a, c, g, or t
  misc_feature (308)..(308): n is a, c, g, or t
  misc_feature (347)..(347): n is a, c, g, or t
  misc_feature (355)..(355): n is a, c, g, or t
gcgaccgctcngnttaaggctgtccgctctgggctccgcggcctcggcccgctcgcactccacctccgccccctcggactccctcccctctgcttctactcctcctgctccagtgcggatcgtttcgcaactgcttgccactcgtcccgtgcctggctgttttcccatttcccggccccctcttcttgagtactttaccccctgcatttggggacagggactggaaaaggggcgggtggagcgtccagtggagaagaaggaagcgaggcccgcacganggaggaggatcggcggactgtggggagganaccccacgccaccctttctggtcatctcccctcccgccncgcccttnggaaaattccctcgg

SEQ ID NO: 2769 - DNA, 880 bp, Homo Sapiens
tgagcaatcagtagaacttacacatcctaggaaatctttctttgtaagtaattctttggtctcaagtgattctcttcatgtgtctcttgatgtacatacccccaagcaagttggggggactgtgatgacaattaaatcaccttctctgaagttctggctctgcagagaccaaaccttactgacttgtacagacttgtacaagtaaagacttatacagatagatttttgttgttaacttacaatccgttttttcctctattttattttgttttttcctgggtgtgggagtcttattatacgaaaacaggataaagtgacgctgttatcaaaagttgccgtggggattcgtgatattacttctcgtgcccttccaaatccccgagggctatgatgtttactacggtgaacccggcccagggtaaacacgggcttcacctgtcctggttggttagccttgacggtgaggcaggacttccctcgctgtgaacggttcacttacgatgtgtgtgtcccatcacattttggtgcagcctgtggtttcatgtagggccctgcgatggaccttcgctttattcagttgtttctcccattgcaacggggggcgttctccacacgagtcagtgtgttgtgggtccctccctaaaagcggttgtaccccaggtgtggttctctaagtgacaggcattgcgttttggtacccccggggcttccgcgttgtaaacccgagacaactgccgtcctatttggggcccactgttgggacccggcgtggggtggaccccatttttggacgccgggatgggcgctgggtgttctccatcgacttggagagttaaggggcgcctctaataggcagcggcgcgtcggggcccaccccatg

SEQ ID NO: 2770 - DNA, 439 bp, Homo Sapiens
  misc_feature (388)..(388): n is a, c, g, or t
ttataggtggggtcttgcgaagttacccagggtggtcttgaactcctggcctcagctcaacctcagcctcagcctcccaaagtgctggggttacaggcacaagcaccatgcctggcctagagaaggatttaattcagctatttaaaatatgttcaaagagataagagaaacgattcagttctgtagactagagaactaaaggaaagtatgaaagcaatgtctcatcaaatagagaatatcaataaagagatagaaaccataaaaaggagtcaaataggaaattctagagttgaaaagtatgggtaacttgaaatgggaaaaattatttaggaggttctccaatgggcacatttacagcaggcttgaaggacaggaatggggggacttngaaggttatttgaggttgttgactctgagggaaccggaattaaaattgaaa

SEQ ID NO: 2771 - DNA, 471 bp, Homo Sapiens
  misc_feature (407)..(407): n is a, c, g, or t
  misc_feature (415)..(415): n is a, c, g, or t
aagtttttctgcaaaggcaagtaaaggtgacttccaagtgttcagtatattaaagcaaaaggaagaaaaacttaaaggtaaaaaagaaaaaagtgcttgaaaataattctcagggacttatcttgagaggagaaacccccgtgtagcatccctctttctggtgttatccggtccctactcagggcacaaagacctcctcggtccacgctctggagcagggcgtgggacgggtggtgtcctaaaagactttctttaggaaaagcaaaacttactttagtggtttccagggaaaagttgtattccttggcatggggccatccaccttggcctggaagacctcacaactttttggcactgtcgtggcaggccgttgctctgatggtggtccagccaaccccggttgctgntctgcgancagcactttggaaacgggattttgttctgggatctcactctggaggttgctggtga

SEQ ID NO: 2772 - DNA, 197 bp, Homo Sapiens
  misc_feature (33)..(33): n is a, c, g, or t
  misc_feature (70)..(70): n is a, c, g, or t
cgactgtggagggccctggaattgagtgatgtnggggagatggcacagctcagaaggcaccacccgtggnggcgggaagatgtccccctacaccaactgctatgcccagcgctactaccccatgccagaagagcccttctgcacagaactcaacgctgaggagcaggccctgaaggagaaggagaagggaagcttga

SEQ ID NO: 2773 - DNA, 1759 bp, Homo Sapiens
cagccgttgaggggacgggcctgcgttctctcctccttcctccccgcctccagctgccggcaggacctttctctcgctgccgctgggaccccgtgtcatcgcccaggccgagcacgatgccccctaaaaagggaggtgatggaattaaaccacccccaatcattggaagatttggaacctcactgaaaattggtattgttggattgccaaatgttgggaaatctactttcttcaatgtgttaaccaatagtcaggcttcagcagaaaacttcccgttctgcactattgatcctaatgagagcagagtacctgtgccagatgaaaggtttgactttctttgtcaataccacaaaccagcaagcaaaattcctgcctttctaaatgtggtggatattgctggccttgtgaaaggagctcacaatgggcagggcctggggaatgcttttttatctcatattagtgcctgtgatggcatctttcatctaacacgtgcttttgaagatgatgatatcacgcacgttgaaggaagtgtagatcctattcgagatatagaaataatacatgaagagcttcagcttaaagatgaggaaatgattgggcccattatagataaactagaaaaggtggctgtgagaggaggagataaaaaactaaaacctgaatatgatataatgtgcaaagtaaaatcctgggttatagatcaaaagaaacctgttcgcttctatcatgattggaatgacaaagagattgaagtgttgaataaacacttatttttgacttcaaaaccaatggtctacttggttaatctttctgaaaaagactacattagaaagaaaaacaaatggttgataaaaattaaagagtgggtggacaagtatgacccaggtgctttggtcattccttttagtggggccttggaactcaagttgcaagaattgagtgctgaggagagacagaagtatctggaagcgaacatgacacaaagtgctttgccaaagatcattaaggctgggtttgcagcactccaactagaatactttttcactgcaggcccagatgaagtgcgtgcatggaccatcaggaaagggactaaggctcctcaggctgcaggaaagattcacacagattttgaaaagggattcattatggctgaagtaatgaaatacgaagattttaaagaggaaggttctgaaaatgcagtcaaggctgctggaaagtacagacaacaaggcagaaattatattgttgaagatggagatattatcttcttcaaatttaacacacctcaacaaccgaagaagaaataaaatttagttattgctcagataaacatacaacttccaaaaggcatctgatttttaaaaaattaaaatttctgaaaaccaatgcgacaaataaagttggggagatgggaatctttgacaaacaaattatttttatttgttttaaaattaaaatactgtgtacccccccccccccatgaaatgcaggttcactaaatgtgaacagctttgcttttcacgtgattaagaccctactccaaattgtagaagcttttcaggaaccatattactctcatgatacttcattaatctccatcatgtatgccaagcctgacacatttgacagtgaggacaatgtggcttgctcctttttgaatctacagataatgcatgttttacagtactccagatgtctacactcaataaaacatttgacaaaaccaaaaaaaaaaaaaaaaaaaaaaaaaaaaaaaaaa

SEQ ID NO: 2774 - DNA, 1577 bp, Homo Sapiens
ggcggagagggccggccgccggcacattcctgtggaggccgcagcgggtgcggcgccgacgggaggagcagcgagcgagcgacgaacgccgagccgagcctcccgccgtcgccatgggccagaacgacctgatgggcacggccgaggacttcgccgaccagttcctccgtgtcacaaagcagtacctgccccacgtggcgcgcctctgtctgatcagcaccttcctggaggacggcatccgtatgtggttccagtggagcgagcagcgcgactacatcgacaccacctggaactgcggctacctgctggcctcgtccttcgtcttcctcaacttgctgggacagctgactggctgcgtcctggtgttgagcaggaacttcgtgcagtacgcctgcttcgggctctttggaatcatagctctgcagacgattgcctacagcattttatgggacttgaagtttttgatgaggaacctggccctgggaggaggcctgttgctgctcctagcagaatcccgttctgaagggaagagcatgtttgcgggcgtccccaccatgcgtgagagctcccccaaacagtacatgcagctcggaggcagggtcttgctggttctgatgttcatgaccctccttcactttgacgccagcttcttttctattgtccagaacatcgtgggcacagctctgatgattttagtggccattggttttaaaaccaagctggctgctttgactcttgttgtgtggctctttgccatcaacgtatatttcaacgccttctggaccattccagtctacaagcccatgcatgacttcctgaaatacgacttcttccagaccatgtcggtgattgggggcttgctcctggtggtggccctgggccctgggggtgtctccatggatgagaagaagaaggagtggtaacagtcacagatccctacctgcctggctaagacccgtggccgtcaaggactggttcggggtggattcaacaaaactgccagcttttatgtatcctcttcccttcccctcccttggtaaaggcacagatgttttgagaactttatttgcagagacacctgagaatcgatggctcagtctgctctggagccacagtctggcgtctgacccttcagtgcaggccagcctggcagctggaagcctcccccacgccgaggctttggagtgaacagcccgcttggctgtggcatctcagtcctatttttgagtttttttgtgggggtacaggagggggccttcaagctgtactgtgagcagacgcattggtattatcattcaaagcagtctccctcttatttgtaagtttacatttttagcggaaactactaaattattttgggtggttcagccaaacctcaaaacagttaatctccctggtttaaaatcacaccagtggctttgatgttgtttctgccccgcattgtattttataggaatactgaaaacatttagggacacccaaagaatgatgcagtattaaaggggtggtagaagctgctgtttatgataaaagtcatcggtcagaaaaaaaaaaaaaaaaaaaaaaaaaaaaaaaaa

SEQ ID NO: 2775 - DNA, 398 bp, Homo Sapiens
  misc_feature (216)..(216): n is a, c, g, or t
gggtggatccacttgggggtgttcagctgggcctgtcaggttctttccctgccttcgccacctccccccttccccaaattcccagaaagaaacaggacaggagccaagggctggaactttattattgtcacagagcacaggaaagaccgcttgggtctcaatgaaggtttgcttttcctcttctccaggggaagctactgcaagaaggcccaccanccaggctaggtcaaatggggttggggccacaacatgatagttaaacccataaacacagacttgattcgatcccagcttcacgacttcttagctgtgtgaccttaggtaagtctgttaacctctctcagccttggctttgtggagtggagtgaagagcagggcctgcttcactggggtgttat

SEQ ID NO: 2776 - DNA, 291 bp, Homo Sapiens
tttttttttttttttttttttttttttaagatgaataaattgaagacatttatttcctccaagaaaaatgtctggcacttggaattttcaagctgcaagtagatgtacacattttcaaaagatctttcttttccttcgcttcctcacactgggcacagcaaaacatctctgccttcttttcacgggaagtgaccctcctccccatgggtcaataagttaacgccaaatcgcggcaaaacggcgaattccatctctgaggctctagaagctcaatcttctgggcccctggct

SEQ ID NO: 2777 - DNA, 294 bp, Homo Sapiens
ggccatctcggctccggccctctgggggctgcacatcatggcactctgggccgatctttatgtcacggacattgaagtggatgagcacacggtcctcctcgtcctgcgctgtctcatcgtggtagtatcccagggtcccgtccagccacagggcaaaccagttccgcttccagcggcggaggatggagctctgtctccacagccagccgcccctcaccagggccatttcttcaaaaggactttccagagcggagtcaggcgggaccttgtctacacttgttgcgggctcgtgcc

SEQ ID NO: 2778 - DNA, 384 bp, Homo Sapiens
atgaggcccgtcgctcagctcctggggctcctgctgctctggttcccaggttccagatgcgacatccagatgacccagtctccatcttccgtgtctgcatctgtgggagacagagtcaccgtcacttgtcgggcgagtcagggtattagcagttggttagcctggtatcagcagaaaccagggaaagcccctaaactcctgatccatgctgcatccagtttgcaaagtggggtcccatcaaggttcatcggcagtggatctgggacagatttcactctcaccatcaccagcctgcaggctgaagattttgcaacctactattgtcaacaggctgacagtctcccttttactttcggcggagggaccaaggtggacttcaaacga

SEQ ID NO: 2779 - DNA, 530 bp, Homo Sapiens
agatggagtctcgctctgttgcccacgctggagtgcagtggcgcgattttggctcactgtaacctccatctcctgggttcaagcaattctcctgtctcaacctccctagtagctgggactgcaggtatgtgctaccacacctggctaatttttgtatttttagtagagatggagtttcaccatattggtcaggctggtcttgaactcctgacctcaggtgatccacccacctcggcctcccaaagtgctgggattgcaggcgtgataaacaaatattcttaatagggctactttgaattaatctgcctttatgtttgggagaagaaagctgagacattgcctgaaagatgatgagagataaatgttgatcttttggccccatttgttaattgtatgcaggatttgaacgtgcgcctgttaattgttagggttcttcatccatttattggatagacaatttttaaatccctgttatatgatacattttcctatcttttcagttattggtacctaaagttaatccagatgat

SEQ ID NO: 2780 - DNA, 520 bp, Homo Sapiens
ttttgacagctggaataagcactttattttttaaaaatgacaatagaaaagtacctttaaacagttataaaagcataatagactgcagaagtggctattttccttaggagaacagtcatctcaccaagagccgattggactgagggcataagcaggtccttgaacaccaaagtggatccgtcacaagtccttgagctaactgccttttccccttatttacggtaagaaagagcccctcactcctggccttggttttttgtgttgacctttaaaagcttcttgacatctttatatttctaatggaaaataacaaaacaaaaacccaaaccaaccaggtaatcatgacattgaaattttcaacataagccgagcggatcaataggaaagactgtgtttggcagctgaatttaggtcagtgtggttttacaaaaatggcttctgtacaaggggagaggttgagctgtcatgaactctggagatgtgtcaactgacaacaccagactgactttggctttgacga

SEQ ID NO: 2781 - DNA, 497 bp, Homo Sapiens
aaaattagacaatccattctcttgaaagcaccgtgtcttgaaagaatatttttccttttgatctgactatcgtgaaaatatttttgaaagttcttaatcatagttttccacttttgagcacttgctatctatagacactgtgcaggcttcacatacattacattctttaaccctcacagtaatcctttgaggggggtaagatcattcccattttgtgggtgaggaaattgaccccctaaaatgataattgacttgtcccagctgacttggctagaaagatctggatcctgggatttgaatccagggtcagtctgagtccagagcccttgctcttaacagctatggtgaacagacaactttaatccccaggggtgggtggttttcatccagggatttgtctctatgactgtttctccattggcataatgttaggcacgtggaaggcaaaggtaggggaaccaccctgtggcttcatcctcatcactgcacgtggaagt

SEQ ID NO: 2782 - DNA, 509 bp, Homo Sapiens
  misc_feature (461)..(461): n is a, c, g, or t
tttttttttttttttttgcaacagaggtcgtgttcaccattctcacaacatcgtttgccacttattattctagtcataatgatggctctctttcaacgtcagcataatgcctggtgctcagtggatccttaacaaataccatgtaaggataaatgaataagtgtgaaatctactttttaaaagaaggcatcaagggattggcttttaaaggcatttcccatatgacagatttttctgaggcatgagtgggttgtccctcctaaaatttgacccaatcaggaagtagaacagagatggagcctggggtagcagttaggaatctgcactagagagacacagtgtcaggtttaccttggtcctaggtcagtttccttccttctcaagaaatagccaactatggatggtatttcccgccccaaccagaaggctcttgcctctcctttgtcagaggcacacagtancatcaccacagtccacattgaccaggaacttcacgtgcagtgatgagg

SEQ ID NO: 2783 - DNA, 2067 bp, Homo Sapiens
ctacggcggccgcgcgctccaggccggtcgctccaccccccggctcccgggactgtggactccacgaccctgtcctcggccctgtccgcgccgaagcagcccgggactgcgcagcgccccgcgtgccgacatgggaaagtctctttctcatttgcctttgcattcaagcaaagaagatgcttatgatggagtcacatctgaaaacatgaggaatggactggttaatagtgaagtccataatgaagatggaagaaatggagatgtctctcagtttccatatgtggaatttacaggaagagatagtgtcacctgccctacttgtcagggaacaggaagaattcctagggggcaagaaaaccaactggtggcattgattccatatagtgatcagagattaaggccaagaagaacaaagctgtatgtgatggcttctgtgtttgtctgtctactcctttctggattggctgtgtttttccttttccctcgctctatcgacgtgaaatacattggtgtaaaatcagcctatgtcagttatgatgttcagaagcgtacaatttatttaaatatcacaaacacactaaatataacaaacaataactattactctgtcgaagttgaaaacatcactgcccaagttcaattttcaaaaacagttattggaaaggcacgcttaaacaacataagcattattggtccacttgatatgaaacaaattgattacacagtacctaccgttatagcagaggaaatgagttatatgtatgatttctgtactctgatatccatcaaagtgcataacatagtactcatgatgcaagttactgtgacaacaacatactttggccactctgaacagatatcccaggagaggtatcagtatgtcgactgtggaagaaacacaacttatcagttggggcagtctgaatatttaaatgtacttcagccacaacagtaaaaactggaagagatggatttaaagaagaaatatctattgatatttcctatactctcaatgaagaggtatttcctaataggagaccttaaattgaacaaacctaaagttcacacttctaagagtacagttaaaagtatgtggacctgcagttcttgtaactctccactctgtgttaatgatatatttgtactaggatcttttacttgaatctaaatttactggttgatttccttctccagcctatcccctacagggaaaagctgatacttcccctatagtacaataaataattatttaaaagtcatagctccagtcactactgaaaacataattttggtgataaacataatttgagaaacttaatttctgaatgtttttatagaaaattactgaaaatctattactcatggaagacttttaaagaataaccttttttcctgttttataaattcccattgttatatgatagtatttcagctacacaatattttagcttttagctagacatttataggttttcatttgttgaaatggtaatcatctgcatgtttttgtcacttatttcaggttagtgattgcctaacacttataagccaaaataatctttgcaaaattccatacctaaaattttgaaagcccctaatgttttcacacatctttctgtattagttatagttttgtgaaatctttgtgtgatcttcaaacattatcatttaatgtacaatactgtaaataaactgtgcatggcttttatacagctttagtaaatgtcaaataaagtggtacagactcattacaacaagtttctcataaaaatacaataaataggaaaatgaaattcagaaacccatagactgggaataggttccagttacagcttggatctggcataaaataaatttgaaataaaatattttgatgctccatttttttatgttgcttttcatactaaagaatggtgtagacttgttttgcaactgttaggtacccagttatcaattttatcaatgttttagaggaggaaattatttttttggtagaaattgttcaagaaatccttaattgaatgtcattaaatgatggtggccaaaataaaacctatttagaaattt

SEQ ID NO: 2784 - DNA, 297 bp, Homo Sapiens
ttgttaataactctttgggaatatttttcagatttcttagctcagaaccacataaaaacaggccacagactggacttagcttgccagccgtagtatgccaacaaaccagcatttagaagtctgatattttaaatatattataccaaaggcatcagaggtcacaacagttgagttttattctacgttaaataaataaggtagcattatagcaattaaaattacaagttgattaatatattgaattctatatgctagactacaaatcaaatgatggaacaacacagtaaaataaatttc

SEQ ID NO: 2785 - DNA, 448 bp, Homo Sapiens
tttataagtcaattataccatttattgatggaattatactggaaaacaatcactgaaaaaagagtagccttttgaatagaatagtctaccaagtgaaccatttacttgaaacacaacatgcaaaagattgtgaaatatgtcagtatagaagcctgtgggtttatatatagacatctcagcagtgcttttcacaagttctactccatatcacatcaagcaactgtttggtgattttgggggactgttaatagtacctgtgtcttggaataattaaccatatcttagttgggcttcttagagtagatgtgttcacattgagatgtatgaaagaaaagagttatttttgttcaatgggtgagcagcacttatccttagcaataagggaaggcgacaaacagtttagcttctgaatagagaatggtctattcaacactatattttgtcggta

SEQ ID NO: 2786 - DNA, 630 bp, Homo Sapiens
  misc_feature (546)..(546): n is a, c, g, or t
  misc_feature (565)..(565): n is a, c, g, or t
  misc_feature (573)..(573): n is a, c, g, or t
gggtttcaccgtgccagccaggatggtctcgatctcctgacctcgtgatccgcccgcctcggcctcccaaagtgttgggatcacaggcgtgagccaccgcgcccggccaatttgcataattctttacagtaaaacccattcagaaatagtaactacttgtatctaccatcagagctgaaagaaacagatttcgttaaaaaaaggtataggggtgggtcaaggcatttttttttagaaaaatatactgtatatagtacatctcggaaactacacagaccatatgttttatttaatgtgaaggcacaactttaacattaaaagcaaagcgttttagttatttatgatgtaactgtcagtaccagctcataaaaatatatttttgcaagcatatcattgaagactctttcagattgtcaattcaaaagtcaatttaaaaagtcgaagtctatttgtagaaaatcaatgacacattatagcagttccacataatattattgctggacaatctgttcaccagatatcacagggttttcttcatttgttgcncaatccaaatggtccatcntctgatanctgttacctttccagaactttttcatttcctttacgtctccaggcaacaactgaagc

SEQ ID NO: 2787 - DNA, 417 bp, Homo Sapiens
  misc_feature (399)..(399): n is a, c, g, or t
tttttatcttctatacttctattgattttcataaagcgggaaggggaggtggtcttgattcatttaatattagcgttttgcaataaagtagagcagcataaaatataactgaagaagaattcattttccccaggataatgcacccttcctcctgtttctacagtaaagcacatcattttgctattaaaaatgtccatttttcacaactgacttttccttaactctagtcaacactgctcttcaaaagaacctagccaattactgtaccttgtaggcagagttgcaaaatttttgcttccctaagaaacttttccattttttaaatgctttccaaattaagcaggactcacattaactgtgatcttaagtagcagtttagtgaggcttgaaaacaaactnttcattaacgcattcatc

SEQ ID NO: 2788 - DNA, 596 bp, Homo Sapiens
tgaatttaggtgacactatagaagagctatgacgtcgcatgcacgcgtacgtaagcttggatcctctagagcggccgcctactactactaaattcgcggccgcgtcgactttttttttttctttcacttctaattacaaataagttttaccttttattgtattccattatacaattttacatagtaccattattttaagcaataattaagcaaattgaactactgtttttgagctctacttttcagcatatagatttacctaaaaaagtacaaaccaagcacagtggtgcaattttccaggcactttcaagttgcttatttacaaatatgtaagcaccctgttggaacacatgaaaattttggtgtcgagaagaaacactccatgtatatcaaatctttaaattttaacatttgcacagctccaaatattcctgagaaaggtcagtctcattgtcacgtacatctgcatttatcgacgcggccgcgaatttagtagtagtagtcgacccgggaattccggaccggtacctgcaggcgtaccagctttccctatagtgagtcgtattagagcttgggcgaatcatgggcatagctgt

SEQ ID NO: 2789 - DNA, 436 bp, Homo Sapiens
ttttcacaggggtcgaacacataacagtttatttcttacacttaaaaagttgactgcaagtccatcagcactccagtcaggtcccttctaaacagcgacctaaggacccaggttgcatccgtcttgtaagtatgccatttggaacatcttgctttcaggtcaccatgacaggcaaaagaaaactggagggtcatgcaaaactttttacagtccaccatggaaatagaaaatcacttctgtttacaatccctctgcttgaagtagtcaaatggcattgcctaactacaagaggtttggaagtgaacaggagcagatagatacatgatgagctgtaaatgcttttgccatattctacaaataatataagcttataaaaagcattttaatgaacaattctgaaaaactctatatggatacaaaatatcccataaatgta

SEQ ID NO: 2790 - DNA, 2795 bp, Homo Sapiens
cggggacatgaggtggatactgttcattggggcccttattgggtccagcatctgtggccgagaaaaattttttggggaccaagttttgaggattaatgtcagaaatggagacgagatcagcaaattgagtcaactagtgaattcaaacaacttgaagctcaatttctggaaatctccctcctccttcaatcggcctgtggatgtcctggtcccatctgtcagtctgcaggcatttaaatccttcctgagatcccagggcttagagtacgcagtgacaattgaggacctgcaggcccttttagacaatgaagatgatgaaatgcaacacaatgaagggcaagaacggagcagtaataacttcaactacggggcttaccattccctggaagctatttaccacgagatggacaacattgccgcagactttcctgacctggcgaggagggtgaagattggacattcgtttgaaaaccggccgatgtatgtactgaagttcagcactgggaaaggcgtgaggcggccggccgtttggctgaatgcaggcatccattcccgagagtggatctcccaggccactgcaatctggacggcaaggaagattgtatctgattaccagagggatccagctatcacctccatcttggagaaaatggatattttcttgttgcctgtggccaatcctgatggatatgtgtatactcaaactcaaaaccgattatggaggaagacgcggtcccgaaatcctggaagctcctgcattggtgctgacccaaatagaaactggaacgctagttttgcaggaaagggagccagcgacaacccttgctccgaagtgtaccatggaccccacgccaattcggaagtggaggtgaaatcagtggtagatttcatccaaaaacatgggaatttcaagggcttcatcgacctgcacagctactcgcagctgctgatgtatccatatgggtactcagtcaaaaaggccccagatgccgaggaactcgacaaggtggcgaggcttgcggccaaagctctggcttctgtgtcgggcactgagtaccaagtgggtcccacctgcaccactgtctatccagctagcgggagcagcatcgactgggcgtatgacaacggcatcaaatttgcattcacatttgagttgagagataccgggacctatggcttcctcctgccagctaaccagatcatccccactgcagaggagacgtggctggggctgaagaccatcatggagcatgtgcgggacaacctctactaggcgatggctctgctctgtctacatttatttgtacccacacgtgcacgcactgaggccattgttaaaggagctctttcctacctgtgtgagtcagagccctctgggtttgtggagcacacaggcctgcccctctccagccagctccctggagtcgtgtgtcctggcggtgtccctgcaagaactggttctgccagcctgctcaattttggtcctgctgtttttgatgagccttttgtctgtttctccttccaccctgctggctgggcggctgcactcagcatcaccccttcctgggtggcatgtctctctctacctcatttttagaaccaaagaacatctgagatgattctctaccctcattcacatctagccaagccagtgacctttgctctggtggcactgtgggagacaccacttgtctttaggtgggtctcaaagatgatgtagaatttcctttaatttctcgcagtcttcctggaaaatattttcctttgagcagcaaatcttgtagggatatcagtgaaggtctctccctccctcctctcctgttttttttttttgaggcagagttttgctcttgttgcccaggctggagtgtgatgggctcgatcttggctcaccacaacctctgcctcctgggttcaagcaattctcctgcctcagcctcttgagtagcttggtttataggcgcatgccaccatgcctggctaattttgtgtttttagtagagacagggtttctccatgttggtcaggctggtctcaaactcccaacctcaggtgatctgccctccttggcctcccagagtgctgggattacagggggagccactgtgccggtcccgtcccctccttttttaggcctgaatacaaagtagaagatcactttccttcactgtgctgagaatttctagatactacagttcttactcctctcttccctttgttattcagtgtgaccaggatgggcgggaggggatctgtgtcactgtaggtactgtgcccaggaaggctgggtgaagtccccatctaaattgcaggatggcgaaattatccccatctgtcctaatgggcttccctcctctttgccttttgaactcacttcaaagatgtaggcctcatcttacaggtcctaaatcactcatctggcctggataatctcactgccctggcacattcccatttgtgctggggtatcctgtgtttccttgtcctggtttgtgtgtgtgtgtgtgtgtgtgtgtgtgtgtgtgtgtgtttgtgtgtgtgtgtctgtctattttgatccggcccaagttcctaagtagagcaagaattcatcaaccagctgcctttgtttcatttcacctcagcacgtaccatcgtcctttggggggttgtttgtttttgttttttgctttaaccaaaatgtttgtaaatcttaacctcctgcctaggatttgtacagcatttggtgtgtgcttataagccaataaatattcaatgtgagttccaaaaaaaaaaaaaaaaaaaaaaaaaaaaaa

SEQ ID NO: 2791 - DNA, 370 bp, Homo Sapiens
gcgtcgacgactggagttattacttgcttaaaagcctaaaacttgagggtatccagcataagaattgtgtgttttggtctgtggatagcagctgcttgaagtccataaaaacaagaaacctgaagttgattcagatgaatctgaagtcttgtacctgaattatgtcaaggttagcagtaaatgccatttaaaaagactgagtacaaattgccaaattcctttgaatgccaaaccatatttctcaggaaagttggccactgccaaatttataacatttgtgtttctgttacctgaattccaagggcagaggggtgattgagggggtaaagggaaaggcacaggtgaattttattttcagatgtctaatagg

SEQ ID NO: 2792 - DNA, 418 bp, Homo Sapiens
cctaatcagactaagcaacttgatgaccaggaccatatcccctatttcttagtattctcttcagcattttagccagagtaggagtcggtgttgaatacaagtttgtcatcttatggattatatcttagggtgaatatcagagctggtgtccatcatgtgaacaggcagcatggtactggtggggagaggggtggaagtacagagtactagggccccaggagctaatattgctaacttgacaatattggtaaaagctagacctgttaagaactaccagcaatggttagtactgaaagcaaaagggaagattcatcaggctaaaataaaaagggaaactagcaggttggcatagggcagaaccaaggaaaacaaaacaaaacccccaaaaaactactagatttcctgaaaagtggaaaag

SEQ ID NO: 2793 - DNA, 6253 bp, Homo Sapiens
ctccccgccagtccgggcgaacgcggccgggcccttggggaccgagtctcggcgccgccggggaacgggcgcgggccgcgccacagccggagcggggcagggccccgccaccgccttcttccgccggccccgccgccggccatgcattcttccggctcctctgactcccaaagccccggctggggcccggccagcccgagaaagacaggacggagtccagtgtgagaatggctataactttggaagaagctccgtggctgggctggctcttggtgaaagcactgatgaggtttgccttcatggtcgtcaacaacctggttgctattccatcctacatctgctatgtaattatacttcagccccttcgagtgctggacagtaagcggttctggtatatcgaaggaatcatgtataaatggcttttaggaatggtagcttcctggggatggtatgctggatatacagtgatggaatggggagaagatattaaagcagtttcaaaagatgaagcagtgatgttggtgaatcatcaggcaacaggagatgtgtgcacactgatgatgtgcctccaggacaaaggactggttgttgctcagatgatgtggttgatggatcatatttttaagtacacaaactttggaattgtttctctagttcatggagacttctttataagacagggaagatcttatcgtgaccaacagctgctgcttctcaagaagcacttagaaaataattacaggagcagagatcgaaaatggattgttttgtttccagaagggggcttcctcaggaagaggcgagaaacaagtcaggcatttgccaagaaaaataacttgccatttcttacaaatgttactctgccaaggtctggggcaacaaaaattattttgaatgcacttgtagcacaacagaaaaatggaagtccagcaggaggagatgctaaagaattagacagcaaatcaaaaggcctccagtggataatagatacaacgatagcttatcccaaagctgaacctatagatattcaaacctggatccttggatacaggaaaccaacagtcacacatgtacattacaggatctttccaattaaagatgtacccctggagactgatgaccttaccacttggctctatcagcggtttgttgaaaaagaagacctcttatcacatttttatgaaacaggagcttttccaccttccaagggccataaggaagctgtttccagggagatgaccctcagcaacttgtggatatttctcatacagtcttttgcatttttgtcaggctatatgtggtacaacatcattcagtatttttaccattgcctgttttaggaattgacgtggacttgtcaaggtcaccgtaggagttcagactttctttcataagtgtgcattattttacatgtgcaaatcagaatatatttaaaaaaaagcaaaagaaattcaatggatggattaatatttatccccctttgggatattttaaaatctactaaaatgaggattagtaatataatgacctgctaatatattttaagaacatgttttaaaaagatacactctatcacatatttaagcaaacatcacatttggagaagaggaaatcataaaatcatcctagaagactatctgagagaaattctgttgccaccagttatacttgacaatttagttgaagctcagaaagttatattcatccctcttagctgtagtctatattagggcagttctctagaacgcccacatttccaccaactcagtaaacttgaggggagctggttggcacctcgtgaagaactctttccctgtcgtttgcagtaacaaactccagtctgttgcagtaacaaactccagtctgttgcagtaacaaactctagaatattgacattctctgtgggggaaaagcagtgtccactggaccccttctggtactggatgtgttctttacaaaggctagctcagtccaacattgtgtttacatacactcgtgcttttccttatctgacttctcattttgtatcagaggcatatcataaattgataattttgcaaaatgcacttttttgagatgcagatatagcaaaggattagtaatatagcctgaaaacaaatgggagcatagcagtgtgtgaggttctcgagaactgtcttgtctctgtgtgtttatttgcctgccagtgctctccagcgccatcctgccctggacaccaccctgacgtgatgcctctattgcagctcagaggctttattttttccattttgacattggcactaaatgcatttggggatggttaaaacaaattactatagaacatttaaatgatcagtttaaggggaaataggctagtttatagaaaaataagagctagtggcttataatggtgacaggttctcatgtggcacccctaggacctgtgcagacagtagtctgttgaatcattacatcaaggagctgcccctgtcagggtgagtgtaattaggaacgataccagcacataaggctccccccaatctcttccagttgctttttcttttttctttttttttttagacaggtcttactctgtcacccaggctgtagtgcagtggcataatctcagctcactgcagtctctgcctcccgggttcgagcgattctcctgcctcagcctcccgagtagctgggactacaggcacccaccatcatgcttggctaatttttgtatttttagtagagatggggtttcaccatgttggccaggctggcctcgaactcctgacctcaggtgatctgcccacctcggcttcctaaagtgctgggattgcaggcgtgagccaccacgcccggcctccagttgcttttgaagagggtaaagtcaagtttctatttctagaaaacattttttagaaatttgttgcgatgtttgtacaatttacctcataagagaaccacacccttctccaaaagtgctggtactgcatcagtgagatgagtagggtttttgtttgggattgtaagactattaagatcctagtaagtcagtggtagtttactgtgatgtgagcattgtagattcccccgttgtcactaatcacacaacaattttgagaagtaggctataaaacaaaaaaaggttgctgttttctatttttaaataaaccaaaaaaaaacagaaaagatgtgaattttccccagttatgtgggaaaggtaaagcaacaccaaataaaagcccacagcagcttcatctttacgataactcagtgcatatgtgaaagagaatgatgcattaactgaaatacctcattgaatattatactactactggtaaaatgcagaagacagtgttaatgtgtttggtttgggtactggttgttataaaatgcaatttttttttaaatctaagcatttcattatgtgttctacagtgtcggtgaataaatgaaaccaatctcaatttagaggtatggatgatgacagaaagcccaatagaagcttaatgatgcttctgtttgaggcccagcaagcaccactaaattactggatgaaatgaaattgttcacttgagggattagtcaaccatctgggggagaagttgctcactgtcaaatacagcatgcacggtcctagctgatagaccttttcctcattgctacagcaagccacagggtagagtgaccagttctcctatccaaaaataaatgcgaacatgcatacataaatgtggctgagggccacttttgccatcactgtgctccaaaggaacatgatattgttaaatatactgtacacattaaactattctataagatgctttacttttcaagtacggtgtcattttcacagtctccagggtgacaaatgccaatagatatgtgagttaatttttttaaatatctccgtgagttgtaaatagatgtgtatttgatctgccctatccttctttgattctttaacatgttctctctcttttgtttgcaaaatatgtttgaaagcattggtagtgctttccttatcagtaactggagttctcctgcttgcactagagaaggtaaagagagaatcagtattcttatatggcaatctggggaagcagcaatatgccactgtacaaaactgaagaaaagttcctaatttgtactttgtgaagggagatgaaaggacgtttaaagtatatatattttgtcaagaggaaagaagataaaactatgccagttttatatcaatagcttgtagaagctcagctcttcttggtcttggctagactgcctagattcccacagcagacaaggttgagaatccattgctggaatcttggtattgatgagttacagtgatggaacatgtgcttggccacaggcaggtccagtcactgcaaaagtgaccaagccagcaggtcacccttaacttcagaaacaattattggtggtgaactgtacttaaattgcagagaaacctgtaagtaatggaaggtaaagaaaaattacagaatggaaaataatattttgggcaagcaaacaaattcactgagaattccaaaagtatattaaaaaagaagatagctatgagttcagatctatcttattggtctttaatattacaaccaatccttaactttccactataaaggaaggattactagattgattactttctgggtagataatctggtaataaatgataggtaaatcaaaaattacttttatttaggagtttgaattcttactctcatcagacattttttttctagggacgcttactaattaaatgatttaagttgtttcttaggggttttttgcctatatatttatgactgtgttaatgagtagtgaaatgatgcggaaagacagctatcaggaagaggaaatacagaagcctgaataatctatgggttagaaaagcatccctgaataatcaaaaattggcagtattggcattgttctcaagcctttttatgaaaatgaaatctgaaatcaccaaatgtaaacctgggaacattattctagtgttgctgtcttggattcatgttaagaagcgtcttcattctttgctcatgttgcccacttcttgtggatttgtctgagtgttttttgacaatcacttccttaaagactcttctgaactagttggacctggttaatcatagagagtagcctttaatcatggatagtcttcttggattatttttatatttgaaaagaaaatgttttatttgcactactgagtaggaagagttaattgttttctttgttctttttttgaagtcattacacaggacttcactccagagttaccattatgagtgtgttcagctctggtccacagaggatggataaaaatggtttgttatgtttttttgctctgcagtgctatgagccttatatctgttaatatgaaggacaaagtcaaaagcagcagtggatagcaggaagggtagagactaatatgtttgggaccaaaaccatctaagttagagatttccagatcacagaggggctgggcattctctggagcagtcattggttggtgctttattgtaatcattttgcgccaatccccaacaattaggaactggaccctgggaataagctgagggtgctgaactgttggggaagggtgactgtagccacatggaagataaaatatgggtttttctgcaaaatttccatctgagggtttttacatttaatatttttttaagacagtttaaagagcaaacgttttttaagtgtattctagttgcaaagtatgcacacatatcttgaatggctttatttttattgtgtaaaactgttgaacacatgactgtgatgcacaaattctttacgtgtaaggagtctatgcattttacagtaacttattttatgatcgggtgatgagacagttatactttcaactgccattatttttattaagtgctttcattttctttacagttattataaaattgtatttattttatacagatgggttttcattttcctgatgctgtaatgtttacttcagcttgttgacctttctttgtgttatctgcatgttgtaacgtgtgataagaatgaatgtaaaggctgtggcaactgtaattaatttttgtaaagggctggtcacacgtggatctggtttatgaatgcatttgggatgattttggtaaccagatcaccttttcagaaatttagatgtgaacaccaaaagaagcattttctcaacaaaaattaatagctggttctattttttttaaacctagaaaaaataaagttgatttttttc

SEQ ID NO: 2794 - DNA, 1926 bp, Homo Sapiens
aaaaaaagcttctgccaagggtgggggcccacgcggaggcgatccgctcgttcctcccagggccatggggcgacgaggagagccctggcctccccgcgacccgcaccgcgacctgggccagacgcgccaccttccccggtcgcggtttgcttctctttaaaatgaggacagctcctcccttgggggctgtggtgacaggtgaaatgagaacgcactgaagacagctcttggtccaaagccccgcacacagggcatggtctagtggcccagtcaggacgcggaaacactccctggaggttctgacccactccctctcagcctccgcctggtctctgggttggctgttccagctccaaagagaaggaggaaccttttccttctgcagcccctccccaccagccccattccttagctggggtcagacctggggtcctcactgcagctggcctctggcagcgttctcaggctagccctccctgctgaaaagagaaccgtgtgggactcacaggtgtagtcgccgccgccagccgccatgggcaaacagaacagcaagctgcggcccgaggtgctgcaggacctgcgggagaacacggagttcaccgaccacgagctgcaggagtggtacaagggcttcctcaaggactgccccaccggccacctgaccgtggacgagttcaagaagatctacgccaacttcttcccctacggcgacgcttccaagttcgccgagcacgtcttccgcaccttcgacaccaacggcgacggcaccatcgacttccgggagttcatcattgcgctgagcgtgacctcgcggggcaagctggagcagaagctcaagtgggccttcagcatgtacgacctggacggcaacggctacatcagccgcagcgagatgctggagatcgtgcaggccatctacaagatggtgtcgtctgtgatgaagatgccggaggatgagtccaccccggagaagcgcacagacaagatcttcaggcagatggacaccaacaatgacggcaaactgtccttggaagaattcatcagaggtgccaagagcgacccctccatcgtccgcctgctgcagtgcgaccccagcagtgccagtcagttctgagcgagcggcccctggacagttgcagagaaacacaggcttgtcgtgccgtttaagctttgcttgcaagagtggatgccccgcaatcgttcctgctctcccgggccccgggcctggggcatgcgttgcacctgcccggcccggtggctgcgcctccctcctccacctgaccaacgcgacattcctcccctcacgcctggcccggtcccttccagggcaactcccagggatgtggtgacatgcagggttcaagtgttcttggttccaggcacctcccggctcacggggagctcagaggtccatgccgaggagaccaggcaggacctcccgaggctgcgccccggccggcccatgcgttttgtgatcccaagtgactctgtgggaagggtggggacgaggcgtcgggagggtatacagggagcccctcccgtgcatggctgcccccccgttcattttctccaccacagccgcttgcacgtatagatactgtggtcccctttcttttaatatataaattatgtatggtgaagtggagtgtattgtgtaggtcccgtatttaatgcctctgactgcctttgaagcgcagccctctgtggcccgcagccccctgagcctggctgttgtgtggtatttatgctctctttgtctgcctgtttctaaggaaatgcatgtgtgccctgagccgtgatgatcctcccatccgtgttgtgagcacaggcatttgtgtctggtctgtcctccctgttgattggtctggcatttccggtattaaaatgataaaataaatggcattttctgaaaaaaaaaaaaaaaaa

SEQ ID NO: 2795 - DNA, 364 bp, Homo Sapiens
ttttattttctgggataggaggaaaaaagaaaaatgtatcaaaaacacacaacctggtgggagaacccaaccctttctgccagaaggaggcagagaagggaataagaggtcaaggaggttcggtccttctattattacccccaccatgcgcacaacagccccctcctgcgtaagtggggcaaaacagcgcaaaatacatatctggggccaaaacccatgtgaaaggcaaaatctggaagggagggggcctaaggacaccgagcctgctcccgggaagggaggggggaagggaaaacgttgcctcgacgccagcaagggatttgtattccctcctaaatttgcccacccagcgtcatccccgtca

SEQ ID NO: 2796 - DNA, 383 bp, Homo Sapiens
tttttttttttttaaaccattaacaactcttcccccttttattttttatttattatactcattttttgttggaatcctacccgcccccctccgccccgcccacgacccctttaaaattgacagccaagatttgctggcaaacattctttttgtccttggatgctacaattccaggttctgccttttatctcccaagctcagaagtttcctggggccaatttttgcagctcaaaattgtccgtgcgattttgttcttcaccgctttgaaacaggaacaccttgccctgttgctttgccactccccattttctttggggatgactgcctccaggaatactcattttatattagtcaaaggggtgaaagtttgcattgacttctta

SEQ ID NO: 2797 - DNA, 446 bp, Homo Sapiens
ttttttttttttttttttggacagaatttttccatttttatttcattttcttctagcagttggaaatagctcattaaacagttccacaaatagtatcacaacatgcataaacaatgctcttgataccacttcaaacatttttaagacaggttatgaattagccttgttttgaactagtgttatagatggctagggagttaccaaatatttagactactgaaaaggctaaatggatattaattgtagtaattggattattaatctttataagtaaataagaacctctactaaaagatgtgtttccaagggtttttaacaaataggttgtctacggccataccaccctgaacgcgcccgatctcgtctgatctcggaaacaaataggtttacatgagagcatataaacctataaaagttgaatcaattggctaaccacattcttgaag

SEQ ID NO: 2798 - DNA, 392 bp, Homo Sapiens
aaaacaacccagtaagaatttattccaaatacatcaatacatttaactcagcttaacaaatctgcttaaaatgggcttttttttttttttaataggaagagagtcaggttgtgaaactagactgtgcttggaggcgatgtattaaatattctgaagcattttctaattgtcagtccttaaaatgtaagaaaatctcaaggggtaaaattggaaaactgggggtgctctctgctgaaagttcaatcaaaagcaactgtaatttcctacaaaggtaactaggtcaactcagcatttgtccctgcttactggaaacaacaaaatctcaacaatcaggccattaacttatcatgtcctatatatagtttcaaaagaaatctaaattcactcttaaa

SEQ ID NO: 2799 - DNA, 374 bp, Homo Sapiens
tttttttttttaaatgaatttaatctctctctagaaacagtgcactgattttacaaatgtccacatttggttttcagtttaccaagatgatgccagtatagctagtgagatgcagcaccccatcctcagccccctcgcctctggaagagacaccagactgcaaagggcaccgcgtacagaagctaacggaacttgaatgacaagacaaaaagagcagaatcagttagtgtgacacaacattctaacatgcctgattcttacatcaaatatggtaactttggggttggtagggggagacaaacaaggagaatccacttgggaacaatttgatgaagtttgcaaatcagcactttacccccaaattaacaacagct

SEQ ID NO: 2800 - DNA, 822 bp, Homo Sapiens
  misc_feature (766)..(766): n is a, c, g, or t
tggcacgagggagaaaatcaaatcaatgtgccattcttccaggcgcgaggcagcagcggctgcagttcaacatgaaaggaggcttcctccctgcctgctaattacctgctcttcccgatctcatcgtttctgcctttgcaaagtgctactgagaagcgggaagaaacgtccgccacccatcccccttgctgcctgggggttcagacttgattgtgaaaccccattggcttcattggctccttgatttaaaccacgcccggctttctgccctctttgctgctgctgggccaggttgcccagccatatcccagccccgtctgcagggagccggaggctgctgctgctgctattgtgtggatgccgcgcgtgtcttctcttctttccagagatggctaacaggggcccgagctatggcttaagccgagaggtgcaggagaagatcgagcagaagtatgatgcggacctggagaacaagctggtggactggatcatcctgcagtgcgccgaggacatagagcacccgccccccggcagggcccattttcagaaatggttaatggacgggacggtcctgtgcaagctgataaatagtttatacccaccaggacaagagcccatacccaagatctcagagtcaaagatggcttttaagcagatggagcaaatctcccagttcctaaaagctgcggagacctatggtgtcagaaccaccgacatttttcaaacggtggatctatgggaagggaaggacatggcagctgtgcanaggacccctgatggcttaggcaccgtgcaatcaccaaggatgatggctgctttcgg

SEQ ID NO: 2801 - DNA, 443 bp, Homo Sapiens
  misc_feature (354)..(354): n is a, c, g, or t
tttgtagctctcagtagatgtttaataagtgctcattggtgccctgggtgacaagtccctgtctttctctaggcctctgtcccccacctgtgccctgaggttgcttcccccaggcctgtctttcagggattggggtcttcttatcttccagcagacttgtggcctccttctcctggccccctcctcctcccgctgggaggcccccccagggctctcctcctcaccccacaggttctgcttgcagcctcctctgcctgggatctggccctagatttgacagtggcgcgggcaggaggcaggggacctggagctcctttatctctgtggtctccctcgtgggggactggggggcangagggctggggcatggagacagccacgggggtggcagcagggtctccagtctgacctggaggcccaaaaacacaaagcgccttcctttc

SEQ ID NO: 2802 - DNA, 549 bp, Homo Sapiens
atccttaattaaattaatcccccccccccccggtcttgtcggctcctgtgtgtaggagggatttcggcctgagagcgggccgaggagattggcgacggtgtcgcccgtgttttcgttggcgggtgcctgggctggtgggaacagccgcccgaaggaagcaccatgatttcggccgcgcagttgttggatgagttaatgggccgggaccgaaacctagccccggacgagaagcgcagcaacgtgcggtgggaccacgagagcgtttgtaaatattatctctgtggtttttgtcctgcggaattgttcacaaatacacgttctgatcttggtccgtgtgaaaaaattcatgatgaaaatctacgaaaacagtatgagaagagctctcgtttcatgaaagttggctatgagagagattttttgcgatacttacagagcttacttgcagaagtagaacgtaggatcagacgaggccatgctcgtttggcattatctcaaaaccagcagtcttctggggccgctggcccaacaggcaaaaatgaagaaaaaaat

SEQ ID NO: 2803 - DNA, 298 bp, Homo Sapiens
  misc_feature (186)..(186): n is a, c, g, or t
  misc_feature (231)..(231): n is a, c, g, or t
  misc_feature (241)..(241): n is a, c, g, or t
  misc_feature (259)..(259): n is a, c, g, or t
tggctgactcaccgccctcgccgccgcaccatggacgcccccagcaggtggtcaactttgggcctggtcccgccaagctgccgcactcagtgttgttagagatacaaaaggaattattagactacaaaggagttggcattagtgttcttgaaatgagtcacaggtcatcagattttgccaagattnttaacggtacagagaatcttgtgcgggaattgctaagctgttccngacaactatnaggtgatttttctgcaangaggtgggtgcggccaggttcagtgctgtccccttaaaa

SEQ ID NO: 2804 - DNA, 661 bp, Homo Sapiens
tggcacgaggagctgccgttgttctgggtactacagcagaagggtatgcggaagcgagcaccccagtctgagatggctcctgccggtgtgagcctgagggccaccatcctctgcctcctggcctgggctggcctggctgcaggtgaccgggtgtacatacaccccttccacctcgtcatccacaatgagagtacctgtgagcagctggcaaaggccaatgccgggaagcccaaagaccccaccttcatacctgctccaattcaggccaagacatcccctgtggatgaaaaggccctacaggaccagctggtgctagtcgctgcaaaacttgacaccgaagacaagttgagggccgcaatggtcgggatgctggccaacttcttgggcttccgtatatatggcatgcacagtgagctatggggcgtggtccatggggccaccgtcctctccccaacggctgtctttggcaccctggcctctctctatctgggagccttggaccacacagctgacaggctacaggcaatcctgggtgttccttggaaggacaagaactgcacctcccggctggaagcgcacaaggtcctgtctgccctgcaggctgtacagggcctggtagtggcccagggcagggctgatagccagggccaagctgctgctt

SEQ ID NO: 2805 - DNA, 601 bp, Homo Sapiens
gcttggcacgagggggcttctgcctgagagccagcagaagggctcgtaatgaaaccacctttgtcaggacgctgctctttgggcttgagacttccttacttgacaaactcccaggccctaaaatgttcgcttaaaaaggacgcagtctggccaagcgcggtggctcatgcctgtaatcccagcactttgggaggccgaggtgggcagatcacctgaggtcgggagttcgagaccagcctgaccgacatggagaaaccccgtctccactaaaaatacaaaattagccggacgtggaggtgcgtgcctgtaatcccagctactcgggaggctgaggcaggagaattgcttgaatccgggaggcggaggttgcggtgagccgagatcacgccattgcactccagcctgggcgacaaaggcaaaaactccgtctcaaaaaaaaaaaaaaaaggatgcagtcatcccagccacaggaaccagtctgtgaaaaccaggcatctctttctttctttctcctgctactggggcttgagatgctcctgaggcccatcctcctctccaccttttccatctgtggggaggcacctcagtattcctgccttaa

SEQ ID NO: 2806 - DNA, 2736 bp, Homo Sapiens
gaaaaggcaaatctacccttcacagttcctgttaagggtagatttgctgaaatggagaaacaaagacaagaggaacaaaggaagagaacggaggaggaacgaaaacgcagaattgagcaggatatgttagaaaagaggaaaatacagcgtgaattagcaaaaagggctgaacagattgaggacataaacaatacgggaactgaatcagcatcagaggaaggagatgattcactacttataactgtggtacctgtcaaatcatataaaacatctggaaaaatgaaaaagaattttgaggatctagaaaaagaacgtgaagagaaagaaaggatcaagtacgaggaagattaaagaataagatatgaagaacaacgaccatctctcaaggaagcaaagtgtctttcattagttatggatgatgaaatagaaagtgaagcaaaaaaagaatcactttctcccagaaaattgaaactaacttttgaagaactggagcgacaaagacaagaaaaccgaaagaagcaagctgaagaggaagcaagaaaacgtttagaagaagagaagcgtgcttttgaagaagcaaggcggcaaatggtaaatgaagatgaggaaaaccaagacacagcaaaaatttttaaagggtaccgccctggtaaactcaaactcagttttgaagaaatggaaaggcaaagaagagaagatgaaaaaaggaaagcagaagaagaagccagaaggagaatagaggaagaaaagaaggcgtttgctgaagcaaggagaaatatggtagtagatgatgactccccagagatgtataagacaatctctcaagaatttcttacaccgggaaaactggaaattaattttgaagaattattaaaacaaaaaatggaagaagaaaaacgacgaacagaggaggaacggaagcataagctagaaatggagaaacaagaatttgaacaactgagacaggaaatgggagaggaagaggaagaaaatgaaacctttggattgagcaaagaatatgaagaactgatcaaattaaaaaggagtggctctattcaagctaaaaacctaaaaagcaagtttgaaaaaattggacagttgtctgaaaaagaaatacagaaaaaaatagaagaagagcgagcaagaaggagagcaattgaccttgaaattaaagagcgagaagctgaaaattttcatgaggaagatgatgttgatgttaggcctgcaagaaaaagcgaggctccatttactcacaaagtgaatatgaaagctagatttgaacaaatggctaaggcaagagaagaagaagaacaaagaagaattgaagaacaaaagttactacgcatgcagtttgaacaaagggaaattgatgcagcactacaaaagaaaagagaagaggaggaggaggaagaaggtagcatcatgaatggctccactgctgaagatgaagagcaaaccagatcaggagctccatggttcaagaagcctcttaaaaacacatcagttgtagacagtgagccagtcagatttacggttaaagtaacaggagaacccaaaccagaaattacatggtggtttgaaggagaaatactgcaggatggagaagactatcaatatattgaaaggggagaaacttactgcctttacttaccagaaactttcccagaagatggaggagagtatatgtgtaaagcagtcaacaataaaggatctgcagctagtacctgtattcttaccattgaaactgatgactactagctcccctcccctctccctggaactttctctttcactccaactttcttactacatccatcttttctgtggcggggccaaaaaaggaaaccaggagtgccactatgctgacttcttattccttttcataacagtcttcaaagcacagctcatctaaagaatgcctacttcttttccaaataagcatcagatttatcgcctattatgcagtaacagtcaataaaatgtacttatgggggggaattactcaattattctatcagaacctattataaagactgtatttcccatagacgtttacagcaactatgtttaaaaaacaaaaacaaaaaaaaaacacacaaacctaagtagaatacattattttgcatgaaggaatgtcatttctgagctttttacacctaaaattaggctgaaatagctgagataattaatttggaacctatcaatttgagtggactttttctttagtagtacaccattttggttgttgtagtttcaaagtctttctgaagcagatatattgggattggagcggggtggggaaaactgtcactcctttcagaggaaaaggggaggagcatggagaaaaacaaaaattaaaggacttaaagaatggctatacagtgttgagtgttgaggatattaaacatgttatttttcaaacgtatgtaatatatattaaatttataaagcaaatttatgttgtgatcttgcctgaacaaattatattttaatgaaaaaactttctattaatagttcacgcaagagaaaacactttcaacatagtcgaaggcttcaagatctaagtgtatcagacttagggaaaaagtggcacaaccttcgatttaaaattctagtctttaaaatgagtttgtaaataattagctattacgttctattaagttgttttatattttaattttctggaagacaattttattttacaacgtgaacccaaataaagtaacttctgtattt

SEQ ID NO: 2807 - DNA, 540 bp, Homo Sapiens
tttttattttattctttttttaaaacttttatttaattggggatgttattatcattctttcttattcagcaatctaagtgcttagggatatagaatttcctctaagcagcatatgctaggctttaacaatgttagggaggcctcccctttctggggaagaccacacttacattaacacaggactgtgggatgccatagaggtacgagacagagctttatgaaatatcccagattacatcttcactgatcctgcacaaaggtggggttcctcggttacccactgggtcctattacccaagtctgggtcagcataccgagactacgggtatatagaacaagtgcaactggcgataatccttctgttggggagaaaaatcttttttttctattcatcttaggttctccatctgtggccctatcaagtagactaacaaaagacagattgacaagacagaaacaaagcatgtgcattgtacaaacacaggggagtactgagatgaatactcaaaagaggatttagaacttgcgcttatatagcat

SEQ ID NO: 2808 - DNA, 347 bp, Homo Sapiens
  misc_feature (273)..(273): n is a, c, g, or t
tttttttttttttttttttttttttttacacccactggcttgtttattaaaaaaagtcttagagactcagtaaggcacgaagtccaggaagggggcagggtcccctgggggacgtgaccaggaacaccagggcttcagtgccggatgccccactgtggtgggagttccccgctctttccagcagccccgctcccgtggagcctgaggacaagggagccctttcatccgagatgctgagtatgggcaacagggaggaggggaaagaagaggcanctccaccgtgtgggtgtggcggggggggatggctctgcaggagcctgatgctcctcggaccctgaaggcactac

SEQ ID NO: 2809 - DNA, 745 bp, Homo Sapiens
  misc_feature (683)..(683): n is a, c, g, or t
tgaagtttttcgaagtagtagactctcatcagatgctacagttttgacaccaaatacagaaagcagttgtgatttaatgaccaaaactaaatcaactagtggaaatgacgacagcacatccttagatctagagtgggaagatgaagaaggaatgaatagaatgcttccaatgagagaacgttccaaaacagaggaagacattctacgggcagcacttaagtatagcaacaagaagactggaagtaatcctacatcagcctctgatgattccaatgggctggagtgggaaaatgattttgttagtgccgaaatggatgataatggaaattccgagtattctggatttgtaaatcctgtattagaactgtctgattctggcataaggcattctgacacagatcaacagactcgatagggtaaaattgtgtgaccttgtttatcagttatgaccaaatgttaaaaaccaactagaatgtataagtgattgtgcttagcctttttgtaagggagatgtgtaagaaaccatgttgtaaatgcttattttattacaaaggagtagggatgataggatctgaattgatacagaattaagtgcaatttcatcatctgccttctgcttttcaagaccaatttaatggtcctgtcatgttactgattaaatttactttgtctggtctttatancatttctgtttactatggtagattccacttcaatttttaaaattaatttactttggaatgat

SEQ ID NO: 2810 - DNA, 395 bp, Homo Sapiens
atcatttattggcactgtcaacagattacttgtgaacaagatcactttgtacgcttaagtctgcgatgctacttagctatggttttctaccatgagcttatatatagataggtgtaggtatgtagatacattaatgctatacacaattttgcatggttactgagcgtcagtaaaaattatgaaaaaacacccatttataataaaagtgaggatgtactaagacttgctattactggaccttgttttctgtaaaagtgatgacacttgctggacggttactaaactctatggcactaatgtatgatggattcatttccagactgtcggccacggaagcacttcttcatggcctctgccctggacagcagcctgtcctccgggctccccatgttttt

SEQ ID NO: 2811 - DNA, 329 bp, Homo Sapiens
  misc_feature (101)..(101): n is a, c, g, or t
  misc_feature (158)..(158): n is a, c, g, or t
cggcactaggacttcctgccgatgccggtgtggacgctgtgaatcgtggctggcccggttctccgcttctccccatcccctactttcctccctccctcccnttccctccctcgtcgactgttgcttgctggtcgcagactccctgacccctccctcanccctccctaacctcggtgccaccggattgcccttcttttcctgttgcccagcccagccctagtgtcagggcgggggcctggagcagcccgaggcactgcagcagaagagagaaaagacaacgacgaccctcagctcgccagtccggtcgctggcttcgcgcctgccatggc

SEQ ID NO: 2812 - DNA, 370 bp, Homo Sapiens
  misc_feature (61)..(61): n is a, c, g, or t
  misc_feature (192)..(192): n is a, c, g, or t
  misc_feature (217)..(217): n is a, c, g, or t
  misc_feature (248)..(248): n is a, c, g, or t
  misc_feature (289)..(289): n is a, c, g, or t
  misc_feature (305)..(305): n is a, c, g, or t
  misc_feature (314)..(314): n is a, c, g, or t
  misc_feature (329)..(329): n is a, c, g, or t
  misc_feature (334)..(334): n is a, c, g, or t
  misc_feature (345)..(345): n is a, c, g, or t
  misc_feature (360)..(360): n is a, c, g, or t
  misc_feature (365)..(365): n is a, c, g, or t
tttttttttttttcctagagaagagacgaaggtgattcagggccgagcagggctccctggnaagccccctcctgggcacacagttaacatgtaatgcagttagggggagggagagaggggagagggcagggggggagtcagtggcctgcaccgcacagccactgggttagagaaagtcggggtttcccaggntgcaaagctttgttccagccatgtntctcctgggccctgggcttgacctcctgctntggccatagggtagacagcctgggcctttggggcttggggncatggctgttgttcangttaggggnaaagccaacatcctngcctncaattcccctnggggccctttttttntaagnccctt

SEQ ID NO: 2813 - DNA, 375 bp, Homo Sapiens
tttttttttttttttttttttttgcgcctggacccactttattccgatattccgcctgcaaaggctgtggaaagaagcgtaaggctcagggatggtagtccccaaagaggagggtccctgaggctttgcgcaagccccccctccccaacctttcgggccaagtcagacgaagcctcggaaaggctgggtctgttttgctgaccaaatcttcttgttagccgttttcgcctgacaagcctggcgcaggcgttggccttctcctctccggcggccacctccaatgccgcgcggggagcaatggggcccggccctgcagagggctgcctggaccttgaagtttggaaaaacaagaagagactgagccggctccctccc

SEQ ID NO: 2814 - DNA, 414 bp, Homo Sapiens
ctgccagcacttaacttttccccctaccctgctcctcctcctccacagccgtctttctctttgcctcagccacttccttccttcgcctcaccctccccagtgcactgaagaaggtaaccgggtccagacccacgcggcgccagttctccggcgggaaggaaaaccgcgcagagaggcagcaatgaatgtggatcacgaggttaacctcttagtggaggaaattcatcgtttgggttcaaaaaatgctgatggaaagttaagcgtgaaatttggggtcctcttccgtgatgataaatgtgccaacctctttgaagcattggtaggaactcttaaagctgcaaaacgaaggaagattgtaacatatccaggagagctgcttctgcaaggtgttcatgatgatgtcgacattatatt

SEQ ID NO: 2815 - DNA, 266 bp, Homo Sapiens
tgaatcttcagacaaacttctgggaggactcggtccctgcctcgcagcagatgttccctgtcactcagtagccaatccgggggacccaggacatgccccagctatagtgatgcagattacctttctggtcctgaatcgcacctgtgcctcagactttctcccctcagcttgagactgcatgtaaactgggatgtgtgaaagcaggaagcaaagctagtgacagctgagaggtccatgtctgggtagaaccaggcccacgatgctgc

SEQ ID NO: 2816 - DNA, 472 bp, Homo Sapiens
tttttttttttttttttacatttaaatccttaatccatatataatttatctttgcatatgatatgaggctagagaatctaatcttgtttgaaatagctggttctgacattatttatgaataattcatccattttaccagattatacaagtagtcttatccatgggggatacattccaagaccccccataggatgcctgaaacatttgatagaacagaaccctatacacactgttttcaatctgagaatccatatggctgctaagtgactaaacggtgggtaacatatacagcgtgcataagcaggacaaaaggacaattcacatcccaggcgagacgaagtgggacagcctaagatttcatcacattattcagcaacttaaaacttatgtattatttctggaatgttccatttaatatttttatattgtgattgactatgggtagctgaaaccatggaaagcaaaactgaca

SEQ ID NO: 2817 - DNA, 312 bp, Homo Sapiens
ttactctctccatcttcaccataagacagataatttggggttgctataatgctgtcacacatctcaaagtacattcaaatcttaaaaagaaattctcgtacttttgcgatgttgatactgttcagcaaacaagctaccaggaactgtgaggctttgtcatttagcattagactttaaacaagaattaaaatcatgtgctgtatttttaaaatctagccaaattaaatagtacatgagaaattcagagtattagacagttttaaggcattcaactgagaaaactttatttgccaaagtcagaaaacattttca

SEQ ID NO: 2818 - DNA, 461 bp, Homo Sapiens
  misc_feature (110)..(110): n is a, c, g, or t
  misc_feature (358)..(358): n is a, c, g, or t
  misc_feature (436)..(436): n is a, c, g, or t
agagaccgagtcccggcggcgacgcggcgcaagcgcaccggcgaggcggattcattccacttaaaacctgaaaacattggaccacacaaagtcttactgatttcaggtanaaacaataattgaagatgtccagcaaaacaagcaagcaccaacaatatagccccaggcaaggagaactgtgcagcagttaagattagaagcctccattgaaagaataaaggtttcgaaggcatcagcggacctcatgtcctactgtgaggaacatgccaggagtgaccctttgctgataggaataccaacttcagaaaaccctttcaaggataaaaaaacttgcatcatcttatagtggaatagaganacagctcctccgcctcttcccaacaacgcaaatttatgagcagctcctttgaagaagatttaccttcagctttatttnggtaaccacttgcttaataacttaa

SEQ ID NO: 2819 - DNA, 449 bp, Homo Sapiens
tttttcttggtcatctacctttaatgtttggtcttaagtcttataaacacatatcatttaatataaaaaaaaaaggatactcacctgaccctttcagatgtttaacgattcgtcttcctcctcggggatgctttttctgaaggatgctggcctggggaaaacagaaccggaagggtaacacctgccatacctaataaaaccaatgagaaatacgaggccccgagatggagtttctgggagattcctgaagagcacgctgtggcgattgagatgatgacgcgtggagctgcccccctccctgtctcccacatcagggacctgtccctctacaggaggaattctactcctgaggccaccgtcccctgtcactcaggtggcctgcatgcacagcacttctggctctgaaagcgtcacctcatggctgtttctgccttcttgctggtgaattt

SEQ ID NO: 2820 - DNA, 654 bp, Homo Sapiens
cggctaggtacgagcccggtgttaatcggccgagggctggccgcccttccttaaggccaccatcctggatctgtcttgtaataaactgactactctaccgtcggatttctgtggcctcacacacctggtgaagctagacctgagtaagaacaagctgcagcagctgccagcagactttggccgtctggtcaacctccagcacctggatctcctcaacaacaagctggtcaccttgcctgtcagctttgctcagctcaagaacctgaagtggttggacctgaaggataaccccctggatcctgtcctggccaaggtggcaggtgactgcttggatgagaagcagtgtaagcagtgtgcaaacaaggtgttacagcacatgaaggccgtgcaggcagatcaggagcgggagaggcagcggcggctggaagtagaacgtgaggcagagaagaagcgtgaggctaagcagcgagctaaggaagctcaggagcgggaactgcggaagcgggagaaggcggaagagaaggagcgccggagaaaggagtatgatgcccctcaaaagcagccaaagcgggagcaggagaagaaacctaagaaggaagcaaatcaggccccgaaatctaagtctggctcccgtccccgcaagccacaccccgg

SEQ ID NO: 2821 - DNA, 218 bp, Homo Sapiens
tttttttttttttttttcttaaaatagtcaccagacggctttaacaaggaaagctcttctgatcttctaatattcaggattttgcagatatcactgacagctttaaaaaccacagctgagaagctgactcgcaacctcaccatcttcaaattcggcagacgaaggcgcagcattttatgctgaggggtgaagagaagctttgcatctgcctggacccc

SEQ ID NO: 2822 - DNA, 470 bp, Homo Sapiens
  misc_feature (392)..(392): n is a, c, g, or t
atgtagagaccgggtctcagtatgttgtacaggttggtcttgaactcctgggctcaggtgatcctcctgccccagcctcccaaaatgttgggattacaggtgtgagccaccaagcccagtccccaaaaacctactcaggccaagctctgtgctggcactggggagacagggatggctctgaactggtccctgccctccaggggttcttgtctggcagggaaggagcacacagatgatgcgtgagagcgaggagggggccgtgcacgcactggactgaggaaaggccaggcagacaggtagagtcaggtctcaggggccgcccttcagccttgtcaaaaaatctggacctctcttgggagaatttctaggatcattgggggaaaaaaagaaanaaaaatagacatctggactctccctcatggggcatgtgctctggcacacccaattcttccgtccccgaagcccggtgc

SEQ ID NO: 2823 - DNA, 653 bp, Homo Sapiens
  misc_feature (550)..(550): n is a, c, g, or t
tttttttgacacagggtctcactctgtcgcccaggctagagtgcagtggcacaatgaaggcacactgcagctttgacctcctgggctcaggtgattctcccatctcagccttcccagtaagtgggaccacaggtgcccaccaccaagaccggccaattttttgtatagacagggtttcaccatattgcccttacactcctggactcaatctgcccacattggcttcccaaagtgctgggattatagacatgagccaccacacccagcctgtatggctgttgtgaataatatgctgttatgaacacgggcacactaaacaccattcaacttaaaaaaataatcaaagccttaagaactgaccaaaatggcttaggtgaaaataaaataccaaactctgctctaagaaaaggaaagaacattcactgaattataccttcagcaataagcacgtaatggaacttgtttcatttaaaatgcatcacaatcctgtaaattgataatcatcataccgcaattttatagatgagcaaggtattagggcggccttttntaaaaggtcatacagctagtgaccaatatttccaaatttttcataacatttccttttttgagacggatcttgctctgtggcccaggctggagtgcagcacacg

SEQ ID NO: 2824 - DNA, 1487 bp, Homo Sapiens
gcgggctcacatgactggccgcgcgatggacccgctgcccgcggctgcagtcggggcggcagctgaggcggaggctgacgaggaggcggatcccccggcgtcagatctgccgacaccccaggccatcgagccccaggccatcgtgcagcaggtcccagcccccagtcgaatgcagatgccgcaggggaacccgctgctgctgtcccacaccctgcaggagctgctggccagggacaccgtgcaggtggagctcattccggagaagaagggcctcttcctgaagcatgtggagtatgaggtttccagccagcgcttcaagtcctcggtatacagacggtacaatgacttcgtggtcttccaggagatgctcctgcacaagttcccctaccgtatggtgcctgccctgccacccaagagaatgctgggagctgacagggagttcatcgaggccaggaggagagccctgaagcgcttcgtcaacctggtggcgcgacaccccctgttctccgaggatgtggtcctcaagctcttcctgtccttcagcggctcggatgtgcagaacaagttaaaggagtcagcacagtgcgtcggggacgaattcctgaactgtaagctggctaccagggccaaggacttcctcccagctgacatccaggctcagtttgccatcagccgggagctgatccggaacatctacaatagctttcacaagcttcgcgacagggccgagcggatcgcgtcgcgggccatcgacaatgcggcagatcttctcatattcgggaaggagctaagtgcaatagggtctgacacgaccccgctgccctcctgggccgctctgaatagcagcacgtgggggtccctgaagcaggctctgaaaggcctgtctgtggaattcgcgctgctcgccgacaaggctgcacaacagggtaagcaggaagagaacgacgtggtggagaagctgaacctcttcttggatctgctgcagtcctataaggacctgtgcgagcggcatgagaagggcgtgttgcacaagcaccagcgggccctgcacaagtacagcctgatgaagaggcagatgatgagcgccaccgcgcagaaccgcgagccggagtccgtggagcagctggagtcccgcatcgtggagcaggagaacgcgattcagacgatggagctgcggaactacttctccctgtactgcctgcaccaggagacgcagctcatccacgtctacctgcccctcacctcccacatcctccgcgccttcgtcaactctcagatccaagggcacaaggagatgagcaaggtgtggaacgacctgaggcccaagctcagctgcctctttgcgggaccacacagcaccctgaccccaccgtgctccccgccggaggacggcctgtgtcctcactagccctgaggctgaggtggtgctccctgcggtcgcaagcttattccctttagtgagggttaattttagcttgcactggccg

SEQ ID NO: 2825 - DNA, 290 bp, Homo Sapiens
ttaggaagaaccaaaactttattattaatgttctgtttatttacttattttttataatattttataaataaactttattcatataaaacaggccaaacatctgactttcaaaaatggctactgttataaaatcagaaacatagagtgttgggaatactgaaatttctaaacctttatgaataacacaattgcttaagttatatccacaaagaacagaaaagaggcaagcttgaaaatgtgaggatagaaaggtatcacagtgatgtgtttttacgaaacagtaccttccc

SEQ ID NO: 2826 - DNA, 367 bp, Homo Sapiens
  misc_feature (364)..(364): n is a, c, g, or t
tttttaacccaaaataactttattatcgtctccacttttgatataaaagcattctccaaatggggggcaaatgtggcaagtcactgtggagtctgggccccctgtacacccttctactccgaggaataagccctgtgcccaccccagttgcccattgccatgtcctgccaaccccctgccccccgccagggcaagccacagtgcagtacagaagtgaaagcctgagattggccagacacggtgaccacagggcctcttcctgaccttggctgggggggcagggggattgcacattgcagcttcttgctgtctccaggaaagactgagtaactggggggcccccggggctggcacagaggcccangca

SEQ ID NO: 2827 - DNA, 1811 bp, Homo Sapiens
tccgccttccaataagaccacttgtgaaaactggagagagatacatcatctggtttttcatgtagcaaatatttgttttgcagttgggttggttattccaactactcttcaccttcatatgatatttcttaggggaatgttaactctaggatgtaccctttatatcgtctgggccactctctaccgatgtgccttggatataatgatctggaactctgtgttcttgggtgtcaacattttgcatctgtcgtatcttttatacaagaagagaccggtaaagattgaaaaggaactcagtggcatgtaccggcgattgtttgaaccactccgtgtgcctccagatttgttcagaagactaactggacagttttgcatgatccaaaccttgaaaaagggccaaacttatgctgcagaggataaaacctcagttgatgaccgtctgagtattctcttgaagggaaaaatgaaggtctcctatcgaggacattttctgcataacatttacccctgtgcctttatagattctcctgaatttagatcaactcagatgcacaaaggtgaaaaattccaggtcaccattattgcagatgataactgcagatttttatgctggtcaagagaaagattaacatactttctggaatcagaacctttcttgtatgaaatctttaggtatcttattggaaaagacatcacaaataagctctactcattgaatgatcccaccttaaatgataagaaagccaaaaagctggaacatcagctcagcctctgcacacagatctccatgttggaaatgaggaacagtatagccagctccagtgacagtgacgacggcttgcaccagtttcttcggggtacctccagcatgtcctctcttcatgtgtcatccccacaccagcgagcctctgccaagatgaaaccgatagaagaaggagcagaagatgatgatgacgtttttgaaccggcatctccaaatacattgaaagtccatcagctgccttgatcagagagagaattcaggttaccaagacggaaggtgtcttgaagagatcctgaaaaataccagcactttttcatggcttttaggttattctgctttagtgcatccagactggtagagtcggagggaggaagtgaggaagggtcaaggatggaagagttctttcacttaccctttttattagtcagcttttaaagtaattgttttactgagccttctgactatgccttgttctcttttgagatatatattttcacagtcttttctagatatattattgttttaacttaacaaatcttagcaatctctcaatgccttttcacttatttttttccaagttatgattctttttcctcacagtcttttttgttccatagcaatgaggttgtccatttgataattttaacaaacaatgtaagtttaaaattgaggctaaggtaacatgaaaaagcagggaatctcaaactttattccatatattattcacacacacacacacacacacacacacacacacatacagaggctgtttccatagggacagagcaccgcagtgtgagagaggattgggctgggactgagaagggcgttcctgctgtggtgaggcagccctcagggtctctcctggcacacagctgccagcgtgatgggggatcccttcagaatagcagcaaaacccacgatactgaggagtaactcaaaccaaacttgtgggtctcacagagaggatatcgtcttgcccatgtaaagattccttttagatggtttctggtgtttactaatgttgttaataggtgtatttttcgga

SEQ ID NO: 2828 - DNA, 2190 bp, Homo Sapiens
cccgggaggaggaggcggcgagaatggcagcggcgtcgtgggcgcggcggagatgagcgcccgcgaccccgggcccagggcggcacagccggagtgggcgggggtcccgatgcaggcccgaggggggccatggggcaggtcctgccggtcttcgcccactgcaaagaagctccgtctacagcctcctcaactcctgattccacagaaggagggaacgacgactctgattttcgagagctgcacacagcccgggaattctcagaggaggacgaggaggagaccacgtcgcaggactggggcaccccccgggagctgaccttctcctacatcgcctttgatggtgtagtgggctccgggggccgcagggattcaactgcccgccgcccccgcccccagggccgctcagtctcggaaccacgagaccagcaccctcagcccagcctgggcgacagcttggagagcatccccagcctgagccaatccccggagcctggacgacggggtgatcctgacaccgcgcctccatccgagcgccctctggaagacctgaggcttcggttggaccatctgggctgggtggcccggggaacgggatccggggaggactcttccaccagcagctccaccccgctggaagacgaagaaccccaagaacccaacagattggagacaggagaagctggggaagaactggacctacgactccgacttgctcagccctcatcgcccgaggtcttgactccccagctcagtccgggctctgggacaccccaggccggtactccgtccccatcccgatcgcgagattcgaactctgggcccgaagagccattgctggaagaggaagaaaagcagtgggggccactggagcgagagccagtaaggggacagtgcctcgatagcacggaccaattagaattcacggtggagccacgccttctaggaacagctatggaatggttaaagacatcattgcttttggctgtttacaagacggttccaattttggaattgtccccacctctgtggacagccattggctgggtccaaaggggccccaccccccctactcctgtcctccgggttctactgaagtgggcaaaatccccgagaagcagcggtgtccccagcctctcactcggagccgatatggggagtaaagtggcggacctgctgtactggaaggacacgaggacgtcaggagtggtcttcacaggcctgatggtctccctcctctgcctcctgcactttagcatcgtgtccgtggccgcgcacttggctctgttgctgctctgcggcaccatctctctcagggtttaccgcaaagtgctgcaggccgtgcaccggggggatggagccaaccctttccaggcctacctggatgtggacctcaccctgactcgggagcagacggaacgtttgtcccaccagatcacctcccgcgtggtctcggcggccacgcagctgcggcacttcttcctggtagaagacctcgtggattccctcaagctggccctcctcttctacatcttgaccttcgtgggtgccatcttcaatggtttgactcttctcattctgggagtgattggtctattcaccatccccctgctgtaccggcagcaccaggctcagatcgaccaatatgtggggttggtgaccaatcagttgagccacatcaaagctaagatccgagctaaaatcccagggaccggagccctggcctctgcagcagccgcagtctccggatccaaagccaaagccgaatgagaacggtgtctctgcccgcaggacgcctgcccccagcccccgcagccctctggccccctccatctcttgtccgttcccacccacccccctcctcggcccgagccttttcccggtgggtgtcaggatcactcccactagggactctgcgctaattacctgagcgaccaggactacatttcccaagaggctctgctccaggagtccaggaaagacgaggcaccttggccgcggggcctgctgggacttgtagttgcctagacagggcaccaccctgcacttccggacccgccgctggaggcgccgtgaggcgttggtgtctcctggatgctactagccccaacgccggggctttgcatggggcccaggggaggcctgagcttggatttacactgtaataaagactcctgtggaaaaaaaaaaaaa

SEQ ID NO: 2829 - DNA, 650 bp, Homo Sapiens
tgcagaagtcctggtaatctggtccttgttcccgtctggataccagcttccttcagcagcgcaggcggtggtccctgaggcccgtggaaggagtcaaacttgcgggaattttgcagtttatctgcagggctgttgtttccagcaagacccaaagctagaaaaggaggaggaagaaactgacccgatcagtgccagaagtcattgtattcaaagaagaataagcaagaaagaaaagaaggacggaagagaggtagacagatacaagatgaaatcctgtcaaaaaatggaaggaaaaccagaaaatgagagtgacaccaaagcatgaggaagagccaaagcctgaggaaaagccagaagaggaggagaagctagaggaggaggccaaagcaaaaggaacttttagagaaaggctgattcaatctctccaggcagtttaaagaagatatacacaacaggcatttaagcaatgacagatatgttcagagaagtggctgaaatagatgagactaacggagagtcagaaacaaacttatagtgatgcgtggacggttaatcgaaaccatccttaccctatttaatgtagttaccttggatttatctgatattaacaataccataatagcttgctttaatagcatttctgatatccg

SEQ ID NO: 2830 - DNA, 319 bp, Homo Sapiens
tttttttttttttttttttttccattaaaacatttttataatttgtttcattttcaaggcacaaagagtttatgtcaatcattttaatgtctaaaaatacaaagttagcactagtaacatctggtagtctaatcatttatcatgcttaaatgtaacattacaaaactacattttaaaatctgccccctaaccagatgtgaaacaacgtggacaagggtgacatgtgctaaacccaatctccaaaaacgtatggttgacaaaaacagctgactgctggggtaaaactgcagcagtcataatcgaagagcgaaagaggcca

SEQ ID NO: 2831 - DNA, 722 bp, Homo Sapiens
  misc_feature (28)..(28): n is a, c, g, or t
  misc_feature (641)..(641): n is a, c, g, or t
ctgaagctttggagcacttgtgattgcngttttctgccgcaacccctgagccgagttcctcacattcttttacctttatggactgatgggattgggtcacttttgaatgtggctttcataggaaagcagcttaaacataaatatcagaagtgatgattatcatatgatacctcagtgattttaaaagccatagaagaaacttgactatgcctggtcaccttcttggatctgctgtctaaatgatatatatatgatatatatgtgatatatatatatcatatatatgatatatatatatatatcacatatatatgatatatatatgatatatatatcacatatatatgatatatatatcatatatatgatatatattttttttaatgcaggaaagtatactttgtaaggagcagatttttttgttctcagtggaaccctgtcaaatcgcataaaagaggaaaaaaacaaaactcattagaatgttttaaattgaatgttcgccttttacatatatttgctcttcagtatggatcccaatttgaatgttacatgttcggaaaaactttcagttgctcaagggcaataagaaaatttgaggccgggtgtggtggctcacgcctgtaatcccagcactttgggangctcaggtgggcgaattgcttgacccaagagttcgagaccagccggggcaacatggcaaaaccctgtctctactaaaaatc

SEQ ID NO: 2832 - DNA, 535 bp, Homo Sapiens
tttgggacctcatcctcaaccattttatttctgcttaaaaaaggacatacaacgtttgtagaggtctgggctcttggcaggagttctttcactcttctgccaaagcatttctccaaaccccacagagcagagatgcacgaattctcactgattctcacaatcaaacaccatgtcccatctgctactgtctcaagttctatcccttataagccaaagactacttcccacacacaacctcacaacaaacatgaaggagcctaaggcctgcctttaacactgcacatgttcattttaccatttgctgaagttgttttagaaaactgtatgatatgaaatatattgaagctcaaacattaatcacatccaagtgtactattgttagtgacgggatctatacgtcaaatagcaaagcatttacccctgtaatgcttttagattcacagaagaatctagatagaaccaaatacatatactgccatggccatgtgattttcaagtattaaaagttcatttgcataaggaatcaacctgagat

SEQ ID NO: 2833 - DNA, 482 bp, Homo Sapiens
  misc_feature (20)..(20): n is a, c, g, or t
tttttttttttttttttganaggctcagcagcatttattttctagttttaagaaaatttgattattcttgtatgaggtctaaagtgtgtatctatcagtccaatcaagcttttaaattttcggaaatactaaatttctaaatcataaagcgtcatttaaaaataattaattgtttcagtccaaaaatagcgtgggtcaaactggaattttcaaagtgacgtatctgtggatgatatgcttatggtaccaaaaagactctcaaaaaccaatactcccacgggcaagggaatagccaagtttgttgcggtttccaatgaatgacatcagccctgtgtaggtctcaatcaaaatgggttcagttaacaccatcagtttctttcctcttccagatccagttgaattcttgtgggcattctggatagctggaacaagcttagacattgaaccagacaacttgtaaatttcaaggaatttctcactgg

SEQ ID NO: 2834 - DNA, 497 bp, Homo Sapiens
ttttttgcacaggcaggctttattctttctctctgcgtgtctgcaggatgccagtctatgaggaccaaaagctcattccctgggaaagggagtcagctctaaatgggttttcttcacctctgattattctctcctgtaacggaacccttggagagcctctattttcaagttatttagaaaatgagacctcttacttaaaaaaagtcatgtggtattaaatgtcttcttgtcctcagaatattaggttagtgcaaaagaaattgcagtttttgtcattacttttaatggcaaaaactgcaattagttttgcaccaacctaatacttcttagtcatacttcccctcagttctccaagccaagaagctcttatttgaacctatccttaaaaaagtgtttacaatagcagcccgtgacctgttgcagcatctcagccccttcctattgtttcctctcaactctgaacctcagtcccaccttgcggcgcactggaaccaccg

SEQ ID NO: 2835 - DNA, 364 bp, Homo Sapiens
tttttttttttttttttagaaaacatatgcgccatttattttgttttataaacttttgttaaaacacagaagagtaagaaatgttttttgtttctttgccccatcaggcggcagtgatgggggctcaggggtcagcgcaagacctaatgacattcaaacccacagaaagatgtgggtcgttctgatgggacccagcccgctttgataattgcttgatgtaaatttcacaattcatcttaatcagggcagatcacagaaaaatttggcaaaagtaattggcttggtaatgacaagaaatagaagagcgttcatttctgaccctctcctctcctctgtccactctcaggagagccatgcggatttt

SEQ ID NO: 2836 - DNA, 432 bp, Homo Sapiens
taaatgatgtaatggtctataaggtagtaatctggcacagcttcagtaatgtgtgctgtgtttgtaaaaaggtgaagtactttattggcattttctaagccctctgacattgttagtgtctgggttggttggtttgcattttactattatggtggaatctgtgttccttcaccattggttaagtctgaggaactaacagtgaaattcattgatggccaacttggataaaaatgaagaatgatattttcccagtttactacacatggaccaatagtgattatttgggagagaacactgggtagtattgtttgacttaagaaccttaaatatattgaaaagtaatggcattcttgctcatgatttgcatttgttagtgaggtctcaccatagtattttaatgtagcttcttattaaaattttattcataaatag

SEQ ID NO: 2837 - DNA, 360 bp, Homo Sapiens
tttagatgtttccaatacctcagtttattcaaaggcgaattggaaagtcctttactggatattgtagagctgattgatgtaagcattcactgggactagtgaggagctaggcttgttgatatgtaagttttctttatgaactgaaaggctttctgtcactgaaattattttctaacaaaggagttattcacattatgtttctgtctcagaaaattgagtcccctacacaatttattccctgaaattgttttgaactgacccatccagataatcctgcacctggtagacatgggacattcaggggaagaatgaacttgggacacaaaattagatatgagatactaagttgcacatgctcat

SEQ ID NO: 2838 - DNA, 2593 bp, Homo Sapiens
gcagagcgggtggtgatcttcagcaagagctactgtccccatagtactcgggtgaaagaactcttttcttctttgggagtcgaatgtaatgtcttggaacttgatcaagttgatgatggggccagggttcaagaagtgctgtcagaaatcactaatcagaaaactgtgcccaatattttcgtgaataaagtgcatgtaggtggatgtgaccaaactttccaggcatatcagagtggtttgttacagaagctccttcaggaagatttggcatatgattatgatctcatcatcatcggtggtggttctggaggcctttcatgtgcgaaggaagctgccattttgggaaagaaagttatggtgctagactttgttgtcccgtcacctcagggcacatcctggggtcttggtggcacttgtgtaaatgtaggttgtattcctaagaaattgatgcatcaggctgcccttttggggcaggcattatgtgactcaaggaaatttggctgggaatataatcaacaagtgaggcacaactgggagacaatgacaaaagcgattcagaaccacatcagctctctaaactggggctacaggttgtctctgagggaaaaggctgtggcctatgtcaattcctatggagaatttgttgaacatcataaaataaaggcaaccaataaaaaaggacaggagacttattatactgctgcacagtttgtcatagcaacgggtgaaaggccacggtatttaggaatccaaggagataaagaatactgtattactagtgatgaccttttttctctgccttattgccctggcaaaacattagtggtgggtgcctcttatgttgccctggagtgtgcagggtttctggctggctttggcctagatgtcacagttatggtacgctcaatccttctccgtggcttcgaccaagaaatggcagaaaaagtgggttcctacatggagcagcatggtgtgaagttcctacggaaattcatacctgtgatggttcaacagttggagaaaggttcacctggaaagctgaaagtgttggctaaatccactgaaggaacagaaacaattgaaggagtctataacacagttttgttagctattggtcgtgactcctgtacaaggaaaataggcttggagaagattggtgtcaaaattaatgagaagagtggaaaaatacctgtaaatgatgtggaacagaccaatgtgccatatgtctatgctgttggtgatattttggaggataagccagagctcactcctgtcgccatacagtcaggcaagctgctagctcagagactttttggggcctctttagaaaagtgtgattatattaatgttccgactacagtgtttactcctctggagtatggttgctgtggattatctgaagagaaagctattgaagtatataaaaaagagaatctagaaatatatcatactttgttctggcctcttgaatggacagtagctggcagagagaacaacacttgttacgcaaagataatctgcaataaattcgaccatgatcgggtgataggatttcatattcttggaccaaacgccggtgaggttacccaaggatttgcagctgcaatgaaatgtgggctcacaaaacagctacttgatgacaccattggaattcaccccacatgtggggaggtgttcacgactttggaaatcacaaagtcgtcaggactagacatcactcagaaaggctgctgaggctaggcctgctgctgtttagttctccttgtcatattctcatttctctcaaagataagaatgctctcggataaaatgagcctgtgctcatgacagctgctctgttactcagggaccagtgcagggctgtcttacgacacttagatgagaaagtagacaaggaaagaggacagcagtgggcatctgccttgtggtcttgctgacagcgagaagcagtgggactgcttccttgacgccttagcttggagccccgttatgaggtgagccaaggctgactctcgcaagccaggactgagcttccctcggaaagacctttgagtggcaccattcacctaagttagcttttctggtcgctattgtttttatcccctttgctttgttgtttctgtgaaaatatattttcagttaagaaatgctataaagtagtggttttctagtgcgtgggcctagaattcacacatgctcactggtgaacagtgtctgtgggctgctgtgggctgcatttggatagctgtctgcattagcaggaagctgtacacactgtgtagggttagtcatctcttttcttttttgaggcacatttaacctactgtcaaaacgctgactcatgcttcaccctcacactcactacttggtggtgataaccttgaagctattctcccctaattaatatctcgagactgagcaaaatatctcatgtaagataaaagtacttgaattgctttttcatgttcatcttaatagtattatttccaaaagtttttaatactgtattatgtgaaatctaactaatttatctgtgaaataattccatcacagtctgtttaatgatgataaagttccataaatgaatacaggt

SEQ ID NO: 2839 - DNA, 2126 bp, Homo Sapiens
gctctgtcagtaacacatgtgtaagagccgcggagggagcgagcgagccggctagaggccagcgccgccgccgccgccgcctccgagccgggcagcaacagccccggcagcggcgcaggctccagcgcgccgggcccggccggccgcagcccccgacgcctgggtgcgcctgcctgccggcctccgcaccgtccgccgccgctcccggggctgttgtgtctgcgactgctcccggccggaggtgcagggagctcagccgagccgccgctgccatcccggagcgagcaagcgagcgagcgcgcgggagggaggaaggcggcggcggaggaggaggaggagcgggaggagcgcgggcgggggcgggggccgccgggcgggggaatatacaaagtgaagccacattgccaaacttgcagcagcgattgcagcagttgctgccgctgcgccgcgcctgaagccgcgccgcgcgggccgagggctcctgcagctgctcgcgcgcagtcggaggcggagaaggacgaagactgagactgacacttctgctcccggccgcccggcacttacgcgggggccccccaacccgccccagagcaacgcgatttaaaaaaaaaaaaaaagccgcccttagccccctcctctcctttcctgcttctgcgagaactccctccctccctccagctccgccagcccaggcgccccttccctggaagccgagcggcttcgctcgcatttcaccgccgccgcctctcgcaatattgcaatataggggaaaagcagaccatggtgaatccgggcagcagctcgcagccgcccccggtgacggccggctccctctcctggaagcggtgcgcaggctgcgggggcaagattgcggaccgctttctgctctatgccatggacagctattggcacagccggtgcctcaagtgctcctgctgccaggcgcagctgggcgacatcggcacgtcctgttacaccaaaagtggcatgatcctttgcagaaatgactacattaggttatttggaaatagcggtgcttgcagcgcttgcggacagtcgattcctgcgagtgaactcgtcatgagggcgcaaggcaatgtgtatcatcttaagtgttttacatgctctacctgccggaatcgcctggtcccgggagatcggtttcactacatcaatggcagtttattttgtgaacatgatagacctacagctctcatcaatggccatttgaattcacttcagagcaatccactactgccagaccagaaggtctgctaaaaggtcagagtaatgcagaatgcgtgccttcatctcagatttgttcatcacaggtggatcccatgtgtcttcagtagacaagtcacctttgtagctagcaccagtgccagctccatgccattgcaccttctttagtcttgattgcccttcccgcatttattggtgtattaaaatgactgaatatgaacattaaggactccatgaacctgggctaatgggagactgtagagaaaatgaaaaaagatccaccagaggacatcttggggagggggagggagctgggggggagggaaatgactaatgaagctaattaaaagaagcattcaaatctgctttctaccctcattaacaattagcagggcactggccagagtttgtaccctgtgttttaccttaacaacattctatttgctctttgtatatttaagtgttgtaaggaaacgtgtttcaatcaaaactgaccatgagataaaggaaagagatgtggcttttgtgatattctatcacaaacacttattgtatctctgtaaaatacaatgtatgtatgcatgtaagtgtttttgtcctaatgttgctactcccatggcaaagaaaaaaaaaagaatgaaaaaaagaaaaaaaatttggaaaaaaaaatcaggctcatagcagctactgtgtagaaaattccccctacttctaatttgctgaatgaagaaaaaaaaaaatcttttatttgtgatattttcagagacatttgctctagtatggtgtatttaaataataaaaacttaaaagaaaaaataaaaaaaaaaaaaaaaaaaaaaaaaaaaaaaaaaaaaaaaaaaaaaaaaaaaaaaaaaaaaaaa

SEQ ID NO: 2840 - DNA, 1055 bp, Homo Sapiens
ttttttttttttttgggagggtggggagagataacgctgtaaacttttatttttcaggaaatctggaaacctacagtctccatgcctgctcagccaagaaggagctcactgtgggcaccagagacagggacccaatgtggaaaggatgatttttggccatttttcctgttcttcaagaaaacaggagataactagaaggactagagaatggggctgccagaactagtgggaagctccctagaaatggtgacatcgcccaccaaacagaccccgccaaggctgcacctggccttatgtctccttcacctttctggccccacgcagccaccagacagccatgcccagcagcttcccacaaagccatagagtccccagagtgagccccagcagaaacacaaaaacgtcgagcaggtactgctcatgccagggctgctgaaagacatagggcttgaggtgcgtcgcgccccctgtctggaggacgggtcaatccagcccaccagccgctgtgtggggctgagcgggtgggagcgcaggatgacactggcagccactgccgcggactttatctcttgtctccatgattgtttatcttagagccatgttctgcctgagctctttactgatagaacaccaacttttggctctactcgagacagatcacacatagcccttgctgtggcaacaaggaagacaagagacttgaaagaatctgctagcagccaggactagtaggatgattgagcaaaatagcaagtggcttgggcgattcttgcctgagggcaaatcccttattgagcgaaaaaatcgatcattctactggtcctggtgaatgtatcgttacatccaaaaatacacccgaagcaaaggaaggctggtgcctagatactaatatttatgggtgctcctgccgttctgggaaactggccgctataaaaaagaacccgggggagggtggattgggcttcctccttcctacttcccgggtgggggggggggattcaaaaggaagttacaaaaggaaatcgaaaaagtaaaagcaaaacccacaaaaccgc

SEQ ID NO: 2841 - DNA, 731 bp, Homo Sapiens
tggcacgagggtcctgtagagagaaggaagattatcatccctccattcctggcctatggcgagaaaggctatgggacagtgatccccccacaggcctcgctggtctttcacgtcctcctgattgacgtgcacaacccgaaggacgctgtccagctagagacgctggagctcccccccggctgtgtccgcagagccggggccggggacttcatgcgctaccactacaatggctccttgatggacggcaccctcttcgattccagctactcccgcaaccacacctacaatacctatatcgggcagggttacatcatccccgggatggaccatgggctgcagggtgcctgcatgggggaacgccggagaattaccatccctccgcacctcgcctatggggagaatggaactggagacaagatccctggctctgccgtgctaatcttcaacgtccatgtcattgacttccacaaccctgcggatgtggtggaaatcaggacactgtcccggccatctgagacctgcaatgagaccaccaagcttggggactctgttcgataccattacaactgttctttgctggacggcacccagctgttcacctcgcatgactacggggccccccaggaggcgactctcggggccaacaaggtgatcgaaggcctggacacggacctgcatggcatgtgtgtgggagagaggccgcagctcatcgtgccaccgtacctggccca

SEQ ID NO: 2842 - DNA, 161 bp, Homo Sapiens
  misc_feature (24)..(24): n is a, c, g, or t
tgattaatttggtatggatttgtntgttttgtgtggagtttaagaaatagaacagccttaaactctacatttcaaaatacttgtatattttaaaataaagctgattagttcacaggttttgaaaaaaaaaaaaaaaaaaaaaaaaaaaaaaaaaaaaaaag

SEQ ID NO: 2843 - DNA, 1089 bp, Homo Sapiens
gcacttttacacaagataaactttctgccctcaagaataaacaatcaagtgaaggaagaaatacaagtttgtggattatagcaatataattcaattttatagtgccaaataatgctatttctccctaatagtattctgcgataagagatccttggagatgttaagaggtgacaagaaaaagttaaataattttacacaatggaaagcatattctcttctcagagacattcacattgttatataaaaggctctggaaggtttgtcagaagaaacgtatattaaagtttttctaacccaacattttacaagtaatttgagcagagaacgattctctcacaacaagatcaagatgtggtggctcattaaatcagaaataaatgtattaaataatttaatttccactgaaagatgagaatacgcataaagagagaaattcgaattttaagtggacattataaaatggggaatattttgccgtagaggaatgtggatggaaaccaccaaaggtataagaaataccaagattagaaaatgctggtcaggctgggcactgtggttcattcctgtaatcccaacactgggaggccaaggagggatgatcacttgggcccggaagttcaggatcatcctggaaaatatgtcaagacttcacctctaccagaaatttacaaattagctgggcatggtagaatgtacctgtagacctagctacttaggtggaagaatcacttgagcccagcagttcaaggtgacagtgaactacgatcaggccacttgattccagtcttggcaacagggtaagaccttgtctttaaaaaaataaaaagcaaaaaataaaatgctagttatattaggaaaaagcctgactgaggtccaaatgcatgcggaagactgtttcagcaaaggtaacatccctctatgccacagcttgattgaattttaaataaagatgatgataaaatgtacatttattaaggagataattgatgtaatgtgctcagtacaagttttggcatattacaagcattcaataaaccctacatcttattatcattaaaatattaaaaaaaaaaaaaaaaaaaaaaaaaa

SEQ ID NO: 2844 - DNA, 683 bp, Homo Sapiens
ttcggcacgagctaactatctcacaatataggtccccaaccactgaccaaactccagtccaggcagccaccagctggcctggtcttgctgcttcctttagcggcttccaaggtccagggacagggggtctgggccaccaagaggctctgctaggctgtccctgcagccacagccaccccactggacccctgcctcccatctgagaggacagccctcttcctggagctgggatctgacacttgctgataccaacggcagataccaggtcaaggattcggtgacttgaagacaggcctcctctgttgctttgagtcaatttctagtacctgggcctaaatcttgactgcacaccggtcatattattgaggtaacgagatgtgagcagaaacaacctgtgtcacacctgggcagaagctttaaaggccagtgctgcccttgttggggaagcaagtatagatatgaatcgttccacaacgcggagcgccccctgccgacccatgctgggcgtgtactataggtataagaatagtctttggagcatcatctgagatagtgagccaagatcgtgcaactgcactccagcctgagtaacagagtgagactccatctcaaaacaaacaaataaacaaaacagaataaatatactcaggatatttacaaaaaaaaaaaaaaaaaaaaaaaaa

SEQ ID NO: 2845 - DNA, 448 bp, Homo Sapiens
gcattttcatagttttatttgataaaattccatcttacattctgtgtattaaaaaaataatatttctggtgtgaggctgaggtctcctctgtgtgtgtacccaagctgaagggtggtgagaacggaccactccagtctgaggggtggaagaggtgaggaagggggccagaaagcccgacctccatcacagtgctgtggtctttccaggctcagggggcaagtcaacgtgtaggggggggagcccctttgacagcattgctaacgtgaacactcgggttcctgacacgctggaacatagttttgggtcgggttagcaacagggttcaggggggacaaacaccccggcgccaggcccttcagggtcatcaacacagtaggccagtaaccaggggcagcagtgagggccccaaacaccaccagggccaccaagctaggttcacctaagcca

SEQ ID NO: 2846 - DNA, 199 bp, Homo Sapiens
  misc_feature (39)..(39): n is a, c, g, or t
  misc_feature (54)..(54): n is a, c, g, or t
  misc_feature (93)..(93): n is a, c, g, or t
aagcgagccggcggcctgaggaggcgactgactgagcancgcacccggggagcnagggaggcgcggtgaactgagcggcccctgagctgacanatacactgcgcagctggaacggcgagcgagccgacgggcgagtgaggggcgcagccatgatcacctcggccgctggaattatttctcttctggatgaagatgaacc

SEQ ID NO: 2847 - DNA, 2535 bp, Homo Sapiens
ctgggggcggggcaggggcaggtgtagcctctgtgcctcgttgtcccctggcgctacccggacatctctcagggtgccggcaccatgaagatctggacttcggagcacgtctttgaccacccgtgggaaactgttacaacagctgcaatgcagaaatacccaaaccctatgaacccaagtgtggttggagttgatgtgttggacagacatatagatccctctggaaagttgcacagccacagacttctcagcacagagtggggactgccttccattgtgaagtctcttattggtgcagcaagaacgaaaacatatgtgcaagaacattctgtagttgatcctgtagagaaaacaatggaacttaaatctactaatatttcatttacaaacatggtttcagtagatgagagacttatatacaaaccacatcctcaggatccagaaaaaactgttttgacacaagaagccataattaccgtgaaaggagttagcctcagcagttaccttgaaggactgatggcaagtacgatatcctcaaatgctagtaaaggccgagaagcaatggaatgggtaatacataaattaaatgctgagattgaagaactgacagcctcagcaagaggaaccataaggactccaatggcagcagcagcgttttgcagagaagtgatcgtgacagttggtagacaacatcgggtactccaggtctctccaaactgactatatatttatttgttattttaaaaatacaactatattttgggtagttttttttttttttttttttgataagttggtgtaaggctatgtgacttgatcaaaacagatgcagggcctctaaataaaagggatcatctgaaattaatgttgtttgaaattactatctgattttgagggttccagtatttctgtgaaaattcaacaagaactccttggaaactggtattgatattcagtctccttaaggtagatttttcaagcttttcatacattggaactccacctgactttggaccaaccccagaacagagcagagccacctcctatagacgcccattgccctgctgctgtacacttcagcagcttgcacaagggagctcacttaaaaggagaaattgtgtagttttaaaatatattttgtgtaaaataccttactatgctataaaccaccattaaaaaccagtgttttgatttggtacttaaatatttttggagtgaaaattatcactaaagtaacatgactccaacaaaagtatggtttcattataaaagagtactgtattgatttgcccaagttttgtaacttagtaaaggtattaacttccttggatttgtactttgtgatttagtatgctgtatcgtgggctggttatgttaactgaaaaaaataaagtcattacctgagttttgcagtgctctaacttaaacagaagaacagctgttcacatcttttagcattttacatttgcctaacttaaaaattgccatgtgtcaaaatcatggttttgtaattgctaaggcatgatatgtcaggttatttgaatataattactttttgaagtaattgtgaccacaaaacatcttttttacatgaaggagctgtgtatcatttgaaattactcaaatgatgtcttgctctgaggcataaatcccaggtacttagtgtttttaataatatggtgccactgcaggatttgggggcggtggggaagaacaagcataatggtagggggaggcttggcctgaaactaaccactgagtgaattgcactgcaggttttacttaacgggaattccttatttgggatgtcaagagggcagctgcaaactgaaaaacaatccagtaaatgtactttgttttatgtattgtagcaggcaattaactactaaataatagctttgacatttgcaattgttgcatagagactatttttgctagaagatgattagctcttgcctttattttacagtgcttagtgtgataaacttctagtcatgtttcctatccaagagaccagttaatatatgtacataaaccacagaaatagtataacacactatttttaaattatcgttttcctacttaaattttgtttagcttaagacttcttaggacatttgtaaaagcaggttaaatttaataaggtttctgatttttttttgtaaccggagatagtttttacaagtgaaataacatttcagctaaataaaacatcgctaaataattgatatttgatgaaaatctgctttgtataatttctgtaaattatccttgttctgaaaaaggtgtaatgccctaatatttttaaatccttatcctttgattttttaaaaactgacctattgataaaactataaattttcattttccagtgcagttagttacctttttaaacataaatgcacaacaagcaaatgaatttaagagaactaaactggaataagtgttcataaatgaaacccttggactatttaataaagttgaaatgtgaattaaggaaaacttttgttaataaaaactttcttttaaaaaaaa

SEQ ID NO: 2848 - DNA, 1662 bp, Homo Sapiens
ggatcagcttccagcccagtcggcccggcccgggggccatggagctccgagcggcggatcgcgagcctcctgcgaaccccagcctgcacgcccggttagcattcggccgggagatgcggcagtggaatctggaagggcggtgaaaaacctacgtcctgccctcgcccggcctctccattcgtcccccgggtagagaggtgcccggctcccaccccttcccagccccagccctggagacagcagcccctagactactgagggacagcgacagtatgaaggctccgggtcggctcgtgctcatcatcctgtgctccgtggtcttctctgccgtctacatcctcctgtgctgctgggccggcctgcccctctgcctggccacctgcctggaccaccacttccccacaggctccaggcccactgtgccgggacccctgcacttcagtggatatagcagtgtgccagatgggaagccgctggtccgcgagccctgccgcagctgtgccgtggtgtccagctccggccaaatgctgggctcaggcctgggtgctgagatcgacagtgccgagtgcgtgttccgcatgaaccaggcgcccaccgtgggctttgaggcggatgtgggccagcgcagcaccctgcgtgtcgtctcacacacaagcgtgccgctgctgctgcgcaactattcacactacctccagaaggcccgagacacgctctacatggtgtggggccagggcaggcacatggaccgggtgctcggcggccgcacctaccgcacgctgctgcagctcaccaggatgtaccccggcctgcaggtgtacaccttcacggagcgcatgatggcctactgcgaccagatcttccaggacgagacgggcaagaaccggaggcagtcgggctccttcctcagcaccggctggttcaccatgatcctcgcgctggagctgtgtgaggagatcgtggtctatgggatggtcagcgacagctactgcagggagaagagccacccctcagtgccttaccactactttgagaagggccggctagatgagtgtcagatgtacctggcacacgagcaggcgccccgaagcgcccaccgcttcatcactgagaaggcggtcttctcccgctgggccaagaagaggcccatcgtgttcgcccatccgtcctggaggactgagtagcttccgtcgtcctgccagccgccatgccgttgcgaggcctccgggatgtcccatcccaagccatcacactccacaaaaacatttaatttatggatcctgcctcctgccacgtgctgggtggacctaaggttccttcccaccccattctggcgacacttggagccatctcaggctccactccctgagtaattcatggcatttgggggctcaccccacctccaggtctgtcaagtggcctttgtccctggggctgatggcccccaactcaccagcatcatgaccttgtgccagtcctggtcctccctccccagccgcccctaccaccttttggtgccacacttctcaggctggccgccctggttggggcagccgagagcctggggttcattggtgaaggggccttggagttgtgactgccggggccgtatcaggaacgtacgggtaaatgtgtgttttctggaaaaaaaaaaaaaaaaaaaaa

SEQ ID NO: 2849 - DNA, 347 bp, Homo Sapiens
  misc_feature (311)..(312): n is a, c, g, or t
  misc_feature (314)..(314): n is a, c, g, or t
tatacggctgcgagaagacgacagaagggcaattgagaaccataacaagaaaagacatcgtcattccgagtaggaaaagccacctgcctgcagggacaccagcagcctacctcctaccccagctgtctgttgagagcagtgctgaccccagcagttagggactggctgcatagcatacttgttgggggtaaaacttgttgcttttatgtgtgcttgaaaacatttttcaaagttacacaacagaaatgcaatcatattgtttatttttaagtgttctataatgttaaataaaactttgatcatctacaaannanaaaaaaaaaaaaaaaaaaaaaaggtcgtatcga

SEQ ID NO: 2850 - DNA, 412 bp, Homo Sapiens
atggccggtgaagagtttgctaaagggtggggggtttcttggtgaggtgataaaaatgttctaaaattgactgtggtgatgtacaaatctctgaataaatatactaaaagtcattgaactgtatgctttaaatgggtgatcttatatggtatatgagattatatctcaataaaggttttttgtttttttttttaagtgtttccactgactgttaaggcaagagggggcatgtgttgtcagagaaactcttgctggaagggtcaggttcctaggctacccacaaaggattctgcccccaacacagccgcaccaatgacaagccaacattggtgcaaagagctgccgtgaaccacagcctaaatctttgtcttaatgggaaaacatatgaggtcagaagtcaagaaactggggt

SEQ ID NO: 2851 - DNA, 534 bp, Homo Sapiens
  misc_feature (436)..(436): n is a, c, g, or t
  misc_feature (451)..(451): n is a, c, g, or t
  misc_feature (478)..(478): n is a, c, g, or t
  misc_feature (486)..(486): n is a, c, g, or t
  misc_feature (517)..(517): n is a, c, g, or t
  misc_feature (524)..(524): n is a, c, g, or t
gctccttcgacgaccagaccccaacacaagcctgatgtagaagccacttgcttcaggtagctctaaatgtactgtctcataccatggcttaaaaaaaaaaaatccaggatgagttaaaagtgttcgtggtttcatcacctagccaaggttaatgtctgggtcttccgtttctagccagagaactggaaacaaatcactgttttgctaggagctttgcatgacctcacgccctaggctgccgggtcctggggctgtcctgatgggctgtgaaatcccacccactcccagggctgccgggtcctggggctgtcctgatggggctgtgaaatcccacccactcccctccccgcgaggcaaggacagcctctgccctgcctgcctgggggagcacggtattggggtttgcttaagggcttcagtgtttttaaacattgtnggtgattgaatttcnttgtttttaactttgaaccaagttaancccagagncagggttccttgatgattttggtaaggcatnaatttanccctgtttaa

SEQ ID NO: 2852 - DNA, 390 bp, Homo Sapiens
tttttttttttttttttttttttttttttttcaccattatttgttaattttattttgatttttaaaaggcattattcagggtacaattaacaaaaaaatcagttttttactctactggccttaggatgcttcaaaaacatcaggggaaatgatctatgctttaagagccaaaaaactcaggcctcagcaactaaaacagagaattccaaaattgtaattacaaatcaaatggtaagcctaatttcatgcccctaatattcaaatttggggacactgcaagaggaaatatcatttgcttccaaatatctggcttgaatattgctgcagttaaaggatctcgctaaggttaaacaacaaacccaaaccacttagagcttcacagtttagctg

SEQ ID NO: 2853 - DNA, 455 bp, Homo Sapiens
ttacatttttctccaaataatttattaaaaattacacttgatattcatgtggaaattaagaccaaactgcaatgttttccatttccaatgtacaaaaagttttgttcctgagaatggcaaattctaaatgataagtaaaataaatatggcatttatttaagtagactgagccacaggttaatcttaagtggtgtttggttgatgggagagaaaatcctccatcagaattgttgtaagaactttccaatgtgcttgacatgcatccgggagcagtgacttacacctgtaatcccagcactttgggaggccgaagcaggtggatcacctgaggtcaggagtttgagaccagcctgttattattttgaaaggttattctgcttttactgaaatgcaacaaacagttattgagcacctgctatattattatatagtccattcctactaggctaccgcag

SEQ ID NO: 2854 - DNA, 532 bp, Homo Sapiens
ttttttttttttagcggcgttctccacctgcgcgggcctgaatggcttcaggagcacagtcggcctgaggagttgatggttactcaccgccgtgagcccaagtaactcgccctccttcggctagaaaccctccgcctgggcccgcgcgacaggagcgcggtctctgaggggagcggcgaccccgccagccccggtctctttccctggcggcggcggcttcttccgtgggacaatatgttcaagagaatggccgaatttgggcctgactccggcgggagagtaaagggtgttactatcgttaaaccaatagtttacggtaatgttgctcggtattttggaaagaaaagagaagaagatgggcacactcatcagtggacagtatatgtgaaaccatatagaaatgaggatatgtcagcatatgtgaagaaaatccagtttaaattacatgaaagctatggcaatcctttaagagttgttactaaacctccatatgaaattactgaaacaggatggggtgaattcgaaataatca

SEQ ID NO: 2855 - DNA, 452 bp, Homo Sapiens
ttttttttttttttttttctttttttaccttttaaaaataaagaggtagaaagtggggaaccttgcttttctgggcattgggtcaagaccacacagagcgtgggagcaatggcagctggctggggctggctaaggccgcactccctttgctctgcctttggccataaccactagaccgcacgtttgcactattttccaaataaccaaaagggaagacttttaaaaccatactagaacataactttgtttttaggatgtgtttacttgttctggtaaaggtcatggggcaggattttggggaacacaactaaaaagaatgcagtaaaactggcatcataagctctctcaatttgaccacatttgagcccagttcagcaaatccaaagatacattttcaaaaatgcatatcctgtttcacacctcaccacaaagcaaacaacctaatttgcaga

SEQ ID NO: 2856 - DNA, 167 bp, Homo Sapiens
  misc_feature (9)..(9): n is a, c, g, or t
  misc_feature (13)..(13): n is a, c, g, or t
  misc_feature (154)..(154): n is a, c, g, or t
ccacagagngccntgccacaccgtgcgtcccatggggcaccttgactcttcaaaccaaaattccttaaaggggcacagcacgccttgtccgcaacctcaggggcctgggattcctgtggcgcttcctgaattccaggttggcacagatgatganggtcttagaccaa

SEQ ID NO: 2857 - DNA, 521 bp, Homo Sapiens
ctcaccttcctagaatatcaggaaatgcctgaggcataacagatagtaagcctaaaaatgacccaagaccggacgtagtctgtggcgtgcagtgtaatggagtttgtggtcagcgttcaggttatggcgagagcggtacccataaccttccaccctttttgttgggaatgaatgacgggagtctgcacccgcccccaccccatggtgcagagtggcttgtcagaccctccatagaatagagacaggcttcaaagactatttagtacttattagcagtttttaccctttttatcatgattcatgtggtagagcaagctcgcctgacacctttataatggagtacttcagtataagattagtgccccagagatactcagagttcaagagcaatgcagcctccctgttttggtaggttgttagcgaggctgttgtgggaggggagggcctgtagatggaatgatttgtaagctgggaaaggaaaaaatctaggtttttctttttttggaccatcactgggacta

SEQ ID NO: 2858 - DNA, 453 bp, Homo Sapiens
  misc_feature (439)..(439): n is a, c, g, or t
aagagccacgctgtcttgcctgaaaatgataatgtgtgtccatttggtgtgttgatttgtatagaatcatttttcaaatggctacctttgtcaatcatcagatatttatagcctacctcctatttgcggtataccatacaagattaataatagacttgaggatgaatgaggtacatgccaccattgactcctggcttctgcgtcctgcttaacattaggatagcacaggagtttaaataaacagccacccctctgtcgcatacgccctggctcacactcttctcctgccatgctttctcacaggctgtgttgtgacagggcatccaccactctacctttaatctgacctaatgttgcttatcttccaagattttgctgtattgtctgtttttccgggatactttggcaacatacttccttcacctagttttatgatganctattttctatgtt

SEQ ID NO: 2859 - DNA, 1027 bp, Homo Sapiens
gggcaagagttgggcaaaaaaatcaaggtatttggtcccggaacaaagcttatcattacagataaacaacttgatgcagatgtttcccccaagcccactatttttcttccttcaattgctgaaacaaagctccagaaggctggaacatacctttgtcttcttgagaaatttttccctgatgttattaagatacattggcaagaaaagaagagcaacacgattctgggatcccaggaggggaacaccatgaagactaacgacacatacatgaaatttagctggttaacggtgccagaaaagtcactggacaaagaacacagatgtatcgtcagacatgagaataataaaaacggagttgatcaagaaattatctttcctccaataaagacggatgtcatcacaatggatcccaaagacaattgttcaaaagatgcaaatgatacactactgctgcagctcacaaacacctctgcatattacatgtacctcctcctgctcctcaagagtgtggtctattttgccatcatcacctgctgtctgcttagaagaacggctttctgctgcaatggagagaaatcataacagacggtggcacaaggaggccatcttttcctcatcggttattgtccctagaagcgtcttctgaggatctagttgggctttctttctgggtttgggccatttcagttctcatgtgtgtactattctatcattattgtataacggttttcaaaccagtgggcacacagagaacctcactctgtaataacaatgaggaatagccacggcgatctccagcaccaatctctccatgttttccacagctcctccagccaacccaaatagcgcctgctatagtgtagacatcctgcggcttctagccttgtccctctcttagtgttctttaatcagataactgcctggaagcctttcattttacacgccctgaagcagtcttctttgctagttgaattatgtggtgtgtttttccgtaataagcaaaataaatttaaaaaaatgaaaagtt

SEQ ID NO: 2860 - DNA, 1932 bp, Homo Sapiens
aagcttggcacgaggccgccattgacacgcacagatagaacccaaagaaaggcaaagagtcctgcccggcaccggcgccgcgtgggccaaacctgcgcccgtggaggggcgcgcagagggcaccgggcgccgggagcaggcggcgcagcaccagcattgtgttagtgccgggaggccactgtgtcagcaagctgagagggaaactgaagcaagatgtcgggccggagtgggaagaagaaaatgtccaagctgtcccgttcagctagggcaggtgtcatctttccagtggggaggctgatgcgttatctgaagaaagggacgttcaagtaccggatcagcgtgggcgcccctgtctacatggcggcagtcattgagtacctggcagcggaaattctagaattggccggcaatgccgcgagggacaacaagaaggcccggatagccccgagacacatcttgctggcagttgccaatgacgaggagctcaaccagctgctaaaaggagtgaccatcgccagtggaggcgtcctgcccagaattcaccccgaactgctggccaaaaagcgagggaccaaaggcaagtcggaaacgatcctctccccacccccagagaaaagaggcaggaaggccacgtcaggcaagaagggggggaagaaatccaaggctgccaaaccacggacgtccaaaaagtccaaaccaaaggacagcgataaagaaggaacttcaaattccacctctgaagatgggccaggggatggattcaccattctgtcttctaagagccttgttctgggacagaagctgtccttaacccagagtgacatcagccatattggctccatgagagtggagggcattgtccacccaaccacagccgaaattgacctcaaagaagatataggtaaagccttggaaaaggctgggggaaaagagttcttggaaacggtaaaggagcttcgcaaatcccaaggccctttggaagtcgccgaagccgccgtcagccaatccagtggactcgcagccaaatttgtcatccactgtcacatccctcagtggggctccgacaaatgtgaagaacagcttgaagagaccatcaaaaactgcctgtcagcggcggaggacaagaagctaaagtccgtcgcgttcccgcctttccccagcggcagaaactgctttcccaaacagactgcggcccaggtgaccctcaaagccatctcagcccactttgatgactcgagcgcgtcctcgctgaagaacgtgtacttcctgctcttcgacagcgagagcatcggcatctacgtgcaggagatggccaagctcgacgccaagtagccgccgcactttccagcagggatcggaggacgacccgagtcccaagagtggggttttgctttttaaaaggagagaggaggggtgatggcaggggagtggagggtggccgggcaggtcctgccggcgcagggagccctctgcccttcacactctcctccaaaagagcctccatctgtaaggaagcaggtctccgcgaggggtttctttccatgtgttttcctcctgttgttaaaagaacttttttaaaaaaacagacctcgttttagatttatagcattgacttttacacacattcacacaagaaaaaaatcctttcaaaattcttaaatcttctgttcctcctttttccaagggaagagggcaaaaagtggcctgggctctgttggtgtgcgtgttccgtggcggagagaagaaaatgggaaagacatctcactggtgcttttctcttttgttttagtgccccccgcccccatccctataatatctgtaactactcctaaaaaggttttgattcaggcttttttttggtttcattttgtttttttaagaaaaagaaaatgaaaggaaaaaaaaaaaaaaaaaaaaaattcctgcggccgc

SEQ ID NO: 2861 - DNA, 327 bp, Homo Sapiens
  misc_feature (262)..(262): n is a, c, g, or t
  misc_feature (297)..(298): n is a, c, g, or t
gcgtcgaccgcggctgcgtcgaccctccactatgaaatcgcgtagaggctttactattcagcgtttgatgaatgcaatgcgacaggctcatgctgatggttggtttatcgtttttgacactctcacgttggctgacgaccgattagaggcgttttatgataatcccaatgctttgcgtgactattttcgtgatattggtcgtatggttcttgctgccgagggtcgcaaggctaatgattcacacgccgactgctatcagtantttttgtgtgcctgagtatggacagctaatgggtnncaacgctgccgcgaatttagtagtacgta

SEQ ID NO: 2862 - DNA, 443 bp, Homo Sapiens
  misc_feature (13)..(14): n is a, c, g, or t
gggatataattannaattagagtaataaaataaatattttaagtacttactacatattactcattaacacaaaagtaactttacgtataaaatgcatgacaagactccattataaagaagtgtctgaaagctatagggcagaaaggtatagaacacagtatagactagaaggagataaagacaatcagaagattttattcattcatttattcaacaaaaatttacagagtacctccaattatcagcagctgtgctgaaagattaggtatattacctacacagttacaaattttgctttcatgtagtctgcaggaagagagacattaatcaaagaatggcactattgacacttgtgcaggaaagggttaccgtcaacaggcctgggctgctcaaaccttgcgtattccccagagtctccaagactgggtcctgggcctggctcc

SEQ ID NO: 2863 - DNA, 2184 bp, Homo Sapiens
agtcgcctccggaggaaggaagaagaggacgccgggcgcgcagctcggtgctgattatcacaactgtttggtgacctacttcactgacctgtgaggattccttcccttcaagtactggattcttgatctttctgcatcatcaagaatggaaacagactgtaatcccatggagctaagcagtatgtcaggatttgaagaaggttcagagctgaacggttttgaaggaactgacatgaaagacatgaggctcgaagctgaagcagttgtaaatgatgttctctctgctgttaacaacatgtttgtctcgaaaagcctgcggtgtgcggatgatgtggcctatatcaatgtggaaacaaaggaaagaaacagatattgcctagaactcactgaagcagggctcaaggtggtaggctatgcttttgaccaggtagatgatcatttacagactccctaccatgaaacagtctactccttgttggatacactcagccccgcctaccgagaagcatttggaaacgcactgcttcaaagactggaagctttgaaaagagatggacagtcatgactacactttttcctttcagaggggctggtgctggtacagaatgttgatacaaagcttaaaattcttgcatatggtcatagaaaatgcatctttggttttgtgtttttatcacttgcttccaacttaggcttttggctcagaagattattgaataatgatttgtcttagtttctgtttcagtaagggaattctgaggccgttgctatgataccatcattaagacattcacatgtcttcatataatatctcttcatttcaaatcctaatcactatttcatactattacagggctttgatgctgccagcactgtcttttacataggaaattctagatttgcacagtaatagaggaattagaagtacctaactatacactttgattcagcctgctaaatcaggggttcaatactagcttggacaaactttgtagtaattaattgctaccagccttattggaaacaaattatcaactagtttcccctgcacaaattttgaaattcactgcttcacttaatctatttatattactaataatggattaataaagatgaattaattatatattacttaactagtattaaatgaaaaacagggactgaaatagttctgtattccgtgtttgcaacagccagccaactaagcagaggataaaccgttagcaaatgaatgtaataattactcatttccaagatatctaagcacataagcaaatacaggaacagacttcattctttttcttaacaaaaaagcatcttcagtgtgtgatttaaaagaaagaagactctggtttcctagaaaacaatattttggcctgtgttgattcttattctgaatgtgtgtttacataatgtacagtatatattcagaaagtatttttgcttcaacgtttactttctatgatgtagtgctttggtattcctacagcaccccaccttccccaacagatgtacagtgttcagtctccattcgaaatctacaatgtaatatgagtgcattgtatgggtttgaaaccaaaggatgaatgaagcattcagagacttaatatttgaaaaaggaatagtcagtattttatattttattacaggtactgatatttataaatttaataaactgtaccatgctgctgcatgttttcaagtacatgttgaacagtaaggattggggagttgttttttaatggtcacctaaagcagctgctatagaaatgttgaactaaaattttgcatctggtcataccttcatgcatttatcatttgcagatatttttccatcattattaaaaaacaggaacttttaggctctgaagatcatgtggaccagagcaaattaaagttcagtttgtgtcacaattcattgccagacttcattggaatgctttgtttgatgatgtatgttcattctcagctttattttcagatgcttaactgggcaatgaagtctaacttcaggttgaactttctcatgtttaatctcaggctaaatgtaaatgatatttgtaaagtttgaataaaattctgtttactcattttgagttagtatgaaaaaaagtgattgtatgtttaagaattgaaattgttcattttgtgataaatgattaattccaaaaaaaaaaaaaaaaa

SEQ ID NO: 2864 - DNA, 480 bp, Homo Sapiens
tttttttttttttttttgagtagtgacccccaattcgaagcctgtgggtaatctcatggtgcgtgagactccctcaccctccaacctgtcaaagcttgtgcgccaccgccacctcctgggcacatcttgtttcttaatcagccacgaaatcacgtgaacacttcacatgtggttttgttttgtttttcacatttagactcctgatccgtttggagtttatccctgtgagatccagaattaatttcatcatttctcagacggctaaccatttgtcttagcacctttcattataaactgcatgtttgttccaccgctctgaaattatgtttatgaaccaaatttccatgttactgggttgatgtctggatattccatttgtttcctgttcatgtgtcagtagcacacagttttaatgacagagggtgttttcgcatctgtcgggcattgcgcttttgtttgtccgcgtcgtctgcgttatga

SEQ ID NO: 2865 - DNA, 423 bp, Homo Sapiens
ttttttttttactgaatgaatcattattttattcattattattgctataggaagcatactgcactaaagcaaattcctactaacacttgaagccttgaaattttgagaaaaatataataccaaaacttttttttttttttaatactaattctactcaactttcacgctcaagtttttggccctttggcgtgaaggagacgcagtggctggaaatgaccaagcggttggagatctctttgccgcatacctgggaggcactgtcctgacagccaactaagtatgcagaggacttcagacagggcatcgctcccagggctgtacaagccacccaagccatctaccggggggcgaagtcctgaccagatgcggggcgaacgaccgcgcccgcgagatgccaggaacccgttttaccccaaagtgggc

SEQ ID NO: 2866 - DNA, 260 bp, Homo Sapiens
ttttttttcaaattacaagacctagatttagaattcagagctgcagatttaggtcccggatggtgggagtagcagcagttgttacctgcaattgtgagcattttagcgagagaagggaaaagaagtggagattctcatgtctccatgtctactcaatgcacactgttactctgattaggtttctgggctccatggtctctgaatcagtttcagttctgaagataaaagagtcatggaatgaagtaaaatgattagtcgac

SEQ ID NO: 2867 - DNA, 285 bp, Homo Sapiens
ttcccttcgggtactttcaggacaccttatgcagacacgagatcttgtacaaccagataaacctgcaagtcccaagtttatagtgacgctggatggtgtccccagccccccaggatacatgtcagatcaagaggaggacatgtgctttgaaggaatgaaacccgtaaaccaaactgcagcctcaaacaagggactcagaggtctcctccacccacagcagttgcacttgctgagcaggcagcttgaggacccaaatggtagcttttctaacgctgagatgagtga

SEQ ID NO: 2868 - DNA, 1287 bp, Homo Sapiens
gagacttttaatcatctatcccttgtgctttacgcagaccctacaatacactagaggcttcaaagaggtcaaaaattcacatgtgtagacaaattaggtcccttaagatgccaggcaaacgaagtgctaccaaaacacgcaatgactgtcctaaaagtgcgttctgggatacacctgtaaacttggatcaagttccctcccctctcctcaaaatatatcgacttgtgctgaaagaaatcacgaccgatgctcacaattctgacctcgtaattatatagggggtggttttggtttctgcgtctttccctgattcagtggcaggtaacatatttcatgtacaaaatgaactgcaacaccacggcaaacaagggacaggccctcaaagttgtcggtagggagccaggaccccgccagtggcgtggggagacaccgtactaaacaagcttgcaaacagcaggcaccttcctgccactgaggaggaagggctggctaagggaggccggggcggaggaagccaagctctgcaggccctgacaaagtcctcccggcctccacgcgtcgccatggcaacgcggggtctgtgctgcccgggattggccggcctggcggcgcccagggcccgcttggaaaagcgcgtccccgccgcgggttccgccagtttgaacttggcggggccagatgtggccggcggggcgctgggggccttacttttccctcttcctacgccggtttctctgctgacttgcagacccaggtctcggccctcctcggactcctgctcagtccctatgacgggcgcacgtgggcaggggctggaggtggtgcgctcgccgtcgccgccgctgccgctgagctgcagcaattccaccaggtcgctgttgtctccccttggccaccagagcttccagtttgacgaggacgacggtgacggggaggatgaggaagacgtggatgatgaggaagacgtggatgaagatgcccatgattcagaggccaaagtggcgagcctgagaggaatggagttacaggggtgcgccagcactcaggttgaatcagaaaataaccaagaagaacagaaacaggtgcgcttaccagaaagccgcctgacaccatgggaggtgtggtttattggcaaagaaaaagaagaacgtgaccggctgcaactgaaagctctagaggaattaaatcaacaactagaaaaaagaaaagaaatggaagaacgtgaaaaaagaaagataattgctgaagaaaagcacaaggaatgggttcagaaaaagaatgagcaaa

SEQ ID NO: 2869 - DNA, 562 bp, Homo Sapiens
ttgaatttaggtgacactatagaagagctatgacgtcgcatgcacgcgtacgtaagcttggatcctctagagcggccgcctactactactaaattcgcggccgcgtcgacttttttttttttttttaaggctcgctgcaaataatatggtaccttgcccccaaataaccgccaggacacacacacacacacacaaacacacacacacacacacacacacacacacacccttataccttcaaggaaagaaaatcttactgtcatgaacattcagcgttgatcatcttgttattccttcagattagggtgggttttattccctaacctgttactaaattacataaagtctttaaggtataaaaatgattacaggtcagaaggtggtaagcatcatctcaaaagtatctgtagtggaggcctaatcacttcctcatttcaaaacactttatcagaacaactttagagcagccttttgacttgggttcattagcccctgagggggtacaggggtggaagctggccgtctgagggcccctgaattctattgaccattttgagtggtc

SEQ ID NO: 2870 - DNA, 1794 bp, Homo Sapiens
tacagctttgattttataacatcctgctaatttttgttcttacagaaatacactttcgggaaatggcctctaaatcctggctgaattttttaaccttcctctgtggatcagcaataggatttcttttatgttctcagctatttagtattttgttgggagaaaaggttgacacccagcctaatgttcttcataatgatcctcatgcaaggcattcagatgataatggacagaatcatctagaaggacaaatgaacttcaatgcagattctagccaacataaagatgagaacacagacattgctgaaaacctctatcagaaagttagaattctttgctgggttatgaccggccctcaaaacctagagaaaaaggccaaacacgtcaaagctacttgggcccagcgttgtaacaaagtgttgtttatgagttcagaagaaaataaagacttccctgctgtgggactgaaaaccaaagaaggcagagatcaactatactggaaaacaattaaagcttttcagtatgttcatgaacattatttagaagatgctgattggtttttgaaagcagatgatgacacgtatgtcatactagacaatttgaggtggcttctttcaaaatacgaccctgaagaacccatttactttgggagaagatttaagccttatgtaaagcagggctacatgagtggaggagcaggatatgtactaagcaaagaagccttgaaaagatttgttgatgcatttaaaacagacaagtgtacacatagttcctccattgaagacttagcactggggagatgcatggaaattatgaatgtagaagcaggagattccagagataccattggaaaagaaacttttcatccctttgtgccagaacaccatttaattaaaggttatctacctagaacgttttggtactggaattacaactattatcctcctgtagagggtcctggttgctgctctgatcttgcagtttcttttcactatgttgattctacaaccatgtatgagttagaatacctcgtttatcatcttcgtccatatggttatttatacagatatcaacctaccttacctgaacgtatactaaaggaaattagtcaagcaaacaaaaatgaagatacaaaagtgaagttaggaaatccttgaaagaaaatcatgaatgaacaaaggtaatatgtctagcactgcactgaaaaaggacttctgcatttctgacatagaacactggaatcccagtgaggaattctaagtgaacattccttatagaaacctttcacatgaatgactataaactgaagctttaaatgagctgtgaagtgtgttaaaatgtgttttgatacagtaatatataaatatgtctatatatatgaggaacttgtgttttttaaatggtggccaggtagaggaactagaaaagagattttgttgcctgttttctgaccatctgtgttattgtcactgagaaactaaaatagtaaatttactaaaactacactgcaccatgttagtaataaacagatctgccttaaagaaaagaaaattttagaaagaaatattgttgctcagtgttgttaatatagctcaagaattgagtttatatttgcagtatgctataaatgatacccccctaccacacccacacacacagtttttgtctaatgaaaatgttgctgtgattatttataattggtagtatttcttccagaagaagctaaaataagactggcacttaccctgaagtgcattaataaaaccacactttaaaattaaaaaaaaaaaaaaaaaa

SEQ ID NO: 2871 - DNA, 2555 bp, Homo Sapiens
cacggggctgcgtggaaagagcgccgagcggtggcgtcgttgtcgccccctcctcgtcgggaagaatcgtttggtctcctgccgtgcccggccggtgctgctgtcgctgctgctgcccgcgcgggttgtggatgttgtcggctccgtgttgtgatgacaggagaatgtgtgtgtgtcccgggcccagacgaattggaatcccagtcagaagttccagcctgccactgttctctgatgccatgccagcaccaactcaactgttttttcctctcatccgtaactgtgaactgagcaggatctatggcactgcatgttactgccaccacaaacatctctgttgttcctcatcgtacattcctcagagtcgactgagatacacacctcatccagcatatgctaccttttgcaggccaaaggagaactggtggcagtacacccaaggaaggagatatgcttccacaccacagaaattttacctcacacctccacaagtcaatagcatccttaaagctaatgaatacagtttcaaagtgccagaatttgacggcaaaatgtcagttctatccttggatttgacagcaatcaagctgcctgcaaatgcacccattgaggaccggagaagtgcagcaacctgcttgcagaccagagggatgcttttgggggtttttgatggccatgcaggttgtgcttggtcccaggcagtcagtgaaagactcttttattatattgctggctctttggtaccccatgagactttgctagagattgaaaatgcagtggagagcggccgggcactgctacccattctccagtggcacaagcaccccaatgattactttagtaaggaggcatccaaattgtactttaacagcttgaggacttactggcaagagcttatagacctcaacactggtgagtcgactgatattgatgttaaggaggctctaattaatgccttcaagaggcttgataatgacatctccttggaggcgcaagttggtgatcctaattcttttctcaactacctggtgcttcgagtggcattttctggagccactgcttgtgtggcccatgtggatggtgttgaccttcatgtggccaatactggcgatagcagagccatgctgggtgtgcaggaagaggacggctcatggtcagcagtcacgctgtctaatgaccacaatgctcaaaatgaaagagaactagaacggctgaaattggaacatccaaagagtgaggccaagagtgtcgtgaaacaggatcggctgcttggcttgctgatgccatttagggcatttggagatgtaaagttcaaatggagcattgaccttcaaaagagagtgatagaatctggcccagaccagttgaatgacaatgaatataccaagtttattcctcctaattatcacacacctccttatctcactgctgagccagaggtaacttaccaccgattaaggccacaggataagtttctggtgttggctactgatgggttgtgggagactatgcataggcaggatgtggttaggattgtgggtgagtacctaactggcatgcatcaccaacagccaatagctgttggtggctacaaggtgactctgggacagatgcatggccttttaacagaaaggagaaccaaaatgtcctcggtatttgaggatcagaacgcagcaacccatctcattcgccacgctgtgggcaacaacgagtttgggactgttgatcatgagcgcctctctaaaatgcttagtcttcctgaagagcttgctcgaatgtacagagatgacattacaatcattgtagttcagttcaattctcatgttgtaggggcgtatcaaaaccaagaaaagtgagtggctctttactggcaattctcaaatgattacatttaaagggcagattttttaaaagatctactataataaacattttcaggtggcattctaagcatttacccttttgatactctaggggcgctccaaattgactttgcagcagggtggcagggcagaagagtctggtcctgcctagctcagatttcatggcacctgcacttgaggcaagcacttctttatcacaggtgtcttgaaacattagcttcttttaccaacctgagaaaattaggatgacctggcaaataagatcttgaatagccaaaagcaagtatcttgctgtgtgtagtctcttggttaaagtgaagaacagtactgttcacacctttcttcactgagattccagtgacatgagaacatatatttattgcatgattttctagtacacagtctatgcattattcatatacatttattttagcctaaagtggttttcaaatccagttcttcaagccataaatgaccaagatccaagcaatctgaatttgtttttgtgattatttgactggaatgcttcttaagtggaataactatactccgttatccacccgatttcctaatgtaattgaaacattttctagtttgccacacacttggagaccgtaagggtttttagtttgatctactcttctattgaagttaaaaaaaaaaaaaaaaaaa

SEQ ID NO: 2872 - DNA, 1660 bp, Homo Sapiens
tctatgaaaccaacatacatggcgtttgcatcacagttggagtcagatgtgagcccggagggcaggtgtctggcttgtccacccggaagccctgagggcagctgttcccactggctctgctgaccttgtgccttggacggctgtcctcagcgaggggccgtgcacccgctcctgagcagcgccatgggcctgctggccttcctgaagacccagttcgtgctgcacctgctggtcggctttgtcttcgtggtgagtggtctggtcatcaacttcgtccagctgtgcacgctggcgctctggccggtcagcaagcagctctaccgccgcctcaactgccgcctcgcatactcactctggagccaactggtcatgctgctggagtggtggtcctgcacggagtgtacactgttcacggaccaggccacggtagagcgctttgggaaggagcacgcagtcatcatcctcaaccacaacttcgagatcgacttcctctgtgggtggaccatgtgtgagcgcttcggagtgctggggagctccaaggtcctcgctaagaaggagctgctctacgtgcccctcatcggctggacgtggtactttctggagattgtgttctgcaagcggaagtgggaggaggaccgggacaccgtggtcgaagggctgaggcgcctgtcggactaccccgagtacatgtggtttctcctgtactgcgaggggacgcgcttcacggagaccaagcaccgcgttagcatggaggtggcggctgctaaggggcttcctgtcctcaagtaccacctgctgccgcggaccaagggcttcaccaccgcagtcaagtgcctccgggggacagtcgcagctgtctatgatgtaaccctgaacttcagaggaaacaagaacccgtccctgctggggatcctctacgggaagaagtacgaggcggacatgtgcgtgaggagatttcctctggaagacatcccgctggatgaaaaggaagcagctcagtggcttcataaactgtaccaggagaaggacgcgctccaggagatatataatcagaagggcatgtttccaggggagcagtttaagcctgcccggaggccgtggaccctcctgaacttcctgtcctgggccaccattctcctgtctcccctcttcagttttgtcttgggcgtctttgccagcggatcacctctcctgatcctgactttcttggggtttgtgggagcagcttcctttggagttcgcagactgataggagtaactgagatagaaaaaggctccagctacggaaaccaagagtttaagaaaaaggaataattaatggctgtgactgaacacacgcggccctgacggtggtatccagttaactcaaaaccaacacacagagtgcaggaaaagacaattagaaactatttttcttattaactggtgactaatattaacaaaacttgagccaagagtaaagaattcagaaggcctgtcaggtgaagtcttcagcctcccacagcgcagggtcccagcatctccacgcgcgcccgtgggaggtgggtccggccggagaggcctcccgcggacgccgtctctccagaactccgcttccaagagggacctttggctgctttctctccttaaacttagatcaaattttaaaaaaaaaaaaaaa

SEQ ID NO: 2873 - DNA, 2172 bp, Homo Sapiens
gaatgtggaggaaatcctgatgcaccaacaaggaagtttctgatcagataaggatttcaggacagttgcatgtgcaaaactattcgttgaggttccagaaacactgatatagagaccctcacagaagatacggtcccttatgcaccccactatgcttcactctttggggtgcagttagatattatgacttcagccaagctccttggtaataaatgcattggacacactgacatatttagtaggttggggcaagtatttttagaagttttcatcctaagttcacaaccaccatgcaagctgccaggggccatgtgattcctgcccagaagttcagcttaggattgaaagtctggctggccttgactccctgggctctggtcatcagcaaatcatgagtttgggcaacaaaggtcaattccatctgatgctcatttttgtgaacaatttgcctccctcttagggagaaagattgctaaaataatttttgaaaattacctaattttttttgttgttcaaaacgttgaactcctcaatctaattatatcagagccaaagtatcctgtgaaaacaaagctttatatccaaaaatgtgcttttgcaaaattctttaatctgtgtaatggagggcagagggtatggggtaggagggtgggagaaagaaaagaaaagaatttggattctaatttatgaccatcttgacatatggtcaaaggtgtcattttcctactcagtttcaattctgagttaatttcttaagccttaaataataagaacaatggacagcctggcctggcagagagtttcacagatgacttaatctgagcaccatcacagagaagtcaggactaaaccccctactgagcagggcggcggagtgtccaaaggtctcagttctgtggagcagagtaccacgctttctgtggaatggggacagggtcaccacgctcactaaaatgcagtatgttccattgcagcaaagctttcgcctgtgttcaaaatgcatgtctagcagattgcagccttttaaattaaatatatataaatggttgtatatagaatatactctggactgtgagggcatcctattttggtatgcctcctggctgtggatggcatgtccagtgctctgtgagtgttttcagtcagcacattcactatgtgtttagagattctctccctgcttacagctgaaggatgttgatacaggcatcaagaaggctgaggggcagatggggcctgcaggttaaggcattgttaacttgctccatggaaatgtccatatcttaatgagtaaaaaagtgtatttttctgatacgtaaaccagaattgtgggcgtgtaggtcacatcactatttctttagcagcaaatctgttttcccagttgagagagacaatagcttctgcacaagaatatatgatggtaggatccatctgttcaattgtgtctggaagaatctttattccaaagcgaaacctggggaaatgttttaccttcagccagatgctgtgtgtgtacttgggtcccttgtctttcctctaaggagaggtgcttgtggaaagtggaggttgtgggcatcttttcaaccttttcaatctgacctttcaacaggtcaggtgagagaaaagacaaagctatttgaacctatgtttttcttatgtccagaaatccgttctttcatcaaaccactaaaccactcgccttagcctcttctgcagtttctggtggctctatctgtgggcaagggactcctgcctgtgagaagtggccaggccctccagagcaacggggtctggcttcagggagcagtgggstgtggggaaagcaatgttcatcttggctgctccaattttataccatccatcaaggactcttgcgcttctctccacctgtgacgtagcagcattgccttctttcctcttggtgcttctgggcaaaactggaatttgaaatccagaactggcgttgtcttcttaaagagtatggttcctgcctcagttccagcctggtatggttctttgatatgccctcaaggttctcacatggaaacatcagtatcctgccattcatgttgttttaagatgttttaaaaaccaatggacaaacttcttgcttcaaggaacaaactcttaggttggcaacagcatataaaaaaaaaaaaaaaaaaaaaaaaa

SEQ ID NO: 2874 - DNA, 581 bp, Homo Sapiens
cgggagcttctagatagaaatcagaaagagattcaaggagccaaatgagcggtcagcccccaccatgcactccttgccccgtgcagagctccagccagcttcgtcaccagccccactggctcctggttggaacgaaagggtctctggttgcactgaatgcagctctcaaactggtcttgtacttgctgaataaatactgttgttcttgccttagctgctctctaggtttgtggggttaagttgccagaaaattgtgctactgtgtgtgcgtgtgcgtgcgtgtgtgtagtgctaggagtccacagtaggtctctgtcaagccgatgtcgtgatgagggcttttctgatactgacccagaagccacagaaccacaaggaaacccaaaccccctccagctgctgaggcgcaggcacagcctggggtcggatggagcctccagcaccccagcacccaggtgacttccccactcccctgtaaatgtcatggtgctaagactgtgtcaaccccaagacgacacatggtcctgtgctttggccaccgtttgaggcaaaaactaaacagtccgacacgttgtgttctg

SEQ ID NO: 2875 - DNA, 192 bp, Homo Sapiens
  misc_feature (39)..(42): n is a, c, g, or t
  misc_feature (46)..(46): n is a, c, g, or t
  misc_feature (75)..(76): n is a, c, g, or t
  misc_feature (78)..(78): n is a, c, g, or t
  misc_feature (143)..(143): n is a, c, g, or t
  misc_feature (162)..(162): n is a, c, g, or t
  misc_feature (173)..(173): n is a, c, g, or t
cggtcatcatttcgttcccagcaggccctgcgcgcggcnnnntggnggggtccaggtggaggtcttgaggctatnngntcggtatggcattggcgtccgggcccgcaaggcgacataagctggcatccgggcagcatcggccnttgggggcttcggggcccngagacgcggcngtaatgagtggggcgtgcg

SEQ ID NO: 2876 - DNA, 451 bp, Homo Sapiens
ttttctctttaagagtttttaatttataatttgttattcataattagtacaatgtagaatctgagaaatttcaaatgaagccacattagaacaaaaagaaaatactgactttttagccgcgatcacatgaatataactcgatgagtttttttcatctaagaaataagaaactctgagcagcaaatagttggccagatgagttgtttctaattagagcatcacagttctgattagtgtgtttttttagaagtgatttcccttaaatataaggaaaatgttaggaatctctgtgactacatttaattccacttggaatatagacaataatgaccttttatttaacccagcctatagttgttggattggattaaatatcactaccagggccaggtgcggtggttcacgcctgcaatcccagcactctgggaggccgaggtgggcggatcattag

SEQ ID NO: 2877 - DNA, 610 bp, Homo Sapiens
ggtgacactatagaagagctatgacgtcgcatgcacgcgtacgtaagcttggatcctctagagcggccgcctactactactaaattcgcggccgcgtcgactgtttttttttttttttgtcttgtcctcaaaacccacaaagtgaccttctgtggattatcaactgcttgccagggggtaatgccagggtatttctgtgacacccactcactgatcctggcagagggagaggaaggcatgaaagttttcctcagtctttttttatacctgagtcttgtggcctggctcccatacatcttattctggttttttgatctgaaaatcccagccccactgaagtggatattcactggccacatagactgagagtgctaggtagaccaaattgcttttcttagtctgatttattctttactcccctatcaaatgcatattcttccggtggagtaaagcaggcctcattcactccactccactccactttgaggagcctcatgggtggtcgacgcggccgcgaatttagtggtagtagtagtagtcgacccgggaattccggaccggtacctgcaggcgtaccagctttccctatagtgagtcgtattagagcttg

SEQ ID NO: 2878 - DNA, 451 bp, Homo Sapiens
  misc_feature (14)..(14): n is a, c, g, or t
  misc_feature (19)..(19): n is a, c, g, or t
  misc_feature (447)..(447): n is a, c, g, or t
cattgacggccacngaatngaatttaggtgacactatagaagagctatgacgtcgcatgcacgcgtacgtaagcttggatcctctagagcggccgcctactactactaaattcgcgggcgcgtcgacatcagactgacaatatttttaatgtataatgttaatgagtggcatgataggaacctagtgcactgctgctgagaacaacacagcggagaggaattaagcaatatctagcagagttgaagacgcatataccctatgacccaacaaatctacttgtgagtattatagaaacttgcaggccaggcgcagtggctcacacctgtaatcccagcactttgggaggccgaggcaagcggatcacctgaggtcagaagttcgagaccagcctggccaacatgtagtaaaaccccatgtctactaaaaaaaaaaaatacacaaattanccag

SEQ ID NO: 2879 - DNA, 633 bp, Homo Sapiens
ggcgcacatagcgacttggtgggcgcgtccagtgatgactgggggatcccggcaagtaacatgactaaaaagaagcgggagaatctgggcgtcgctctagagatcgatgggttagaggagaagctgtcccagtgtcggagagacctggaggccgtgaactccagactccacagccgggagctgagcccagaggccaggaggtccctggagaaggagaaaaacagcctaatgaacaaagcctccaactacgagaaggaactgaagtttcttcggcaagagaaccggaagaacatgctgctctctgtggccatctttatcctcctgacgctcgtctatgcctactggaccatgtgagcctggcacttccccacaaccagcacaggcttccacttggccccttggtcaggatcaagcaggcacttcaagcctcaataggaccaaggtgctggggtgttcccctcccaacctagtgttcaagcatggcttcctggcgcccagccttgcctccctggcctgctggggggttccgggtctccagaaggacatggtgctggtccctcccttagcccaagggagaggcaataaagaacacaaagctgttcccgtaaaaaaaaaaaaaaaaaaaaaaaaaaa

SEQ ID NO: 2880 - DNA, 583 bp, Homo Sapiens
cacgaggaaggacaaagtattcagtgaggtatcacctttatataccccctttaccaaacctgccagtctgttttcatcttctctgagatgtgctgatttaactctgcctgaggatatcagtcagttgtgtaaagatataaataatgattacctggcagaaagatctattgaagaagtgtattacctttggtgtttggctggaggtgacttggagaaagagcttgtcaacaaggaaatcattcgatccaaaccacctatctgcacactccccaattttctctttgaggatggtgaaagctttggacaaggtcgagatagaagctcgcttttagatgataccactgtgacattgtcgttatgccagctaagaaatagattgaaagatgttgggggagaagcattttacccattacttgaagatgaccagtctaatttacctcattcaaacagcaataatgagttgtctgcagctgccacgctccctttaatcatcagagagaaggatacagagtaccaactaaataaaattattctcttcgacaggctgctaaaggcttatccatataaaaaaaaccaaatctgg

SEQ ID NO: 2881 - DNA, 381 bp, Homo Sapiens
ggacaattgtgaacgttgttgttccattctttctttctccaatttcttctgcttttcacgttccattttttcaagaccttcgcgaatccaagcgggaagagtcctgcgttttactgcgtcaatttgtggaggctcctgcttcacaggaagtgcaataggtgaacgctgacgatccctgaatgatgatggcctttctcttcgattctggggaggtgctggaagtccctggagttcctggttgccataagggagatgaaatccaccttgcggtggaccataagcaggcccatgctgatagtcaaactggttcactggccccactgcaaaatattgggtggtccaccaaagttgtgattgttctggttaaatatatgcctgttg

SEQ ID NO: 2882 - DNA, 577 bp, Homo Sapiens
gtgggctcaggcccagagtgccagctttgccctatcccatagcctggagccaccacaggaggggcactccactctcttgggctcctggagcctcagaggcagagccagccgggagtgcaggagggagaacttccctgtggacgtcctgtgttctccagacgcagagaaccctcatcaaccgagggggaggtcacttccgaatccacagatggcgtgtgagtgcatggcgagcgcctccaggacacacttactgttcccttgctctggccagacgccagccggaccctgtgtgtgcgcgccgtgctgctctttgcagctgcctgcaagggttcctgcgaagaccagcaccttggggaagagcctgcggctgaacttgaactcgcagctacctgagtcagacctgtgctttttcacctctacggaagatgtcagagcgtttccctagcaatgttttagaagttacttctgtctggaaaaaaatggaaaaaatggcaaattatgttatgtataatttgataattttaaagaattaatgatgtaattattactcaaacccaaaaaaaaaaagaaaaaaaaa

SEQ ID NO: 2883 - DNA, 379 bp, Homo Sapiens
  misc_feature (164)..(164): n is a, c, g, or t
  misc_feature (336)..(336): n is a, c, g, or t
  misc_feature (349)..(349): n is a, c, g, or t
  misc_feature (369)..(369): n is a, c, g, or t
aaaataatagtggaacaatatcttcaaaaaaattactagagcaacataatgcatgatatacaatatataaaataggacagcagaatccactacagaaataaaacatgggacttgggacagattgcattatgctctgaaaagtgaagtaactaagggtaaccgtnaaagcttcgtatttatagactgcctttcccctgaggatctcagagtggttaatgttccagggagcgagggtgcttatggacttctgcaccattacttaaggcaacttcattttttgggcagaggtgccagcttggatatggaaaccacatgctgtgcaagggaccatttatnttatttaactccntttttgttaacacacctggnttctaggttg

SEQ ID NO: 2884 - DNA, 303 bp, Homo Sapiens
catccttgcctaatttcattttcttctgggtcttttgttttctttctggagaatctagcaagatatctggtggaacatctcgaggtgatgaacaaggtagagactgagattgtaggattaaaggtggtcttgagcctttaggagttccttcacttccagcaggggagcatactggctgtggagatctcaagggaaaagatgcagcattcctcattgttgaagaatctccatcgtcactacttagcctgtgcaccatgtgtaggtagtcctcacttgaaccatgtctaggattatcagcatgat

SEQ ID NO: 2885 - DNA, 346 bp, Homo Sapiens
tttttttttttactgaagggtcttttacataagtatatcaaagtcaaaccaattttgggaaatgtactccaaaaccaaagtgtgctatagcatcagcatcactgtagaaatgcagagtctcaggccttgcccaaacttcctggatcagaacgtgcgttctgacaagacctccggtgatctgtgtgtaccatcagccacaggaaggatctagaaggatccagaaggatctagatgacagagctgtctgtctctaagtcacactgaatccagctgtatgactctgtaggccatcaaacctctctgagctccactatccacacctgaaaatggggggtaggctatactt

SEQ ID NO: 2886 - DNA, 3335 bp, Homo Sapiens
gagccactttgacttaatgaaaatgactgctggcaagaggagtcccccaatcaaacctctgcttggcatgaatccctttcagaagaaccccaagcacgcgtctgtgttggcagaaagtggaatcaactatgacaagccgctgcctcccatccaggtggcatctctccgtgcagagcgaatcgcaaaagagaaaaaggctctggctgatcagcagaaggcacagcagccggccgtggcccagccacccccgccccagccgcagcccccaccacccccgcagcagccaccgccaccgctgccacaaccacaggcagcgggcagccagccgccagcagggccaccagctgtccagccccaaccccagccacagccccagacccagccacagcctgtgcaggccccagcgaaggcgcagcccgcaatcacgacggggggcagtgcagccgtactggcaggaaccattaaaacatcagttactgggacgagcatgcccactggtgccgtgagtggaaatgtgatcgtgaacaccatcgcaggggtcccagctgccaccttccagtccatcaacaagcgcctggcgtcgccagtggctcctggggccttgactacgccgggaggctctgctcccgcccaggtggtgcacacccagcccccgccacgggcagtcggctccccagccacggcgacccctgacctggtgtccatggcaacgactcagggtgttcgagcggtcacttctgtgacagcctcggccgtggtcactaccaacctgaccccagtgcagaccccggcacggtctttggtgccccaagtgtcccaagccacaggagttcagctccctggaaaaaccatcacacctgcacatttccagcttctcaggcagcagcagcagcagcagcagcaacagcagcagcagcagcagcagcagcagcagcagcagcagcagcagcaacagcagcagcagcaacagacgacgacgacctctcaggtgcaagttccacagatccagggccaggcccagtccccagcacagatcaaagctgtgggcaagctgacgccggaacacctcatcaaaatgcagaagcagaaactgcagatgcccccgcagcccccaccgccacaggcccagtctgcgcccccgcagccagcagcccaagtgcaagtgcagacctcgcagccgccgcagcagcagagcccccagctcacgacggtcacggccccaaggcctggtgccctgctgacgggcaccaccgtggccaacctccaggtggcccggctcacccgggttcccacttctcaactgcagtcgcaagggcagatgcagacccaggcaccccagccagcccaggtgcccttgccgaagcctccggtggtgtccgtcccggcagctgtggtctcctcaccgggagtcaccaccctgcccatgaacgtcgcggggatcagcgtggcgatcggtcagccacagaaggcagcaggacagaccgtggtggacccagcccgtgcacatgcagcagctgctgaagctgaagcagcaggccgtccagcagcagaaggccatccagccccaggctgcacagggcccggcagccgtccagcagaagatcaccgcacagcagatcaccacccctggcgcgcagcagaaggttgcctacgccgcgcagcmggcccttaagaacccagtttcttaccacacccatctcccaggcccagaaactggccggggcccagcaagtgcagacccagatccaggttgcaaaacttcctcaagttgttcaacagcaaacacccgtggccagcatccagcaagttgcctctgcttcccagcaggcttctccacagactgtggcgctcacgcaggcgacggcggccgggcagcaggtgcagatgatccctgcagtgaccgcgactgcccaggtggttcagcagaaactcattcagcagcaggtggtgaccacggcgtcggccccgctccagactccaggcgctcccaacccagcccaggtgcccgccagctccgacagcccaagccagcagcccaagttacagatgagggtccctgctgtcaggctaaagacacctactaagcctccgtgccagtagtcagggcaagcagggctgcctctcatcttaaaagcaaaactaccttcctcacaagaaaacgctttattagtgaaccttgggaccatgtcacgcaagagattcagcactgggaaagatataattgaaacaaaatagtgtaatcattttattaaaatgcatcccacactgcaggacaaatggtccttatggagtgccgcgttctctgtactacgtggctcatggaaaaagtgacaacatggcttcctctaaatcatttcacctttcagtccccacccgcacccgtcccctagagccatagtactgtgttctgaaagccatttagaatttctttgtgagcatgtagtgctttgcacgccacagaagccgtctgccgtgtgtgaggagcatacaatggactttctaaagataaggcgtgggcttccacagtgtcttgccagagtttagttctttataccttactgaaaaatgcctcgtggtcttcgcagaggggaaggcctgtctaaagtcaatcatccgagatgggttttccattccaaagaaaggcaatatggttccttccttccctcctaaaatatgacttaacttttaagagaaatgttctgacacccacctaaacacacaaggcacgttcctggcctgtgttcaagggaaatgatcagtcattgcattgttattccaaagagcagccaacagtggcctcccccaggccctaccctgcaatgggattcgctttcatttaatggaaacttctgggactgatgcccaactcagtgcactcaagacgcatctccagttttcgggggaagctggtatttgacatagtgtgttaaacagctcctgagaacctttgggacactctgccatggctggcgtgaggcccagaggaccacgcagaggcaatggtagtacagatgtcacagctgagggtacgatgaggcctgggctcagtgagccaggacgaatgtgacagacaccccttgctgccacagtcagccctttgacgaaggtgggctggtgattctggaagtattggctatagcggtgggcccagtcaactcttccttgtggacttacgacagcagattttctctaggataagcttgtgtggttctgccagtgaagcagagaaccacctgtgctgttgtggaaggcgtgccgttgagggggaaaacgaagcccagtatttgctactgtttttcctttttttactatgacaggacaaggaaaaataaatg

SEQ ID NO: 2887 - DNA, 236 bp, Homo Sapiens
gagctcgcgcgcctgcaggtcgacactagtggagccaaagaatccccgcacgagaccgcgttctggagaacgccatcagctcgctgcttaaaattaaaccacaggttccattatgggtcgacttgatgggaaagtcatcatcctgacggccgctgctcaggggattasgccaagvagctsccttagmttttscacgagaaggtcccaagtcatagccacagacattawtgagtcca

SEQ ID NO: 2888 - DNA, 349 bp, Homo Sapiens
cacgaggcgcggcaggacgcgcccgggtctcagcggacttgtgcatgttagctgtgtagatttatgtgagggcttgtaaaactctggtcttgtaaactagtcttaagcgcttttaatatggagacagatgagagcccctctccgctcccgtgtgggcccgcaggagaagcggtgatggagagccgagctcgccccttccaagcgctgccccgtgagcagtctccaccacctcccctgcaaacgtccagtggtgcagaggtaatggacgttggctctggtggtgatggacagtccgaactccctgctgaggaccccttcaacttctacggagcttctcttctctccaaag

SEQ ID NO: 2889 - DNA, 153 bp, Homo Sapiens
  misc_feature (57)..(57): n is a, c, g, or t
  misc_feature (119)..(119): n is a, c, g, or t
cgggcaccaacgtgtacggcatcctgcgggccccgcgtgctgccagcaccgagtcgnttgtgctcaccgtgccctgtggctctgactctaccaacagccaggctgtggggctgctgctngcactggctgcccacttccgggggcagatttatt

SEQ ID NO: 2890 - DNA, 342 bp, Homo Sapiens
catttaatggaaaacttttacttagttggcttcagcctttccttttctaggataaatcaaatggttttcgttccgcaccctaacgaggcaagaaatgacaaactcctcggtccccctaggcgggcgccggagcacgacgggtcaagtcggaatcgccacgtggaaacagctctcagcatcgcgaactccaaatcccgacgtgcaacgcggggcgggatgggaacagtttgcaggaactgcagaagcctgtggcgtggaactggtgcgcctggatccacccccgtctccactctgcttaagacacaggaggctgataggcctgcgcctcaggggccgggacaa

SEQ ID NO: 2891 - DNA, 495 bp, Homo Sapiens
gcggccgccgcggccagtgggggtggtgtgggcggggacagccacctggccctgcccgccctggagcgagaccacctcaaccaccaccactacgtggctgccgccttcaaggcgcactacagcagcaaccccagcggcgggggctgcgggggcaaaggcccgcctggcctcaactccatccacgaacctctgctcttcaagagcggctccaaggagaacgtgcaaaagacgcaaactgaagccggggggccgggcgggcgaggggcgtggagccccccacccaggtcccagcccgggcgcagcctgaccgggacccctccctcccacagcccagcccaccttctgggaccacgcagggaattggggagaggtggcttccagccccatctggggctcggacccccagtaaggacagggtggggctccaggagcggagtctctgggatcctcgcctcacccccgccaatccccggtgacgggaggggacgtgggacc

SEQ ID NO: 2892 - DNA, 580 bp, Homo Sapiens
gtttttttgagacggagtctcgctctgtcgcccaggctggagtgcagtggcctgggtgacagagactgtgtctcaaaaaaaaaaaaagcttttcttaataatattactgctgcccaaagacacgactccctacactaagcagcagcaatggaaggggtgtcccccaactctcactacccaacgtggtatactacagatgtcccaaaaggattccacagcatcctagaaatggatccccagccccctccctgagttcagtggtttgacctacttttagcagatgcctaaaaacatcgaatgtactaaatacatacttgtcaacttcctgctgtaaccaacctaggcgcttgaactggaagtggtgtatgcagtgaatccccagagcctttagaccttatacctcaaggctgagaaacccacacatacattcattctctgccactgcccctatactctgcaatgaaggggagggttttgccctccatcccaccttagccaacctaagcccttccactggctttctacaggctcatttgggaagctcccttgcccagattatcctgaagtggaccctgggtcc

SEQ ID NO: 2893 - DNA, 453 bp, Homo Sapiens
ttttttaactttttaaaaaaatttttagtaagttccaattgggtgtcagaattgtgctaggcgcagggggcaacaataagcaagacagatcaagcctataccgtcttgaaatttaagtttagggaccactctctgtcaaaggatccagcgctggtaatataaattgctgaaggcctttgccttctttccaccaggcaacagaatttgtgtccccgtcactgcttcttcttgtgtgaaaaatatagcttcagtttggtccacgaatacaagaagtggtcagagaatattgtctttcaagcacacaacaagcaaaacttggccaatacacaccaatcaaatgcacttcgtttttccctgggagctcctgccacatctcagccctgcagggcagtcttcataagggagacaaaagaagggctatgcactggcactgacagttgggcaggcagtgct

SEQ ID NO: 2894 - DNA, 2119 bp, Homo Sapiens
agcctgcccttggggctgcccacgcccccttcagatcctttgctccggagagagacctgtccgagcagaggcctggactacatctcccggcgtgcctggcagtgtggtggcctctgtgcgccgtctgcactcgttgcaggcgacgatgcagagggctgtaagtgtggtggcccgtctgggctttcgcctgcaggcattccccccggccttgtgtcgtccacttagttgcgcacaggaggtgctccgcaggacaccgctctatgacttccacctggcccacggcgggaaaatggtggcgtttgcgggttggagtctgccagtgcagtaccgggacagtcacactgactcgcacctgcacacacgccagcactgctcgctctttgacgtgtctcatatgctgcagaccaagatacttggtagtgacaggtgtaagctgatggagagtctagtggttggagacattgcagagctaagaccaaaccaggggacactgtcgctgtttaccaacgaggctggaggcatcttagatgacttgattgtaaccaatacttctgagggccacctgtatgtggtgtccaacgctggctgctgggagaaagatttggccctcatgcaggacaaggtcagggagcttcagaaccagggcagagatgtgggcctggaggtgttggataatgccctgctagctctgcaaggccccactgcagcccaggtactacaggccggcgtggcagatgacctgaggaaactgcccttcatgaccagtgctgtgatggaggtgtttggcgtgtctggctgccgcgtgacccgctgtggctacacaggagaggatggtgtggagatctcggtgccggtagcgggggcagttcacctggcaacagctattctgaaaaacccagaggtgaagctggcagggctggcagccagggacagcctgcgcctggaggcaggcctctgcctgtatgggaatgacattgatgaacacactacacctgtggagggcagcctcagttggacactggggaagcgccgccgagctgctatggacttccctggagccaaggtcattgttccccagctgaagggcagggtgcagcggaggcgtgtggggttgatgtgtgagggggcccccatgcgggcacacagtcccatcctgaacatggagggtaccaagattggtactgtgactagtggctgcccctccccctctctgaagaagaatgtggcgatgggttatgtgccctgcgagtacagtcgtccagggacaatgctgctggtagaggtgcggcggaagcagcagatggctgtagtcagcaagatgccctttgtgcccacaaactactataccctcaagtgaagctggctcagggtggggctgtcccttccaggagttttgcccctacaaggggttagtcaagaagctgaggcagaactcactgggggtgggcagttaaggtggaggctgattctaattgtctggttgaggggccacaccacctattccccccacctaactcatgccattccagcttccttcaggaccctgcttctgagtgacggaccagctcacacaatgtcttgtttcagtccatgatcccactgacctactcttgcctgctggagggtaatgagaagctttggttctgccatctctcccactctgccaggtgctggctgtggagcaaaggctcacctttgtggagaggataaaacctkcccaacctacctcaccatggtttttcacattgcaaagggtaataacatgggcagtgcggacttaggctaccccctccagtttgctttccgtaaatgcaaattgtccttactgcaagtcaggaatgattgctgactcacagtagggctgctatgcctgtgtgtaaacttggggatggctgagggaacatagactcactcttccacattcccaagttggtctagtgtgctgcccagtagcaaaccatggcagactcaccacctattctgagttccagggctgctgtagggcagggtgggcttcctcccagacttgccttaccctgggctgatctttgcccctggtatgcattaatggactccactgaatcctgaaaaaaaaattaaacttccttcttacttgcca

SEQ ID NO: 2895 - DNA, 3758 bp, Homo Sapiens
gggctgtgtcatccgggattgttggaattttgcatgtgtctgttccatatcccgctggtaaccagcttacagaccttctgtcaggttggcttacattatcatcaacaggttgccgtagtgatgatatgatgctggacacaatcattgtgcactttgttaatttggtatggtggtgccacacattatcactgtacagcattaacaaggctggaatatggccctctgctgtagggggcgtggcacctgtgacttgcactggaataagtaggaggctttccccaaaggatatggagactgatgtgtgctccatatcttgaggggagctctcttggtttcctttggccgggtctgttagttacttttgaaggccatgccaacccttttaggccattaaatttttctcaaacaatagccagcctcatttctgcttcatctctgtggtaggaaccattccctactcttactccctcctcttgtccaacttccaccaaacactcaatccgagtcctggctgctttcttgcttaggtctgtggctggtaactgtggtgaaagagtcaaggtgggcagtgtttggggtaggaaatgagtagtggtgaagcagcagcagtgtgtgtgtgggtgtgggtgtgtgtgcatgcgtgtgcatttgcatgtgtgtatgttgacaaatgagagtgtagccataagatttcattgttactactagtctttgtgtacctatctggagggacattaaaaaaatatggccattctcccatctagggggttcccatctcagacttctctgataagagtaatttgagaacaaatacagattcatctatgggaaaagatgtttaaactcagcatgaaggagaaacaaatttaggagtggaaagcaaggcaggtagttaggtgatttccatgaccacatttgcttgggccagggaagtggtgcacctcttttataacaatgggagatttcagaaacagtttgagtgttggcagaccaatgccctgataagcttgtggtatagaggtaggaagggagggaggccagagattagataaaatgatggtgggtgggatcttagctctaaatgaaaagaactggacttactaagtgggtggattacttgctagccataacttttagggaagggtaggtctggagagaaggtgaagaccagcagaaatatactgtgaaattgccaaatatgtttggttgcagaaaacacagcctggctctttgtggctagatgtgacttccaacttctgaagacaggattgccaagagatgtgatctttccacatacagctcctgtccccatctctttatgtgtagagacctggatttggggtagtggggtagtaaaccatatatttccaaaagatggtgtgaagagtcgtttctcttcgtctgggatgtgattggcttttgttttttgttttttgtttttgagacggagtctcgctctgtcgctttgtcaccaggctggagtgcaatggcacaatctcagctcactgcaacctccgcctcctggcttcaagtgattctcctgcctcagcctcctgagtagctgggactataggcgcgcaccaccatgcccagctaatttttgtatttttagtagagatgggatttcaccatgttggccaggatggtcttgatctcttgacctcatgatccacccgccttggcctcccaaagtgctgggattacaggcttgagctactgcgcccggccagtgattggcttttaaattaatcacaaatgtttgataaaattctggtatgtgctaagtcccaggcttggttgatatctcagactatgatagctgtgaccttcaagaaatttctggcttggggaatctgtagtttctggttgtccaaaaaagatagttcttagtcctactttattttctacccactcaactctccagacttccctcttagtaaaggaattcataattctccctgcatcttctctgtttatttcaatgtccatgttctgagtctcaagttttcctgaagcacaggagcaggcttggccccagagcccctggctttttcaacgagcatcagaaatgctatcaatatattctctctgttgctttatcagcttctctaaatttattttgtaaggaagttagcacctccttccaggactttaaacagttgtctttgccaatttgttcctggattttccttgaacttctcaggtttccaagccacatcctagcagggcatccaggagccttgcactgaacctctcagctcttttgactttcttctggtcataggtgttgggcctcccattaggtagaagtcctttgagcagacccgaaatggccaaatgagacatcatccaagttcctccctcctttactgtctcggctttttcaagcacccctttcacctctcttttctgccttttcctcagtctgtcaagttctttggaggaaagaagttcttggtcagaggtcctaaaaccaccaccagctgggggtgctgagaatggtgaggagttggacagtcccggggcttttttgaaaggggactttatggtcatttcccctgtttagggtgagggactaagaattctcaagccttcagtttcatccatatttcaatgtaagcagaaaagcacatctcaaagccaaatagaaatgattttctactaagcctatcctttgtgattcttggttcccttggtctcttaatattaattatagagaatgggcagttgagtcagttaacatcttttcatcagaaaggagggtaatattcataaccaaaagagatgtaaaggaagtatattactgcttgaagtgtgaaaagaggaaaggagtgttatgtgaaccttttcagtagggaaattcagaaaatggaatgattcatccataggcataattcttttaggagattctgtgctcaaagggaagggaatggtttctgatccttctgaagagaaaaggaatagcatttttcttaaacctaacccagtttcagcattggagaatacagaactttttcttctagctgatggcattaatatttcttgagagagagaactcacccatggcacttttctgagcccagcagaaatcagcggagcttgggcttcgcttagcaggtttgcaattgacttcaacatgcaggcttttcacatgtgcaataatgctggaaacagaagcaccaaactgattgtgcaattactccttttgtagaagaggccaaaatcctcctcctccttcctttctcctatattcactcctccaggatcataaagcctccctcttgtttatctgtgtctgtctgtctgattggttagatttggctccccttccaagctaatggtgtcaggtggagaacagagcaaccttccctcggaaggagacaattcgaggtgctggtacatttcccttgttttctatgttcttctttctagtgggtctcatgtagagatagagatatttttttgttttagagattccaaagtatatatttttagtgtaagaaatgtaccctctccacactccatgatgtaaatagaaccaggaataaatgtgtcattgtgataatcccatagcaatttatggtaagaacaagacccctttccctcaccaccgagtctcgtggtctgtgtctgtgaaccagggcaggtaattgtgacactgcatctcatagaactctgcctgcccagatttttgtgtgctcacctcaatgggtgaaaaataaagtctgtgtaaactgttaaaaaaaaaaaaaaaaaaa
